United States Patent Application Publication US 2024/0066114 A1 - sequence listing, part 11

SEQ ID NO: 14863 - RNA, 4334 nt, Artificial Sequence
  MERS-CoV/Riyadh_14_2013__AHI48572.1 spike protein mRNA human (1-1353)(V1060P_L1061P)
aggagagucccgcagucggcguccagcggcucugcuuguucgugugugugucguugcaggccuuauucaagcuuaccaugauccacagcguguuccugcucauguuucuucugacccccacagaguccuacgucgacguuggcccugauucugugaagucagccugcauugaaguagacauacagcaaacuuucuuugauaaaacguggccaagaccgaucgacgugaguaaggcugaugggauuaucuauccccagggaaggaccuacagcaacauuacaaucacuuaucaggguuuguucccuuaccagggcgaccauggggauauguaugucuacuccgcaggacacgccaccggcacaaccccacaaaaauuauuuguggcgaauuauucucaggacguuaagcaguucgcuaacgguuuugugguccggauaggggccgcagccaauucgacuggaacagugaucauuucacccagcaccagugcuacgauccgcaaaauuuacccugcauucaugcugggcuccucuguaggcaacuuuagcgaugggaagaugggacgauucuuuaaucauacucuaguucuccugccagacgguuguggcacccuucugcgugccuucuacugcaucuuggagcccagauccgggaaccacuguccugcuggaaauucauauacaaguuuugccacuuaccauaccccagcgacagauugcagcgacggcaacuauaauaggaacgcaucucucaauuccuucaaggaauacuucaaccugcggaauuguaccuuuauguauacguacaacauaacugaggaugaaauucuggagugguucgguaucacacagaccgcccaaggggugcaccucuuuucaagccgcuaugucgacuuauacggaggcaauauguuccaguuugcuacucugccgguguacgacacaauuaaauauuacaguaucaucccccacucuauuagauccauacagagcgauaggaaggccugggcagcuuucuauguguacaaacuucagccuuugaccuuucugcuagacuucucggucgauggcuauauccggcgcgccauugacugcggguuuaacgaucucucucaacugcauuguuccuacgagucauucgacguugaaaguggaguguauagcguauccucuuuugaggcgaagccaagcgguucaguggucgaacaggccgagggcguggagugcgauuucaguccccuucuguccgggacgccuccacagguuuacaacuuuaaacgauugguguucaccaauuguaacuacaaucucacaaagcuguuaagccuguucucugucaacgacuuuacuugcucacaaaucagucccgcagcuauagccagcaauuguuauuccucucucauucuugauuacuucucguauccgcugagcaugaaguccgacuugucagugaguucugcuggaccuaucagccaguuuaacuacaaacaguccuucucaaauccaaccugccuaauccuggccacaguaccccacaaccucacuaccauuacaaagccucugaaauauagcuacaucaauaagugcucuagacuucuguccgaugacaggaccgaaguuccccaguuggugaacgcaaaucaauauaguccaugugucagcauugugcccucuacugucugggaggacggcgauuacuaccggaaacagcucuccccucuggaaggugggggcugguuaguggccucaggaaguacgguugcuaugacagagcagcugcagaugggcuuugggauaaccgugcaauauggaacugacaccaacagcguaugcccaaagcuagaguucgcgaaugauacaaaaaucgcaucgcagcucgguaacugugucgaauacucccuguauggcgugucugggcguggaguuuuucagaauugcaccgccgugggcguccgccagcaaagauucguguacgacgcuuaucagaaccuuguagguuacuauagcgaugacgggaacuacuacuguuugagggccugcgugucaguuccggucagugugauuuaugauaaggagacuaagacacaugcaacgcuguuuggcuccguggccugugaacacaucucuagcaccaugucccaguacucacggagcacucgaaguaugcucaaacgcagagacucuacauauggaccccugcagaccccugucggcugcguucuugggcugguaaauuccagcuuguucguggaggauuguaagcucccacugggacaaucguuaugcgcucugcccgacacaccuucaacucuaaccccaaggucugugcggaguguccccggugaaaugcgccucgccuccaucgcauuuaaccacccgauucagguggaucagcugaauagcucuuacuucaaacuuagcauaccuacgaacuuuuccuucggcguuacccaagaguauauccagacaacuauucagaaggugaccgucgacuguaaacaguacgugugcaauggguuccaaaagugcgaacaguugcugagagaguauggacaguuuuguucaaagaucaaccaggcgcuccauggcgcuaaucugaggcaagaugacaguguucguaacuuauucgccagcgugaaaucuucccagucaaguccaauuauccccgguuuugggggcgacuucaaucugacacuuuuggagccuguaagcauauccacuggaucucggucggcacgaagcgccaucgaagaucuccuguuugacaaggucaccauugcugaucccggcuacaugcagggguacgacgauugcaugcagcaaggaccagccucagcaagagaccuaaucugugcucaguauguggccggcuacaaagugcugccuccccucauggaugucaacauggaggcggccuauacguccagucugcuugguucuauugcugggguuggauggacagcaggcuugagcuccuucgccgcuaucccauuugcccagucaauauucuacaggcugaauggugugggcauuacccaacagguauuaucugaaaaccagaagcucaucgcaaauaaauuuaaccaggcgcugggggccaugcaaacuggauucacaaccacuaaugaggcuuuucgcaaggugcaggacgccgucaacaacaaugcacaggcucuuagcaagcuggccagugaauuguccaacaccuucggcgcaauuagcgccucuaucggggauauaauccagcggcucgacccgccugagcaagaugcucagauugacagacugaucaauggaaggcuaacaacgcugaacgcguucguggcccagcagcucguucgcucagaguccgcagcucugagugcccaacuugccaaagauaaggugaaugaaugcgucaaagcucagagcaagcgaucgggcuuuuguggucaggggacccacauugugucuuucguugugaacgcacccaauggauuguauuuuaugcaugucggcuacuauccauccaaccacaucgagguagugagcgccuacggucugugcgacgcggcuaaucccacuaacuguauagccccuguuaauggcuacuucauuaaaacaaacaauacccggaucguggacgaauggucauauacagggaguucuuuuuacgcaccagagcccaucacuuccuuaaacaccaaguaugucgccccucaggugacguaccaaaauauuagcacaaaccucccgccaccccugcuuggaaacucaaccggcaucgauuuccaggacgagcuggaugaauuuuucaagaauguaaguacuagcauuccuaacuuugggucccuaacccagauaaauacaacucuccuggacuugaccuaugagaugcugucuuuacaacagguggucaaagcucucaacgaaagcuacaucgaucugaaggagcuuggaaauuauacauacuacaacaaauggccaugguauauuuggcugggcuucaucgcagguuugguugcccucgcgcugugcguguuuuucauucuauguugcacgggguguggaaccaauugcaugggcaagcugaaaugcaaccguuguugcgacagauacgaagaguaugaucuugagccccauaaggugcacguccacugaggacuagucccuguucccagagcccacuuuuuuuucuuuuuuugaaauaaaauagccugucuuucagaucucaaaggcucuuuucagagccaccaaaaaaaaaaaaaaaaaaaaaaaaaaaaaaaaaaaaaaaaaaaaaaaaaaaaaaaaaaaaaaaaaaaaaaaaaaaaaaaaaaaaaaaaaaaaaaaaaaaaa

SEQ ID NO: 14864 - RNA, 4334 nt, Artificial Sequence
  MERS-CoV/Riyadh_14_2013__AHI48572.1 spike protein mRNA human (1-1353)(R1020Q)
aggagagucccgcagucggcguccagcggcucugcuuguucgugugugugucguugcaggccuuauucaagcuuaccaugauccacagcguguuccugcucauguuucuucugacccccacagaguccuacgucgacguuggcccugauucugugaagucagccugcauugaaguagacauacagcaaacuuucuuugauaaaacguggccaagaccgaucgacgugaguaaggcugaugggauuaucuauccccagggaaggaccuacagcaacauuacaaucacuuaucaggguuuguucccuuaccagggcgaccauggggauauguaugucuacuccgcaggacacgccaccggcacaaccccacaaaaauuauuuguggcgaauuauucucaggacguuaagcaguucgcuaacgguuuugugguccggauaggggccgcagccaauucgacuggaacagugaucauuucacccagcaccagugcuacgauccgcaaaauuuacccugcauucaugcugggcuccucuguaggcaacuuuagcgaugggaagaugggacgauucuuuaaucauacucuaguucuccugccagacgguuguggcacccuucugcgugccuucuacugcaucuuggagcccagauccgggaaccacuguccugcuggaaauucauauacaaguuuugccacuuaccauaccccagcgacagauugcagcgacggcaacuauaauaggaacgcaucucucaauuccuucaaggaauacuucaaccugcggaauuguaccuuuauguauacguacaacauaacugaggaugaaauucuggagugguucgguaucacacagaccgcccaaggggugcaccucuuuucaagccgcuaugucgacuuauacggaggcaauauguuccaguuugcuacucugccgguguacgacacaauuaaauauuacaguaucaucccccacucuauuagauccauacagagcgauaggaaggccugggcagcuuucuauguguacaaacuucagccuuugaccuuucugcuagacuucucggucgauggcuauauccggcgcgccauugacugcggguuuaacgaucucucucaacugcauuguuccuacgagucauucgacguugaaaguggaguguauagcguauccucuuuugaggcgaagccaagcgguucaguggucgaacaggccgagggcguggagugcgauuucaguccccuucuguccgggacgccuccacagguuuacaacuuuaaacgauugguguucaccaauuguaacuacaaucucacaaagcuguuaagccuguucucugucaacgacuuuacuugcucacaaaucagucccgcagcuauagccagcaauuguuauuccucucucauucuugauuacuucucguauccgcugagcaugaaguccgacuugucagugaguucugcuggaccuaucagccaguuuaacuacaaacaguccuucucaaauccaaccugccuaauccuggccacaguaccccacaaccucacuaccauuacaaagccucugaaauauagcuacaucaauaagugcucuagacuucuguccgaugacaggaccgaaguuccccaguuggugaacgcaaaucaauauaguccaugugucagcauugugcccucuacugucugggaggacggcgauuacuaccggaaacagcucuccccucuggaaggugggggcugguuaguggccucaggaaguacgguugcuaugacagagcagcugcagaugggcuuugggauaaccgugcaauauggaacugacaccaacagcguaugcccaaagcuagaguucgcgaaugauacaaaaaucgcaucgcagcucgguaacugugucgaauacucccuguauggcgugucugggcguggaguuuuucagaauugcaccgccgugggcguccgccagcaaagauucguguacgacgcuuaucagaaccuuguagguuacuauagcgaugacgggaacuacuacuguuugagggccugcgugucaguuccggucagugugauuuaugauaaggagacuaagacacaugcaacgcuguuuggcuccguggccugugaacacaucucuagcaccaugucccaguacucacggagcacucgaaguaugcucaaacgcagagacucuacauauggaccccugcagaccccugucggcugcguucuugggcugguaaauuccagcuuguucguggaggauuguaagcucccacugggacaaucguuaugcgcucugcccgacacaccuucaacucuaaccccaaggucugugcggaguguccccggugaaaugcgccucgccuccaucgcauuuaaccacccgauucagguggaucagcugaauagcucuuacuucaaacuuagcauaccuacgaacuuuuccuucggcguuacccaagaguauauccagacaacuauucagaaggugaccgucgacuguaaacaguacgugugcaauggguuccaaaagugcgaacaguugcugagagaguauggacaguuuuguucaaagaucaaccaggcgcuccauggcgcuaaucugaggcaagaugacaguguucguaacuuauucgccagcgugaaaucuucccagucaaguccaauuauccccgguuuugggggcgacuucaaucugacacuuuuggagccuguaagcauauccacuggaucucggucggcacgaagcgccaucgaagaucuccuguuugacaaggucaccauugcugaucccggcuacaugcagggguacgacgauugcaugcagcaaggaccagccucagcaagagaccuaaucugugcucaguauguggccggcuacaaagugcugccuccccucauggaugucaacauggaggcggccuauacguccagucugcuugguucuauugcugggguuggauggacagcaggcuugagcuccuucgccgcuaucccauuugcccagucaauauucuacaggcugaauggugugggcauuacccaacagguauuaucugaaaaccagaagcucaucgcaaauaaauuuaaccaggcgcugggggccaugcaaacuggauucacaaccacuaaugaggcuuuucagaaggugcaggacgccgucaacaacaaugcacaggcucuuagcaagcuggccagugaauuguccaacaccuucggcgcaauuagcgccucuaucggggauauaauccaacgccucgacgugcuggagcaggaugcucagauugaccggcuaaucaauggaagacugacaacgcucaacgcguucguugcccagcaacuggugaggucagaguccgcagcucuuagugcccaguuggccaaagauaaggucaaugaaugcgugaaagcucagagcaagcgcucgggcuuuuguggucaggggacccacauuguuucuuucguggucaacgcaccgaauggacuguauuuuaugcauguaggcuacuauccuuccaaccacaucgaggugguuagcgccuacgguuuaugcgacgcggcuaaucccacuaacuguauagccccagugaauggcuacuucauuaaaacaaacaauacccgaaucgucgacgaauggucauauacagggaguucuuuuuacgcacccgagccuaucacuucccucaacaccaaguauguggccccacaaguaacguaccagaauauuagcacaaaccugcccccuccgcuucugggaaacucaaccggcaucgauuuccaggacgagcuagaugaauuuuucaagaaugugaguacuagcauuccaaacuuugggucccucacccaaauaaauacaacucuguuggaccugaccuaugagauguuaucucuccagcaggucguuaaagcucugaacgaaagcuacaucgaucuuaaggagcugggaaauuauacauacuacaacaaauggcccugguauauuugguugggcuucaucgcaggucucguggcccuggcgcuaugcguguuuuucauucuguguugcacgggguguggaaccaauugcaugggcaaacuuaagugcaaccgguguugcgaccguuacgaagaguaugaucucgagccucauaagguccacgugcacugaggacuagucccuguucccagagcccacuuuuuuuucuuuuuuugaaauaaaauagccugucuuucagaucucaaaggcucuuuucagagccaccaaaaaaaaaaaaaaaaaaaaaaaaaaaaaaaaaaaaaaaaaaaaaaaaaaaaaaaaaaaaaaaaaaaaaaaaaaaaaaaaaaaaaaaaaaaaaaaaaaaaa

SEQ ID NO: 14865 - RNA, 2039 nt, Artificial Sequence
  MERS-CoV/Riyadh_14_2013__AHI48572.1 spike protein mRNA human (1-17_726-1296)(R1020Q)
aggagagucccgcagucggcguccagcggcucugcuuguucgugugugugucguugcaggccuuauucaagcuuaccaugauccacagcguguuccugcucauguuucuucugacccccacagaguccgacugcaaguugccuuuaggccagucucugugugcccuaccagauacuccgucaacgcucacccccagaagugucaggagcguuccuggggaaaugcggcuggcuuccauugcauucaaccauccaauacaaguggaccagcuuaauucuucguacuuuaaacugucaauccccacaaacuucagcuuuggaguaacucaggaguauauucagaccacaauccaaaaggugaccgucgauugcaaacaguacguguguaaugguuuccagaagugcgaacaguugcuccgcgaguauggccaauuuuguaguaaaauuaaccaggcccugcacggggcgaaucugcgacaggacgauuccguucguaaccucuucgcuucugugaagucaucccagucaaguccuaucauaccaggauuuggcggugacuucaauuuaacucugcuugaacccgucagcaucucuacaggguccagaucagccaggagcgcaauugaggauuugcuguuugacaaggugaccaucgccgauccuggauacaugcaaggcuaugacgauugcaugcagcagggcccagcuagugcacgggaccuaauuugugcccaauacguagcuggguauaaaguucucccgccccugauggaugugaacauggaggccgcguacacgucuucccuucugggaagcaucgccggugucggcuggacugcaggguugucgucuuucgcugccauaccuuuugcacaguccauuuucuaccgccucaauggagugggcaucacccaacaggugcugucagaaaaccagaaguuaauugcuaauaaauucaaccaggcccugggugcgaugcagacaggguuuacuaccacaaaugaggccuuccagaagguccaagacgcaguuaacaauaacgcucaggcccucaguaaacuugcuagcgaacuguccaacaccuuuggagccaucucugcaagcaucggcgacauuauacagagauuggaugugcuagagcaggacgcccaaaucgauaggcugauuaauggccggcucacgacucugaacgcuuucguagcgcagcagcuugugcgcucagagagugcagcccuguccgcucaguuggccaaggacaaggucaaugaaugcgugaaagcacaaagcaagcgaucuggguuuuguggacaggguacacauaucguuucauucguggucaacgccccaaauggccucuauuuuaugcacgugggguacuaucccaguaaccauauagagguaguuagcgcuuacggacugugcgaugccgcaaauccuaccaacuguauugcgccagugaauggcuauuucaucaaaacuaacaauacaagaaucgucgacgaaugguccuacaccgguucuucguuuuaugcucccgagccgauuacgagcuuaaacaccaaguacguggccccucaggucacauaccaaaauaucuccacuaaccugcccccaccucuacucgggaauagcaccggcauugauuuccaggacgaacuggaugaguuuuucaaaaacgugaguacaucuauacccaacuuuggaagccuuacucagaucaauaccacauugcuggaccucaccuaugagaugcugucccuucagcaaguugugaaggcacugaacgaaucauacauugauuugaaagagcucggcaauuauacuuacuauaacaaguggccaugaggacuagucccuguucccagagcccacuuuuuuuucuuuuuuugaaauaaaauagccugucuuucagaucucaaaggcucuuuucagagccaccaaaaaaaaaaaaaaaaaaaaaaaaaaaaaaaaaaaaaaaaaaaaaaaaaaaaaaaaaaaaaaaaaaaaaaaaaaaaaaaaaaaaaaaaaaaaaaaaaaaaa

SEQ ID NO: 14866 - RNA, 2120 nt, Artificial Sequence
  MERS-CoV/Riyadh_14_2013__AHI48572.1 spike protein mRNA human (1-17_726-1296)(R1020Q)_LeucineZipper
aggagagucccgcagucggcguccagcggcucugcuuguucgugugugugucguugcaggccuuauucaagcuuaccaugauccacagcguguuccugcucauguuucuucugacccccacagaguccgacugcaaguugccuuuaggccagucucugugugcccuaccagauacuccgucaacgcucacccccagaagugucaggagcguuccuggggaaaugcggcuggcuuccauugcauucaaccauccaauacaaguggaccagcuuaauucuucguacuuuaaacugucaauccccacaaacuucagcuuuggaguaacucaggaguauauucagaccacaauccaaaaggugaccgucgauugcaaacaguacguguguaaugguuuccagaagugcgaacaguugcuccgcgaguauggccaauuuuguaguaaaauuaaccaggcccugcacggggcgaaucugcgacaggacgauuccguucguaaccucuucgcuucugugaagucaucccagucaaguccuaucauaccaggauuuggcggugacuucaauuuaacucugcuugaacccgucagcaucucuacaggguccagaucagccaggagcgcaauugaggauuugcuguuugacaaggugaccaucgccgauccuggauacaugcaaggcuaugacgauugcaugcagcagggcccagcuagugcacgggaccuaauuugugcccaauacguagcuggguauaaaguucucccgccccugauggaugugaacauggaggccgcguacacgucuucccuucugggaagcaucgccggugucggcuggacugcaggguugucgucuuucgcugccauaccuuuugcacaguccauuuucuaccgccucaauggagugggcaucacccaacaggugcugucagaaaaccagaaguuaauugcuaauaaauucaaccaggcccugggugcgaugcagacaggguuuacuaccacaaaugaggccuuccagaagguccaagacgcaguuaacaauaacgcucaggcccucaguaaacuugcuagcgaacuguccaacaccuuuggagccaucucugcaagcaucggcgacauuauacagagauuggaugugcuagagcaggacgcccaaaucgauaggcugauuaauggccggcucacgacucugaacgcuuucguagcgcagcagcuugugcgcucagagagugcagcccuguccgcucaguuggccaaggacaaggucaaugaaugcgugaaagcacaaagcaagcgaucuggguuuuguggacaggguacacauaucguuucauucguggucaacgccccaaauggccucuauuuuaugcacgugggguacuaucccaguaaccauauagagguaguuagcgcuuacggacugugcgaugccgcaaauccuaccaacuguauugcgccagugaauggcuauuucaucaaaacuaacaauacaagaaucgucgacgaaugguccuacaccgguucuucguuuuaugcucccgagccgauuacgagcuuaaacaccaaguacguggccccucaggucacauaccaaaauaucuccacuaaccugcccccaccucuacucgggaauagcaccggcauugauuuccaggacgaacuggaugaguuuuucaaaaacgugaguacaucuauacccaacuuuggaagccuuacucagaucaauaccacauugcuggaccucaccuaugagaugcugucccuucagcaaguugugaaggcacugaacgaaucauacauugauuugaaagagcucggcaauuauacuuacuauaacaaguggccagacaagaucgaagagauccugagcaaaauuuaccacauagaaaaugagaucgccaggauuaagaaauuaaucggggaggcuugaggacuagucccuguucccagagcccacuuuuuuuucuuuuuuugaaauaaaauagccugucuuucagaucucaaaggcucuuuucagagccaccaaaaaaaaaaaaaaaaaaaaaaaaaaaaaaaaaaaaaaaaaaaaaaaaaaaaaaaaaaaaaaaaaaaaaaaaaaaaaaaaaaaaaaaaaaaaaaaaaaaaa

SEQ ID NO: 14867 - RNA, 4334 nt, Artificial Sequence
  MERS-CoV/England 1__YP_007188579.1 spike protein mRNA human (1-1353)
aggagagucccgcagucggcguccagcggcucugcuuguucgugugugugucguugcaggccuuauucaagcuuaccaugauccacagcguguuccugcucauguuucuucugacccccacagaguccuacgucgacguuggcccugauucugugaagucagccugcauugaaguagacauacagcaaacuuucuuugauaaaacguggccaagaccgaucgacgugaguaaggcugaugggauuaucuauccccagggaaggaccuacagcaacauuacaaucacuuaucaggguuuguucccuuaccagggcgaccauggggauauguaugucuacuccgcaggacacgccaccggcacaaccccacaaaaauuauuuguggcgaauuauucucaggacguuaagcaguucgcuaacgguuuugugguccggauaggggccgcagccaauucgacuggaacagugaucauuucacccagcaccagugcuacgauccgcaaaauuuacccugcauucaugcugggcuccucuguaggcaacuuuagcgaugggaagaugggacgauucuuuaaucauacucuaguucuccugccagacgguuguggcacccuucugcgugccuucuacugcaucuuggagcccagauccgggaaccacuguccugcuggaaauucauauacaaguuuugccacuuaccauaccccagcgacagauugcagcgacggcaacuauaauaggaacgcaucucucaauuccuucaaggaauacuucaaccugcggaauuguaccuuuauguauacguacaacauaacugaggaugaaauucuggagugguucgguaucacacagaccgcccaaggggugcaccucuuuucaagccgcuaugucgacuuauacggaggcaauauguuccaguuugcuacucugccgguguacgacacaauuaaauauuacaguaucaucccccacucuauuagauccauacagagcgauaggaaggccugggcagcuuucuauguguacaaacuucagccuuugaccuuucugcuagacuucucggucgauggcuauauccggcgcgccauugacugcggguuuaacgaucucucucaacugcauuguuccuacgagucauucgacguugaaaguggaguguauagcguauccucuuuugaggcgaagccaagcgguucaguggucgaacaggccgagggcguggagugcgauuucaguccccuucuguccgggacgccuccacagguuuacaacuuuaaacgauugguguucaccaauuguaacuacaaucucacaaagcuguuaagccuguucucugucaacgacuuuacuugcucacaaaucagucccgcagcuauagccagcaauuguuauuccucucucauucuugauuacuucucguauccgcugagcaugaaguccgacuugucagugaguucugcuggaccuaucagccaguuuaacuacaaacaguccuucucaaauccaaccugccuaauccuggccacaguaccccacaaccucacuaccauuacaaagccucugaaauauagcuacaucaauaagugcucuagauuucuuuccgaugacaggaccgaaguuccccagcuggugaacgcaaaucaauauaguccaugugucagcauugugcccucuacugucugggaggacggcgauuacuaccggaaacaguuguccccucucgaaggugggggcuggcugguggccucaggaaguacgguugcuaugacagagcaguuacagaugggcuucgggauaaccgugcaauauggaacugacaccaacagcguaugcccaaagcuggaauuugcgaaugauacaaaaaucgcaucgcagcuagguaacugugucgaguacucccucuauggcgugucugggcguggaguuuuccagaauugcaccgccgugggcguccgccagcaaagauuuguguacgacgcuuaucagaaccugguagguuacuauagcgaugacgggaacuacuacugucuuagggccugcgugucaguuccggucagugugauuuaugauaaggagacuaagacacaugcaacguuguucggcuccguggccugugaacacaucucuagcaccaugucccaguacucacggagcacucgaaguaugcugaaacgcagagacucuacauauggaccccuccagaccccugucggcugcguucuggggcuuguaaauuccagccuguuuguggaggauuguaaguugccacucggacaaucgcugugcgcuuuacccgacacaccuucaacucugaccccaaggucugugcggaguguccccggugaaaugcgccuagccuccaucgcauucaaccacccgauucagguggaucagcucaauagcucuuacuuuaaacugagcauaccuacgaacuucuccuucggcguuacccaagaguauauccagacaacuauucagaaggugaccgucgacuguaaacaguacgugugcaauggguuucaaaagugcgaacagcuuuugagagaguauggacaguucuguucaaagaucaaccaggcgcugcauggcgcuaaucucaggcaagaugacaguguucguaaccuguuugccagcgugaaaucuucccagucaaguccaauuauccccgguuucgggggcgacuuuaauuuaacacugcuugagccuguaagcauauccacuggaucucggucggcacgaagcgccaucgaagaucuccucuucgacaaggucaccauugcugaucccggcuacaugcagggguacgacgauugcaugcagcaaggaccagccucagcaagagaccugaucugugcucaguauguggccggcuacaaagugcuaccuccccugauggaugucaacauggaggcggccuauacguccagucuccuggguucuauugcugggguuggauggacagcaggccuuagcuccuuugccgcuaucccauucgcccagucaauauuuuacagguugaauggugugggcauuacccaacagguacugucugaaaaccagaaguuaaucgcaaauaaauucaaccaggcgcucggggccaugcaaacuggauuuacaaccacuaaugaggcuuuccacaaggugcaggacgccgucaacaacaaugcacaggcucugagcaaacuugccagugaacuguccaacaccuucggcgcaauuagcgccucuaucggggauauaauccagcgcuuggacgugcucgagcaagaugcucagauugaccggcugaucaauggaagacuaacaacgcugaacgcguuuguugcccagcagcucgugaggucagaguccgcagcucugagugcccaacuugccaaggauaaggucaaugaaugcgugaaagcucagagcaagcgcucgggcuucuguggucaggggacccauauuguuucuuuuguggucaacgcaccgaauggauuguauuucaugcacguaggcuacuauccuuccaaccauaucgaggugguuagcgccuacggucugugcgacgcggcuaaucccacuaacuguauagccccagugaauggcuacuuuauuaaaacaaacaauacccgaaucgucgacgaauggucauauacagggaguucuuucuacgcacccgagccuaucacuuccuuaaacaccaaguauguggccccacagguaacguaccaaaauauuagcacaaacuugcccccuccgcugcuuggaaacucaaccggcaucgauuuucaggacgagcuggaugaguucuuuaagaaugugaguacuagcauuccaaacuucgggucccuaacccagauaaauacaacucuccuggacuugaccuaugaaaugcugucuuuacaacaggucguuaaagcucucaacgaaagcuacaucgaucugaaggagcuuggaaauuauacauacuacaacaaauggcccugguauauuuggcugggcuuuaucgcagguuugguggcccucgcgcugugcguguucuuuauucuauguugcacgggguguggaaccaauugcaugggcaagcugaaaugcaaccgguguugcgaccguuacgaagaguaugaucuugagccucacaagguccacgugcauugaggacuagucccuguucccagagcccacuuuuuuuucuuuuuuugaaauaaaauagccugucuuucagaucucaaaggcucuuuucagagccaccaaaaaaaaaaaaaaaaaaaaaaaaaaaaaaaaaaaaaaaaaaaaaaaaaaaaaaaaaaaaaaaaaaaaaaaaaaaaaaaaaaaaaaaaaaaaaaaaaaaaa

SEQ ID NO: 14868 - RNA, 4334 nt, Artificial Sequence
  MERS-CoV/England 1__YP_007188579.1 spike protein mRNA human (1-1353)(V1060P_L1061P)
aggagagucccgcagucggcguccagcggcucugcuuguucgugugugugucguugcaggccuuauucaagcuuaccaugauccacagcguguuccugcucauguuucuucugacccccacagaguccuacgucgacguuggcccugauucugugaagucagccugcauugaaguagacauacagcaaacuuucuuugauaaaacguggccaagaccgaucgacgugaguaaggcugaugggauuaucuauccccagggaaggaccuacagcaacauuacaaucacuuaucaggguuuguucccuuaccagggcgaccauggggauauguaugucuacuccgcaggacacgccaccggcacaaccccacaaaaauuauuuguggcgaauuauucucaggacguuaagcaguucgcuaacgguuuugugguccggauaggggccgcagccaauucgacuggaacagugaucauuucacccagcaccagugcuacgauccgcaaaauuuacccugcauucaugcugggcuccucuguaggcaacuuuagcgaugggaagaugggacgauucuuuaaucauacucuaguucuccugccagacgguuguggcacccuucugcgugccuucuacugcaucuuggagcccagauccgggaaccacuguccugcuggaaauucauauacaaguuuugccacuuaccauaccccagcgacagauugcagcgacggcaacuauaauaggaacgcaucucucaauuccuucaaggaauacuucaaccugcggaauuguaccuuuauguauacguacaacauaacugaggaugaaauucuggagugguucgguaucacacagaccgcccaaggggugcaccucuuuucaagccgcuaugucgacuuauacggaggcaauauguuccaguuugcuacucugccgguguacgacacaauuaaauauuacaguaucaucccccacucuauuagauccauacagagcgauaggaaggccugggcagcuuucuauguguacaaacuucagccuuugaccuuucugcuagacuucucggucgauggcuauauccggcgcgccauugacugcggguuuaacgaucucucucaacugcauuguuccuacgagucauucgacguugaaaguggaguguauagcguauccucuuuugaggcgaagccaagcgguucaguggucgaacaggccgagggcguggagugcgauuucaguccccuucuguccgggacgccuccacagguuuacaacuuuaaacgauugguguucaccaauuguaacuacaaucucacaaagcuguuaagccuguucucugucaacgacuuuacuugcucacaaaucagucccgcagcuauagccagcaauuguuauuccucucucauucuugauuacuucucguauccgcugagcaugaaguccgacuugucagugaguucugcuggaccuaucagccaguuuaacuacaaacaguccuucucaaauccaaccugccuaauccuggccacaguaccccacaaccucacuaccauuacaaagccucugaaauauagcuacaucaauaagugcucuagauuucuuuccgaugacaggaccgaaguuccccagcuggugaacgcaaaucaauauaguccaugugucagcauugugcccucuacugucugggaggacggcgauuacuaccggaaacaguuguccccucucgaaggugggggcuggcugguggccucaggaaguacgguugcuaugacagagcaguuacagaugggcuucgggauaaccgugcaauauggaacugacaccaacagcguaugcccaaagcuggaauuugcgaaugauacaaaaaucgcaucgcagcuagguaacugugucgaguacucccucuauggcgugucugggcguggaguuuuccagaauugcaccgccgugggcguccgccagcaaagauuuguguacgacgcuuaucagaaccugguagguuacuauagcgaugacgggaacuacuacugucuuagggccugcgugucaguuccggucagugugauuuaugauaaggagacuaagacacaugcaacguuguucggcuccguggccugugaacacaucucuagcaccaugucccaguacucacggagcacucgaaguaugcugaaacgcagagacucuacauauggaccccuccagaccccugucggcugcguucuggggcuuguaaauuccagccuguuuguggaggauuguaaguugccacucggacaaucgcugugcgcuuuacccgacacaccuucaacucugaccccaaggucugugcggaguguccccggugaaaugcgccuagccuccaucgcauucaaccacccgauucagguggaucagcucaauagcucuuacuuuaaacugagcauaccuacgaacuucuccuucggcguuacccaagaguauauccagacaacuauucagaaggugaccgucgacuguaaacaguacgugugcaauggguuucaaaagugcgaacagcuuuugagagaguauggacaguucuguucaaagaucaaccaggcgcugcauggcgcuaaucucaggcaagaugacaguguucguaaccuguuugccagcgugaaaucuucccagucaaguccaauuauccccgguuucgggggcgacuuuaauuuaacacugcuugagccuguaagcauauccacuggaucucggucggcacgaagcgccaucgaagaucucuuguucgacaaggucaccauugcugaucccggcuacaugcagggguacgacgauugcaugcagcaaggaccagccucagcaagagaccugaucugugcucaguauguggccggcuacaaagugcuaccuccccugauggaugucaacauggaggcggccuauacguccagucuccuggguucuauugcugggguuggauggacagcaggccuuagcuccuuugccgcuaucccauucgcccagucaauauuuuacagguugaauggugugggcauuacccaacagguacugucugaaaaccagaaguuaaucgcaaauaaauucaaccaggcgcucggggccaugcaaacuggauuuacaaccacuaaugaggcuuuccacaaggugcaggacgccgucaacaacaaugcacaggcucugagcaaacuugccagugaacuguccaacaccuucggcgcaauuagcgccucuaucggggauauaauccagcgcuuggacccgccugagcaagaugcucagauugaccggcucaucaauggaagacugacaacgcuaaacgcguuuguggcccagcagcugguuaggucagaguccgcagcucucagugcccaacuggccaaagauaaggugaaugaaugcgucaaagcucagagcaagcgcucgggcuucuguggucaggggacccauauugugucuuuuguugugaacgcacccaauggacuuuauuucaugcacgucggcuacuauccauccaaccauaucgagguagugagcgccuacgguuugugcgacgcggcuaaucccacuaacuguauagccccuguuaauggcuacuuuauuaaaacaaacaauacccgaaucguggacgaauggucauauacagggaguucuuucuacgcaccagagcccaucacuucccugaacaccaaguaugucgccccucaggugacguaccaaaauauuagcacaaacuuaccgccaccccuccugggaaacucaaccggcaucgauuuucaggacgagcuugaugaguucuuuaagaauguaaguacuagcauuccuaacuucgggucccugacccagauaaauacaacucuacucgaccugaccuaugaaauguugucucugcaacagguggucaaggcuuuaaacgaaagcuacaucgaucucaaggagcugggaaauuauacauacuacaacaaauggccaugguauauuuggcuuggcuuuaucgcaggucugguugccuuggcgcucugcguguucuuuauucuguguugcacgggguguggaaccaauugcaugggcaagcuaaaaugcaaccgguguugcgaccguuacgaagaguaugaucuggagccccacaaggugcacguccauugaggacuagucccuguucccagagcccacuuuuuuuucuuuuuuugaaauaaaauagccugucuuucagaucucaaaggcucuuuucagagccaccaaaaaaaaaaaaaaaaaaaaaaaaaaaaaaaaaaaaaaaaaaaaaaaaaaaaaaaaaaaaaaaaaaaaaaaaaaaaaaaaaaaaaaaaaaaaaaaaaaaaa

SEQ ID NO: 14869 - RNA, 4148 nt, Artificial Sequence
  MERS-CoV/England 1__YP_007188579.1 spike protein mRNA human (variant)
aggagagucccgcagucggcguccagcggcucugcuuguucgugugugugucguugcaggccuuauucaagcuuaccaugauccacagcguguuccugcucauguuucuucugacccccacagaguccuacgucgacguuggcccugauucugugaagucagccugcauugaaguagacauacagcaaacuuucuuugauaaaacguggccaagaccgaucgacgugaguaaggcugaugggauuaucuauccccagggaaggaccuacagcaacauuacaaucacuuaucaggguuuguucccuuaccagggcgaccauggggauauguaugucuacuccgcaggacacgccaccggcacaaccccacaaaaauuauuuguggcgaauuauucucaggacguuaagcaguucgcuaacgguuuugugguccggauaggggccgcagccaauucgacuggaacagugaucauuucacccagcaccagugcuacgauccgcaaaauuuacccugcauucaugcugggcuccucuguaggcaacuuuagcgaugggaagaugggacgauucuuuaaucauacucuaguucuccugccagacgguuguggcacccuucugcgugccuucuacugcaucuuggagcccagauccgggaaccacuguccugcuggaaauucauauacaaguuuugccacuuaccauaccccagcgacagauugcagcgacggcaacuauaauaggaacgcaucucucaauuccuucaaggaauacuucaaccugcggaauuguaccuuuauguauacguacaacauaacugaggaugaaauucuggagugguucgguaucacacagaccgcccaaggggugcaccucuuuucaagccgcuaugucgacuuauacggaggcaauauguuccaguuugcuacucugccgguguacgacacaauuaaauauuacaguaucaucccccacucuauuagauccauacagagcgauaggaaggccugggcagcuuucuauguguacaaacuucagccuuugaccuuucugcuagacuucucggucgauggcuauauccggcgcgccauugacugcggguuuaacgaucucucucaacugcauuguuccuacgagucauucgacguugaaaguggaguguauagcguauccucuuuugaggcgaagccaagcgguucaguggucgaacaggccgagggcguggagugcgauuucaguccccuucuguccgggacgccuccacagguuuacaacuuuaaacgauugguguucaccaauuguaacuacaaucucacaaagcuguuaagccuguucucugucaacgacuuuacuugcucacaaaucagucccgcagcuauagccagcaauuguuauuccucucucauucuugauuacuucucguauccgcugagcaugaaguccgacuugucagugaguucugcuggaccuaucagccaguuuaacuacaaacaguccuucucaaauccaaccugccuaauccuggccacaguaccccacaaccucacuaccauuacaaagccucugaaauauagcuacaucaauaagugcucuagauuucuuuccgaugacaggaccgaaguuccccagcuggugaacgcaaaucaauauaguccaugugucagcauugugcccucuacugucugggaggacggcgauuacuaccggaaacaguuguccccucucgaaggugggggcuggcugguggccucaggaaguacgguugcuaugacagagcaguuacagaugggcuucgggauaaccgugcaauauggaacugacaccaacagcguaugcccaaagcuggaauuugcgaaugauacaaaaaucgcaucgcagcuagguaacugugucgaguacucccucuauggcgugucugggcguggaguuuuccagaauugcaccgccgugggcguccgccagcaaagauuuguguacgacgcuuaucagaaccugguagguuacuauagcgaugacgggaacuacuacugucuuagggccugcgugucaguuccggucagugugauuuaugauaaggagacuaagacacaugcaacguuguucggcuccguggccugugaacacaucucuagcaccaugucccaguacucacggagcacucgaaguaugcugaaacgcagagacucuacauauggaccccuccagaccccugucggcugcguucuggggcuuguaaauuccagccuguuuguggaggauuguaaguugccacucggacaaucgcugugcgcuuuacccgacacaccuucaacucugaccccaaggucugugcggaguguccccggugaaaugcgccuagccuccaucgcauucaaccacccgauucagguggaucagcucaauagcucuuacuuuaaacugagcauaccuacgaacuucuccuucggcguuacccaagaguauauccagacaacuauucagaaggugaccgucgacuguaaacaguacgugugcaauggguuucaaaagugcgaacagcuuuugagagaguauggacaguucuguucaaagaucaaccaggcgcugcauggcgcuaaucucaggcaagaugacaguguucguaaccuguuugccagcgugaaaucuucccagucaaguccaauuauccccgguuucgggggcgacuuuaauuuaacacugcuugagccuguaagcauauccacuggaucucggucggcacgaagcgccaucgaagaucucuuguucgacaaggucaccauugcugaucccggcuacaugcagggguacgacgauugcaugcagcaaggaccagccucagcaagagaccugaucugugcucaguauguggccggcuacaaagugcuaccuccccugauggaugucaacauggaggcggccuauacguccagucuccuggguucuauugcugggguuggauggacagcaggccuuagcuccuuugccgcuaucccauucgcccagucaauauuuuacagguugaauggugugggcauuacccaacagguacugucugaaaaccagaaguuaaucgcaaauaaauucaaccaggcgcucggggccaugcaaacuggauuuacaaccacuaaugaggcuuuccacaaggugcaggacgccgucaacaacaaugcacaggcucugagcaaacuugccagugaacuguccaacaccuucggcgcaauuagcgccucuaucggggauauaauccagcgcuuggacccgccugagcaagaugcucagauugaccggcucaucaauggaagacugacaacgcuaaacgcguuuguggcccagcagcugguuaggucagaguccgcagcucucagugcccaacuggccaaagauaaggugaaugaaugcgucaaagcucagagcaagcgcucgggcuucuguggucaggggacccauauugugucuuuuguugugaacgcacccaauggacuuuauuucaugcacgucggcuacuauccauccaaccauaucgagguagugagcgccuacgguuugugcgacgcggcuaaucccacuaacuguauagccccuguuaauggcuacuuuauuaaaacaaacaauacccgaaucguggacgaauggucauauacagggaguucuuucuacgcaccagagcccaucacuucccugaacaccaaguaugucgccccucaggugacguaccaaaauauuagcacaaacuuaccgccaccccuccugggaaacucaaccggcaucgauuuucaggacgagcuugaugaguucuuuaagaauguaaguacuagcauuccuaacuucgggucccugacccagauaaauacaacucuacucgaccugaccuaugaaauguugucucugcaacagguggucaaggcuuuaaacgaaagcuacaucgaucucaaggagcugggaaauuauacauacugaggacuagucccuguucccagagcccacuuuuuuuucuuuuuuugaaauaaaauagccugucuuucagaucucaaaggcucuuuucagagccaccaaaaaaaaaaaaaaaaaaaaaaaaaaaaaaaaaaaaaaaaaaaaaaaaaaaaaaaaaaaaaaaaaaaaaaaaaaaaaaaaaaaaaaaaaaaaaaaaaaaaa

SEQ ID NO: 14870 - RNA, 4148 nt, Artificial Sequence
  MERS-CoV/England 1__YP_007188579.1 spike protein mRNA human (variant)
aggagagucccgcagucggcguccagcggcucugcuuguucgugugugugucguugcaggccuuauucaagcuuaccaugauccacagcguguuccugcucauguuucuucugacccccacagaguccuacgucgacguuggcccugauucugugaagucagccugcauugaaguagacauacagcaaacuuucuuugauaaaacguggccaagaccgaucgacgugaguaaggcugaugggauuaucuauccccagggaaggaccuacagcaacauuacaaucacuuaucaggguuuguucccuuaccagggcgaccauggggauauguaugucuacuccgcaggacacgccaccggcacaaccccacaaaaauuauuuguggcgaauuauucucaggacguuaagcaguucgcuaacgguuuugugguccggauaggggccgcagccaauucgacuggaacagugaucauuucacccagcaccagugcuacgauccgcaaaauuuacccugcauucaugcugggcuccucuguaggcaacuuuagcgaugggaagaugggacgauucuuuaaucauacucuaguucuccugccagacgguuguggcacccuucugcgugccuucuacugcaucuuggagcccagauccgggaaccacuguccugcuggaaauucauauacaaguuuugccacuuaccauaccccagcgacagauugcagcgacggcaacuauaauaggaacgcaucucucaauuccuucaaggaauacuucaaccugcggaauuguaccuuuauguauacguacaacauaacugaggaugaaauucuggagugguucgguaucacacagaccgcccaaggggugcaccucuuuucaagccgcuaugucgacuuauacggaggcaauauguuccaguuugcuacucugccgguguacgacacaauuaaauauuacaguaucaucccccacucuauuagauccauacagagcgauaggaaggccugggcagcuuucuauguguacaaacuucagccuuugaccuuucugcuagacuucucggucgauggcuauauccggcgcgccauugacugcggguuuaacgaucucucucaacugcauuguuccuacgagucauucgacguugaaaguggaguguauagcguauccucuuuugaggcgaagccaagcgguucaguggucgaacaggccgagggcguggagugcgauuucaguccccuucuguccgggacgccuccacagguuuacaacuuuaaacgauugguguucaccaauuguaacuacaaucucacaaagcuguuaagccuguucucugucaacgacuuuacuugcucacaaaucagucccgcagcuauagccagcaauuguuauuccucucucauucuugauuacuucucguauccgcugagcaugaaguccgacuugucagugaguucugcuggaccuaucagccaguuuaacuacaaacaguccuucucaaauccaaccugccuaauccuggccacaguaccccacaaccucacuaccauuacaaagccucugaaauauagcuacaucaauaagugcucuagauuucuuuccgaugacaggaccgaaguuccccagcuggugaacgcaaaucaauauaguccaugugucagcauugugcccucuacugucugggaggacggcgauuacuaccggaaacaguuguccccucucgaaggugggggcuggcugguggccucaggaaguacgguugcuaugacagagcaguuacagaugggcuucgggauaaccgugcaauauggaacugacaccaacagcguaugcccaaagcuggaauuugcgaaugauacaaaaaucgcaucgcagcuagguaacugugucgaguacucccucuauggcgugucugggcguggaguuuuccagaauugcaccgccgugggcguccgccagcaaagauuuguguacgacgcuuaucagaaccugguagguuacuauagcgaugacgggaacuacuacugucuuagggccugcgugucaguuccggucagugugauuuaugauaaggagacuaagacacaugcaacguuguucggcuccguggccugugaacacaucucuagcaccaugucccaguacucacggagcacucgaaguaugcugaaacgcagagacucuacauauggaccccuccagaccccugucggcugcguucuggggcuuguaaauuccagccuguuuguggaggauuguaaguugccacucggacaaucgcugugcgcuuuacccgacacaccuucaacucugaccccagccucuguggguaguguccccggcgaaaugaggcuagcauccaucgcguucaaccacccgauucagguggaucagcucaauagcucuuacuuuaaacugagcauaccuacgaacuucuccuucgggguuacccaagaguauauccagacaacuauucagaaggugaccgucgacuguaaacaguacgugugcaauggauuucaaaagugcgaacagcuuuugcgggaguauggccaguucuguucaaagaucaaccaggcucugcauggugccaaucuccgccaagaugacaguguuagaaaccuguuugcaagcgugaaaucuucccagucaaguccaauuauccccggguucggcggagacuuuaauuuaacacugcuugagccuguaagcauauccacuggcucuaggucggcccguagcgcuaucgaagaucuucucuucgacaaggucaccauugccgaucccggguacaugcagggauacgacgauugcaugcagcaaggcccagcaucagcucgggaccugaucugugcccaguauguggcggguuacaaagugcuaccuccccugauggaugucaacauggaggccgcuuauacguccagucuccuggggucuauugcaggaguuggcuggacagccggucuuagcuccuuugcugccaucccauucgcacagucaauauuuuaccgauugaauggcguggggauuacccaacagguacugucugaaaaccagaaguuaaucgcgaauaaauucaaccaggcccucggagcuaugcaaacuggcuuuacaaccacuaaugaggccuuccacaaggugcaggacgcagucaacaacaaugcucaggcccugagcaaguuggcaagugaacuguccaacaccuucggggccauuagcgcuucuaucggagauauaauccagagauuggacccgccugagcaagaugcgcagauugacaggcucaucaauggccgccugacaacgcuaaacgccuuuguggcacagcagcugguucggucagaguccgcugcccucagugcccaacuggcuaaagauaaggugaaugaaugcgucaaagcacagagcaagagaucggguuucugugggcagggaacccauauugugucuuuuguugugaacgcccccaauggccuuuauuucaugcacgucgguuacuauccauccaaccauaucgagguagugagcgcguacggcuugugcgacgcugccaaucccacuaacuguauagcaccuguuaauggguacuuuauuaaaacaaacaauaccaggaucguggacgaauggucauauacaggaaguucuuucuacgccccagagcccaucacuucccugaacaccaaguaugucgcuccucaggugacguaccaaaauauuagcacaaacuuaccgccaccccuccugggcaacucaaccgggaucgauuuucaggacgagcuugaugaguucuuuaagaauguaaguacuagcauuccuaacuucggaucccugacccagauaaauacaacucuacucgaccugaccuaugaaauguugucucugcaacagguggucaaagcauuaaacgaaagcuacaucgaucucaaggagcugggcaauuauacauacugaggacuagucccuguucccagagcccacuuuuuuuucuuuuuuugaaauaaaauagccugucuuucagaucucaaaggcucuuuucagagccaccaaaaaaaaaaaaaaaaaaaaaaaaaaaaaaaaaaaaaaaaaaaaaaaaaaaaaaaaaaaaaaaaaaaaaaaaaaaaaaaaaaaaaaaaaaaaaaaaaaaaa

SEQ ID NO: 14871 - RNA, 4148 nt, Artificial Sequence
  MERS-CoV/England 1__YP_007188579.1 spike protein mRNA human (variant)
aggagagucccgcagucggcguccagcggcucugcuuguucgugugugugucguugcaggccuuauucaagcuuaccaugauccacagcguguuccugcucauguuucuucugacccccacagaguccuacgucgacguuggcccugauucugugaagucagccugcauugaaguagacauacagcaaacuuucuuugauaaaacguggccaagaccgaucgacgugaguaaggcugaugggauuaucuauccccagggaaggaccuacagcaacauuacaaucacuuaucaggguuuguucccuuaccagggcgaccauggggauauguaugucuacuccgcaggacacgccaccggcacaaccccacaaaaauuauuuguggcgaauuauucucaggacguuaagcaguucgcuaacgguuuugugguccggauaggggccgcagccaauucgacuggaacagugaucauuucacccagcaccagugcuacgauccgcaaaauuuacccugcauucaugcugggcuccucuguaggcaacuuuagcgaugggaagaugggacgauucuuuaaucauacucuaguucuccugccagacgguuguggcacccuucugcgugccuucuacugcaucuuggagcccagauccgggaaccacuguccugcuggaaauucauauacaaguuuugccacuuaccauaccccagcgacagauugcagcgacggcaacuauaauaggaacgcaucucucaauuccuucaaggaauacuucaaccugcggaauuguaccuuuauguauacguacaacauaacugaggaugaaauucuggagugguucgguaucacacagaccgcccaaggggugcaccucuuuucaagccgcuaugucgacuuauacggaggcaauauguuccaguuugcuacucugccgguguacgacacaauuaaauauuacaguaucaucccccacucuauuagauccauacagagcgauaggaaggccugggcagcuuucuauguguacaaacuucagccuuugaccuuucugcuagacuucucggucgauggcuauauccggcgcgccauugacugcggguuuaacgaucucucucaacugcauuguuccuacgagucauucgacguugaaaguggaguguauagcguauccucuuuugaggcgaagccaagcgguucaguggucgaacaggccgagggcguggagugcgauuucaguccccuucuguccgggacgccuccacagguuuacaacuuuaaacgauugguguucaccaauuguaacuacaaucucacaaagcuguuaagccuguucucugucaacgacuuuacuugcucacaaaucagucccgcagcuauagccagcaauuguuauuccucucucauucuugauuacuucucguauccgcugagcaugaaguccgacuugucagugaguucugcuggaccuaucagccaguuuaacuacaaacaguccuucucaaauccaaccugccuaauccuggccacaguaccccacaaccucacuaccauuacaaagccucugaaauauagcuacaucaauaagugcucuagauuucuuuccgaugacaggaccgaaguuccccagcuggugaacgcaaaucaauauaguccaugugucagcauugugcccucuacugucugggaggacggcgauuacuaccggaaacaguuguccccucucgaaggugggggcuggcugguggccucaggaaguacgguugcuaugacagagcaguuacagaugggcuucgggauaaccgugcaauauggaacugacaccaacagcguaugcccaaagcuggaauuugcgaaugauacaaaaaucgcaucgcagcuagguaacugugucgaguacucccucuauggcgugucugggcguggaguuuuccagaauugcaccgccgugggcguccgccagcaaagauuuguguacgacgcuuaucagaaccugguagguuacuauagcgaugacgggaacuacuacugucuuagggccugcgugucaguuccggucagugugauuuaugauaaggagacuaagacacaugcaacguuguucggcuccguggccugugaacacaucucuagcaccaugucccaguacucacggagcacucgaaguaugcugaaacgcagagacucuacauauggaccccuccagaccccugucggcugcguucuggggcuuguaaauuccagccuguuuguggaggauuguaaguugccacucggacaaucgcugugcgcuuuacccgacacaccuucaacucugaccccagccucuguggguaguguccccggcgaaaugaggcuagcauccaucgcguucaaccacccgauucagguggaucagcucaauagcucuuacuuuaaacugagcauaccuacgaacuucuccuucgggguuacccaagaguauauccagacaacuauucagaaggugaccgucgacuguaaacaguacgugugcaauggauuucaaaagugcgaacagcuuuugcgggaguauggccaguucuguucaaagaucaaccaggcucugcauggugccaaucuccgccaagaugacaguguuagaaaccuguuugcaagcgugaaaucuucccagucaaguccaauuauccccggguucggcggagacuuuaauuuaacacugcuugagccuguaagcauauccacuggcucugggucggccggaagcgcuaucgaagaucuucucuucgacaaggucaccauugccgaucccggcuacaugcaggguuacgacgauugcaugcagcaagggccagcaucagcuagggaccugaucugugcccaguauguggcgggauacaaagugcuaccuccccugauggaugucaacauggaggccgcuuauacguccagucuccugggcucuauugccgguguuggcuggacagcagggcuuagcuccuuugcugccaucccauucgcacagucaauauuuuaccguuugaauggagugggcauuacccaacagguacugucugaaaaccagaaguuaaucgcgaauaaauucaaccaggcccucggggcuaugcaaacuggauuuacaaccacuaaugaggccuuccacaaggugcaggacgcagucaacaacaaugcucaggcccugagcaaguuggcaagugaacuguccaacaccuucggcgccauuagcgcuucuaucggugauauaauccagcgguuggacccgccugagcaagaugcgcagauugaccgacucaucaaugggagacugacaacgcuaaacgccuuuguggcacagcagcugguuaggucagaguccgcugcccucagugcccaacuggcuaaagauaaggugaaugaaugcgucaaagcacagagcaagcgcucgggauucuguggccaggguacccauauugugucuuuuguugugaacgcccccaauggccuuuauuucaugcacgucggguacuauccauccaaccauaucgagguagugagcgcguacggauugugcgacgcugccaaucccacuaacuguauagcaccuguuaauggcuacuuuauuaaaacaaacaauacccggaucguggacgaauggucauauacagggaguucuuucuacgccccagagcccaucacuucccugaacaccaaguaugucgcuccucaggugacguaccaaaauauuagcacaaacuuaccgccaccccuccugggaaacucaaccggcaucgauuuucaggacgagcuugaugaguucuuuaagaauguaaguacuagcauuccuaacuucgguucccugacccagauaaauacaacucuacucgaccugaccuaugaaauguugucucugcaacagguggucaaagcauuaaacgaaagcuacaucgaucucaaggagcuggggaauuauacauacugaggacuagucccuguucccagagcccacuuuuuuuucuuuuuuugaaauaaaauagccugucuuucagaucucaaaggcucuuuucagagccaccaaaaaaaaaaaaaaaaaaaaaaaaaaaaaaaaaaaaaaaaaaaaaaaaaaaaaaaaaaaaaaaaaaaaaaaaaaaaaaaaaaaaaaaaaaaaaaaaaaaaa

SEQ ID NO: 14872 - RNA, 4229 nt, Artificial Sequence
  MERS-CoV/England 1__YP_007188579.1 spike protein mRNA human (variant)
aggagagucccgcagucggcguccagcggcucugcuuguucgugugugugucguugcaggccuuauucaagcuuaccaugauccacagcguguuccugcucauguuucuucugacccccacagaguccuacgucgacguuggcccugauucugugaagucagccugcauugaaguagacauacagcaaacuuucuuugauaaaacguggccaagaccgaucgacgugaguaaggcugaugggauuaucuauccccagggaaggaccuacagcaacauuacaaucacuuaucaggguuuguucccuuaccagggcgaccauggggauauguaugucuacuccgcaggacacgccaccggcacaaccccacaaaaauuauuuguggcgaauuauucucaggacguuaagcaguucgcuaacgguuuugugguccggauaggggccgcagccaauucgacuggaacagugaucauuucacccagcaccagugcuacgauccgcaaaauuuacccugcauucaugcugggcuccucuguaggcaacuuuagcgaugggaagaugggacgauucuuuaaucauacucuaguucuccugccagacgguuguggcacccuucugcgugccuucuacugcaucuuggagcccagauccgggaaccacuguccugcuggaaauucauauacaaguuuugccacuuaccauaccccagcgacagauugcagcgacggcaacuauaauaggaacgcaucucucaauuccuucaaggaauacuucaaccugcggaauuguaccuuuauguauacguacaacauaacugaggaugaaauucuggagugguucgguaucacacagaccgcccaaggggugcaccucuuuucaagccgcuaugucgacuuauacggaggcaauauguuccaguuugcuacucugccgguguacgacacaauuaaauauuacaguaucaucccccacucuauuagauccauacagagcgauaggaaggccugggcagcuuucuauguguacaaacuucagccuuugaccuuucugcuagacuucucggucgauggcuauauccggcgcgccauugacugcggguuuaacgaucucucucaacugcauuguuccuacgagucauucgacguugaaaguggaguguauagcguauccucuuuugaggcgaagccaagcgguucaguggucgaacaggccgagggcguggagugcgauuucaguccccuucuguccgggacgccuccacagguuuacaacuuuaaacgauugguguucaccaauuguaacuacaaucucacaaagcuguuaagccuguucucugucaacgacuuuacuugcucacaaaucagucccgcagcuauagccagcaauuguuauuccucucucauucuugauuacuucucguauccgcugagcaugaaguccgacuugucagugaguucugcuggaccuaucagccaguuuaacuacaaacaguccuucucaaauccaaccugccuaauccuggccacaguaccccacaaccucacuaccauuacaaagccucugaaauauagcuacaucaauaagugcucuagauuucuuuccgaugacaggaccgaaguuccccagcuggugaacgcaaaucaauauaguccaugugucagcauugugcccucuacugucugggaggacggcgauuacuaccggaaacaguuguccccucucgaaggugggggcuggcugguggccucaggaaguacgguugcuaugacagagcaguuacagaugggcuucgggauaaccgugcaauauggaacugacaccaacagcguaugcccaaagcuggaauuugcgaaugauacaaaaaucgcaucgcagcuagguaacugugucgaguacucccucuauggcgugucugggcguggaguuuuccagaauugcaccgccgugggcguccgccagcaaagauuuguguacgacgcuuaucagaaccugguagguuacuauagcgaugacgggaacuacuacugucuuagggccugcgugucaguuccggucagugugauuuaugauaaggagacuaagacacaugcaacguuguucggcuccguggccugugaacacaucucuagcaccaugucccaguacucacggagcacucgaaguaugcugaaacgcagagacucuacauauggaccccuccagaccccugucggcugcguucuggggcuuguaaauuccagccuguuuguggaggauuguaaguugccacucggacaaucgcugugcgcuuuacccgacacaccuucaacucugaccccagccucuguggguaguguccccggcgaaaugaggcuagcauccaucgcguucaaccacccgauucagguggaucagcucaauagcucuuacuuuaaacugagcauaccuacgaacuucuccuucgggguuacccaagaguauauccagacaacuauucagaaggugaccgucgacuguaaacaguacgugugcaauggauuucaaaagugcgaacagcuuuugcgggaguauggccaguucuguucaaagaucaaccaggcucugcauggugccaaucuccgccaagaugacaguguuagaaaccuguuugcaagcgugaaaucuucccagucaaguccaauuauccccggguucggcggagacuuuaauuuaacacugcuugagccuguaagcauauccacuggcucuaggucggcccguagcgcuaucgaagaucuucucuucgacaaggucaccauugccgaucccggguacaugcagggauacgacgauugcaugcagcaaggcccagcaucagcucgggaccugaucugugcccaguauguggcggguuacaaagugcuaccuccccugauggaugucaacauggaggccgcuuauacguccagucuccuggggucuauugcaggaguuggcuggacagccggucuuagcuccuuugcugccaucccauucgcacagucaauauuuuaccgauugaauggcguggggauuacccaacagguacugucugaaaaccagaaguuaaucgcgaauaaauucaaccaggcccucggagcuaugcaaacuggcuuuacaaccacuaaugaggccuuccacaaggugcaggacgcagucaacaacaaugcucaggcccugagcaaguuggcaagugaacuguccaacaccuucggggccauuagcgcuucuaucggagauauaauccagagauuggacccgccugagcaagaugcgcagauugacaggcucaucaauggccgccugacaacgcuaaacgccuuuguggcacagcagcugguucggucagaguccgcugcccucagugcccaacuggcuaaagauaaggugaaugaaugcgucaaagcacagagcaagagaucggguuucugugggcagggaacccauauugugucuuuuguugugaacgcccccaauggccuuuauuucaugcacgucgguuacuauccauccaaccauaucgagguagugagcgcguacggcuugugcgacgcugccaaucccacuaacuguauagcaccuguuaauggguacuuuauuaaaacaaacaauaccaggaucguggacgaauggucauauacaggaaguucuuucuacgccccagagcccaucacuucccugaacaccaaguaugucgcuccucaggugacguaccaaaauauuagcacaaacuuaccgccaccccuccugggcaacucaaccgggaucgauuuucaggacgagcuugaugaguucuuuaagaauguaaguacuagcauuccuaacuucggaucccugacccagauaaauacaacucuacucgaccugaccuaugaaauguugucucugcaacagguggucaaagcauuaaacgaaagcuacaucgaucucaaggagcugggcaauuauacauacgguggguacauuccagaagcgccccgcgacggacaggccuauguucgaaaagauggcgagugggugcuucuguccacguuuugaggacuagucccuguucccagagcccacuuuuuuuucuuuuuuugaaauaaaauagccugucuuucagaucucaaaggcucuuuucagagccaccaaaaaaaaaaaaaaaaaaaaaaaaaaaaaaaaaaaaaaaaaaaaaaaaaaaaaaaaaaaaaaaaaaaaaaaaaaaaaaaaaaaaaaaaaaaaaaaaaaaaa

SEQ ID NO: 14873 - RNA, 4229 nt, Artificial Sequence
  MERS-CoV/England 1__YP_007188579.1 spike protein mRNA human (variant)
aggagagucccgcagucggcguccagcggcucugcuuguucgugugugugucguugcaggccuuauucaagcuuaccaugauccacagcguguuccugcucauguuucuucugacccccacagaguccuacgucgacguuggcccugauucugugaagucagccugcauugaaguagacauacagcaaacuuucuuugauaaaacguggccaagaccgaucgacgugaguaaggcugaugggauuaucuauccccagggaaggaccuacagcaacauuacaaucacuuaucaggguuuguucccuuaccagggcgaccauggggauauguaugucuacuccgcaggacacgccaccggcacaaccccacaaaaauuauuuguggcgaauuauucucaggacguuaagcaguucgcuaacgguuuugugguccggauaggggccgcagccaauucgacuggaacagugaucauuucacccagcaccagugcuacgauccgcaaaauuuacccugcauucaugcugggcuccucuguaggcaacuuuagcgaugggaagaugggacgauucuuuaaucauacucuaguucuccugccagacgguuguggcacccuucugcgugccuucuacugcaucuuggagcccagauccgggaaccacuguccugcuggaaauucauauacaaguuuugccacuuaccauaccccagcgacagauugcagcgacggcaacuauaauaggaacgcaucucucaauuccuucaaggaauacuucaaccugcggaauuguaccuuuauguauacguacaacauaacugaggaugaaauucuggagugguucgguaucacacagaccgcccaaggggugcaccucuuuucaagccgcuaugucgacuuauacggaggcaauauguuccaguuugcuacucugccgguguacgacacaauuaaauauuacaguaucaucccccacucuauuagauccauacagagcgauaggaaggccugggcagcuuucuauguguacaaacuucagccuuugaccuuucugcuagacuucucggucgauggcuauauccggcgcgccauugacugcggguuuaacgaucucucucaacugcauuguuccuacgagucauucgacguugaaaguggaguguauagcguauccucuuuugaggcgaagccaagcgguucaguggucgaacaggccgagggcguggagugcgauuucaguccccuucuguccgggacgccuccacagguuuacaacuuuaaacgauugguguucaccaauuguaacuacaaucucacaaagcuguuaagccuguucucugucaacgacuuuacuugcucacaaaucagucccgcagcuauagccagcaauuguuauuccucucucauucuugauuacuucucguauccgcugagcaugaaguccgacuugucagugaguucugcuggaccuaucagccaguuuaacuacaaacaguccuucucaaauccaaccugccuaauccuggccacaguaccccacaaccucacuaccauuacaaagccucugaaauauagcuacaucaauaagugcucuagauuucuuuccgaugacaggaccgaaguuccccagcuggugaacgcaaaucaauauaguccaugugucagcauugugcccucuacugucugggaggacggcgauuacuaccggaaacaguuguccccucucgaaggugggggcuggcugguggccucaggaaguacgguugcuaugacagagcaguuacagaugggcuucgggauaaccgugcaauauggaacugacaccaacagcguaugcccaaagcuggaauuugcgaaugauacaaaaaucgcaucgcagcuagguaacugugucgaguacucccucuauggcgugucugggcguggaguuuuccagaauugcaccgccgugggcguccgccagcaaagauuuguguacgacgcuuaucagaaccugguagguuacuauagcgaugacgggaacuacuacugucuuagggccugcgugucaguuccggucagugugauuuaugauaaggagacuaagacacaugcaacguuguucggcuccguggccugugaacacaucucuagcaccaugucccaguacucacggagcacucgaaguaugcugaaacgcagagacucuacauauggaccccuccagaccccugucggcugcguucuggggcuuguaaauuccagccuguuuguggaggauuguaaguugccacucggacaaucgcugugcgcuuuacccgacacaccuucaacucugaccccagccucuguggguaguguccccggcgaaaugaggcuagcauccaucgcguucaaccacccgauucagguggaucagcucaauagcucuuacuuuaaacugagcauaccuacgaacuucuccuucgggguuacccaagaguauauccagacaacuauucagaaggugaccgucgacuguaaacaguacgugugcaauggauuucaaaagugcgaacagcuuuugcgggaguauggccaguucuguucaaagaucaaccaggcucugcauggugccaaucuccgccaagaugacaguguuagaaaccuguuugcaagcgugaaaucuucccagucaaguccaauuauccccggguucggcggagacuuuaauuuaacacugcuugagccuguaagcauauccacuggcucugggucggccggaagcgcuaucgaagaucuucucuucgacaaggucaccauugccgaucccggcuacaugcaggguuacgacgauugcaugcagcaagggccagcaucagcuagggaccugaucugugcccaguauguggcgggauacaaagugcuaccuccccugauggaugucaacauggaggccgcuuauacguccagucuccugggcucuauugccgguguuggcuggacagcagggcuuagcuccuuugcugccaucccauucgcacagucaauauuuuaccguuugaauggagugggcauuacccaacagguacugucugaaaaccagaaguuaaucgcgaauaaauucaaccaggcccucggggcuaugcaaacuggauuuacaaccacuaaugaggccuuccacaaggugcaggacgcagucaacaacaaugcucaggcccugagcaaguuggcaagugaacuguccaacaccuucggcgccauuagcgcuucuaucggugauauaauccagcgguuggacccgccugagcaagaugcgcagauugaccgacucaucaaugggagacugacaacgcuaaacgccuuuguggcacagcagcugguuaggucagaguccgcugcccucagugcccaacuggcuaaagauaaggugaaugaaugcgucaaagcacagagcaagcgcucgggauucuguggccaggguacccauauugugucuuuuguugugaacgcccccaauggccuuuauuucaugcacgucggguacuauccauccaaccauaucgagguagugagcgcguacggauugugcgacgcugccaaucccacuaacuguauagcaccuguuaauggcuacuuuauuaaaacaaacaauacccggaucguggacgaauggucauauacagggaguucuuucuacgccccagagcccaucacuucccugaacaccaaguaugucgcuccucaggugacguaccaaaauauuagcacaaacuuaccgccaccccuccugggaaacucaaccggcaucgauuuucaggacgagcuugaugaguucuuuaagaauguaaguacuagcauuccuaacuucgguucccugacccagauaaauacaacucuacucgaccugaccuaugaaauguugucucugcaacagguggucaaagcauuaaacgaaagcuacaucgaucucaaggagcuggggaauuauacauacggaggcuacauuccagaagcccccagagacggucaggcguauguuaggaaagauggcgagugggugcuucuguccacguuuugaggacuagucccuguucccagagcccacuuuuuuuucuuuuuuugaaauaaaauagccugucuuucagaucucaaaggcucuuuucagagccaccaaaaaaaaaaaaaaaaaaaaaaaaaaaaaaaaaaaaaaaaaaaaaaaaaaaaaaaaaaaaaaaaaaaaaaaaaaaaaaaaaaaaaaaaaaaaaaaaaaaaa

SEQ ID NO: 14874 - RNA, 4279 nt, Artificial Sequence
  MERS-CoV/MERS-CoV-Jeddah-human-1__AHE78108.1 spike protein mRNA gc (1-1353)
aggagaaagcuuaccaugauccacagcguguuccugcucauguuccugcugacccccaccgaguccuacgucgacgugggcccggacagcgugaaguccgccugcaucgaggucgacauccagcagacguucuucgacaagaccuggccccgccccaucgacgugagcaaggccgacgggaucaucuacccccagggccggaccuacuccaacaucaccaucacguaccagggccucuucccguaccagggggaccacggggacauguacguguacagcgcgggccacgccaccggcaccacgccccagaagcuguucgucgccaacuacucccaggacgugaagcaguucgccaacggguucgugguccgcaucggcgccgcggccaacagcaccgggaccgugaucaucucccccagcaccuccgccaccauccggaagaucuaccccgccuucaugcugggcagcuccguggggaacuucagcgacggcaagaugggccgcuucuucaaccacacgcucguccugcugccggacgggugcggcacccuccugcgggcguucuacugcauccuggagccccgcuccgggaaccacugccccgccggcaacagcuacaccuccuucgccaccuaccacacgcccgccaccgacugcagcgacggcaacuacaaccggaacgccucccucaacagcuucaaggaguacuucaaccugcgcaacugcaccuucauguacaccuacaacaucacggaggacgagauccuggagugguucgggaucacccagaccgcgcagggcgugcaccucuucagcucccgguacguggaccuguacgggggcaacauguuccaguucgccacccugccggucuacgacacgaucaaguacuacagcaucaucccccacuccauccgcagcauccaguccgaccggaaggccugggccgccuucuacguguacaagcuccagccccugaccuuccugcucgacuucagcguggacggguacauccgccgggcgaucgacugcggcuucaacgaccugucccagcugcacugcagcuacgaguccuucgacgucgagagcggcguguacuccgugagcuccuucgaggccaagcccagcggguccgucguggagcaggccgagggcguggagugcgacuucagcccgcuccuguccgggaccccgccccaggucuacaacuucaagcgccugguguucaccaacugcaacuacaaccucacgaagcugcugagccucuucuccgucaacgacuucacgugcagccagaucagccccgccgccaucgcguccaacugcuacagcucccugauccuggacuacuucagcuacccccucuccaugaaguccgaccugagcgugagcuccgccggccccaucagccaguucaacuacaagcaguccuucagcaacccgaccugccugauccucgccaccgugccccacaaccugaccaccaucaccaagccccugaaguacuccuacaucaacaagugcagccggcuccuguccgacgaccgcaccgaggucccccagcuggugaacgccaaccaguacagccccugcguguccaucguccccagcacggugugggaggacggggacuacuaccggaagcagcucagcccgcuggagggcggcggguggcugguggccuccggcagcaccgucgcgaugaccgagcagcuccagaugggguucggcaucaccgugcaguacgggaccgacacgaacuccgugugccccaagcuggaguucgccaacgacaccaagaucgccagccagcugggcaacugcgucgaguacucccucuacggcgugagcgggcgcggcguguuccagaacugcaccgccgucggggugcggcagcagcgcuucguguacgacgcguaccagaaccuggucggcuacuacuccgacgacggcaacuacuacugccugcgggccugcgugagcgugcccgucuccgugaucuacgacaaggagaccaagacgcacgccacccuguucgggagcguggccugcgagcacaucuccagcaccaugucccaguacagccgcuccacccgcagcaugcucaagcggcgcgacuccacguacggcccgcugcagacccccgucgggugcgugcugggccucgugaacagcucccuguucgucgaggacugcaagcugccccucgggcagagccugugcgcccugcccgacaccccgagcacccucacgccccgguccgugcgcagcgugcccggcgagaugcggcuggcguccaucgccuucaaccaccccauccaggucgaccagcugaacagcuccuacuucaagcucagcaucccgaccaacuucuccuucggcgugacccaggaguacauccagaccacgauccagaaggugaccgucgacugcaagcaguacgugugcaacggguuccagaagugcgagcagcugcugcgcgaguacggccaguucugcagcaagaucaaccaggcccuccacggggccaaccugcggcaggacgacuccgugcgcaaccuguucgccagcgucaaguccagccaguccagccccaucauccccggcuucgggggcgacuucaaccucacccugcuggagcccguguccaucagcaccggcucccggagcgcgcgcuccgccaucgaggaccuccuguucgacaaggugacgaucgccgacccgggguacaugcagggcuacgacgacugcaugcagcaggggcccgccagcgcccgggaccugaucugcgcgcaguacgucgccggcuacaaggugcucccgccccugauggacgugaacauggaggccgccuacaccagcucccugcucgggagcaucgcgggcgucggcuggaccgccgggcuguccagcuucgccgccauccccuucgcccaguccaucuucuaccgccugaacggcguggggaucacccagcagguccucagcgagaaccagaagcugaucgcgaacaaguucaaccaggcccugggcgccaugcagacgggguucaccaccaccaacgaggccuuccacaaggugcaggacgccgugaacaacaacgcgcaggcccucuccaagcuggccagcgagcuguccaacacguucggcgccaucagcgccuccaucggcgacaucauccagcggcucgacgugcuggagcaggacgcgcagaucgaccgccugaucaacgggcggcucaccacccugaacgccuucgucgcccagcagcuggugcgcagcgaguccgccgcgcucagcgcccagcuggccaaggacaaggugaacgagugcgucaaggcccaguccaagcggagcggcuucugcgggcagggcacccacaucguguccuucgucgugaacgcccccaacggccuguacuucaugcacgugggguacuaccccagcaaccacaucgaggucguguccgcguacggccucugcgacgccgccaaccccacgaacugcaucgccccggugaacggguacuucaucaagaccaacaacacccgcaucgucgacgaguggagcuacaccggcagcuccuucuacgcccccgagcccaucacgagccugaacaccaaguacguggcgccccaggugaccuaccagaacaucuccaccaaccugccgccgccccuccuggggaacagcaccggcaucgacuuccaggacgagcuggacgaguucuucaagaacgucuccacgagcauccccaacuucggcucccucacccagaucaacaccacccugcuggaccucacguacgagaugcugagccugcagcaggucgugaaggcccucaacgaguccuacaucgaccugaaggagcuggggaacuacaccuacuacaacaaguggcccugguacaucuggcucggcuucaucgccgggcugguggcccuggcccucugcguguucuucauccugugcugcaccggcugcgggaccaacugcaugggcaagcugaagugcaaccggugcugcgaccgcuacgaggaguacgaccucgagccccacaaggugcacguccacugaggacuaguuauaagacugacuagcccgaugggccucccaacgggcccuccuccccuccuugcaccgagauuaauaaaaaaaaaaaaaaaaaaaaaaaaaaaaaaaaaaaaaaaaaaaaaaaaaaaaaaaaaaaaaaaaugcaucccccccccccccccccccccccccccccccaaaggcucuuuucagagccaccagaauu

SEQ ID NO: 14875 - RNA, 4279 nt, Artificial Sequence
  MERS-CoV/MERS-CoV-Jeddah-human-1__AHE78108.1 spike protein mRNA gc (1-1353)(V1060P_L1061P)
aggagaaagcuuaccaugauccacagcguguuccugcucauguuccugcugacccccaccgaguccuacgucgacgugggcccggacagcgugaaguccgccugcaucgaggucgacauccagcagacguucuucgacaagaccuggccccgccccaucgacgugagcaaggccgacgggaucaucuacccccagggccggaccuacuccaacaucaccaucacguaccagggccucuucccguaccagggggaccacggggacauguacguguacagcgcgggccacgccaccggcaccacgccccagaagcuguucgucgccaacuacucccaggacgugaagcaguucgccaacggguucgugguccgcaucggcgccgcggccaacagcaccgggaccgugaucaucucccccagcaccuccgccaccauccggaagaucuaccccgccuucaugcugggcagcuccguggggaacuucagcgacggcaagaugggccgcuucuucaaccacacgcucguccugcugccggacgggugcggcacccuccugcgggcguucuacugcauccuggagccccgcuccgggaaccacugccccgccggcaacagcuacaccuccuucgccaccuaccacacgcccgccaccgacugcagcgacggcaacuacaaccggaacgccucccucaacagcuucaaggaguacuucaaccugcgcaacugcaccuucauguacaccuacaacaucacggaggacgagauccuggagugguucgggaucacccagaccgcgcagggcgugcaccucuucagcucccgguacguggaccuguacgggggcaacauguuccaguucgccacccugccggucuacgacacgaucaaguacuacagcaucaucccccacuccauccgcagcauccaguccgaccggaaggccugggccgccuucuacguguacaagcuccagccccugaccuuccugcucgacuucagcguggacggguacauccgccgggcgaucgacugcggcuucaacgaccugucccagcugcacugcagcuacgaguccuucgacgucgagagcggcguguacuccgugagcuccuucgaggccaagcccagcggguccgucguggagcaggccgagggcguggagugcgacuucagcccgcuccuguccgggaccccgccccaggucuacaacuucaagcgccugguguucaccaacugcaacuacaaccucacgaagcugcugagccucuucuccgucaacgacuucacgugcagccagaucagccccgccgccaucgcguccaacugcuacagcucccugauccuggacuacuucagcuacccccucuccaugaaguccgaccugagcgugagcuccgccggccccaucagccaguucaacuacaagcaguccuucagcaacccgaccugccugauccucgccaccgugccccacaaccugaccaccaucaccaagccccugaaguacuccuacaucaacaagugcagccggcuccuguccgacgaccgcaccgaggucccccagcuggugaacgccaaccaguacagccccugcguguccaucguccccagcacggugugggaggacggggacuacuaccggaagcagcucagcccgcuggagggcggcggguggcugguggccuccggcagcaccgucgcgaugaccgagcagcuccagaugggguucggcaucaccgugcaguacgggaccgacacgaacuccgugugccccaagcuggaguucgccaacgacaccaagaucgccagccagcugggcaacugcgucgaguacucccucuacggcgugagcgggcgcggcguguuccagaacugcaccgccgucggggugcggcagcagcgcuucguguacgacgcguaccagaaccuggucggcuacuacuccgacgacggcaacuacuacugccugcgggccugcgugagcgugcccgucuccgugaucuacgacaaggagaccaagacgcacgccacccuguucgggagcguggccugcgagcacaucuccagcaccaugucccaguacagccgcuccacccgcagcaugcucaagcggcgcgacuccacguacggcccgcugcagacccccgucgggugcgugcugggccucgugaacagcucccuguucgucgaggacugcaagcugccccucgggcagagccugugcgcccugcccgacaccccgagcacccucacgccccgguccgugcgcagcgugcccggcgagaugcggcuggcguccaucgccuucaaccaccccauccaggucgaccagcugaacagcuccuacuucaagcucagcaucccgaccaacuucuccuucggcgugacccaggaguacauccagaccacgauccagaaggugaccgucgacugcaagcaguacgugugcaacggguuccagaagugcgagcagcugcugcgcgaguacggccaguucugcagcaagaucaaccaggcccuccacggggccaaccugcggcaggacgacuccgugcgcaaccuguucgccagcgucaaguccagccaguccagccccaucauccccggcuucgggggcgacuucaaccucacccugcuggagcccguguccaucagcaccggcucccggagcgcgcgcuccgccaucgaggaccuccuguucgacaaggugacgaucgccgacccgggguacaugcagggcuacgacgacugcaugcagcaggggcccgccagcgcccgggaccugaucugcgcgcaguacgucgccggcuacaaggugcucccgccccugauggacgugaacauggaggccgccuacaccagcucccugcucgggagcaucgcgggcgucggcuggaccgccgggcuguccagcuucgccgccauccccuucgcccaguccaucuucuaccgccugaacggcguggggaucacccagcagguccucagcgagaaccagaagcugaucgcgaacaaguucaaccaggcccugggcgccaugcagacgggguucaccaccaccaacgaggccuuccacaaggugcaggacgccgugaacaacaacgcgcaggcccucuccaagcuggccagcgagcuguccaacacguucggcgccaucagcgccuccaucggcgacaucauccagcggcucgacccgcccgagcaggacgcgcagaucgaccgccugaucaacgggcggcucaccacccugaacgccuucgucgcccagcagcuggugcgcagcgaguccgccgcgcucagcgcccagcuggccaaggacaaggugaacgagugcgucaaggcccaguccaagcggagcggcuucugcgggcagggcacccacaucguguccuucgucgugaacgcccccaacggccuguacuucaugcacgugggguacuaccccagcaaccacaucgaggucguguccgcguacggccucugcgacgccgccaaccccacgaacugcaucgccccggugaacggguacuucaucaagaccaacaacacccgcaucgucgacgaguggagcuacaccggcagcuccuucuacgcccccgagcccaucacgagccugaacaccaaguacguggcgccccaggugaccuaccagaacaucuccaccaaccugccgccgccccuccuggggaacagcaccggcaucgacuuccaggacgagcuggacgaguucuucaagaacgucuccacgagcauccccaacuucggcucccucacccagaucaacaccacccugcuggaccucacguacgagaugcugagccugcagcaggucgugaaggcccucaacgaguccuacaucgaccugaaggagcuggggaacuacaccuacuacaacaaguggcccugguacaucuggcucggcuucaucgccgggcugguggcccuggcccucugcguguucuucauccugugcugcaccggcugcgggaccaacugcaugggcaagcugaagugcaaccggugcugcgaccgcuacgaggaguacgaccucgagccccacaaggugcacguccacugaggacuaguuauaagacugacuagcccgaugggccucccaacgggcccuccuccccuccuugcaccgagauuaauaaaaaaaaaaaaaaaaaaaaaaaaaaaaaaaaaaaaaaaaaaaaaaaaaaaaaaaaaaaaaaaaugcaucccccccccccccccccccccccccccccccaaaggcucuuuucagagccaccagaauu

SEQ ID NO: 14876 - RNA, 4279 nt, Artificial Sequence
  MERS-CoV/Al-Hasa_4_2013__AGN70929.1 spike protein mRNA gc (1-1353)
aggagaaagcuuaccaugauccacagcguguuccugcucauguuccugcugacccccaccgaguccuacgucgacgugggcccggacagcgugaaguccgccugcaucgaggucgacauccagcagacguucuucgacaagaccuggccccgccccaucgacgugagcaaggccgacgggaucaucuacccccagggccggaccuacuccaacaucaccaucacguaccagggccucuucccguaccagggcgaccacggggacauguacguguacagcgcgggccacgccaccggcaccacgccccagaagcuguucgucgccaacuacucccaggacgugaagcaguucgccaacggguucgugguccgcaucggcgccgcggccaacagcaccgggaccgugaucaucucccccagcaccuccgccaccauccggaagaucuaccccgccuucaugcugggcagcuccguggggaacuucagcgacggcaagaugggccgcuucuucaaccacacgcucguccugcugccggacgggugcggcacccuccugcgggcguucuacugcauccuggagccccgcuccgggaaccacugccccgccggcaacagcuacaccuccuucgccaccuaccacacgcccgccaccgacugcagcgacggcaacuacaaccggaacgccucccucaacagcuucaaggaguacuucaaccugcgcaacugcaccuucauguacaccuacaacaucacggaggacgagauccuggagugguucgggaucacccagaccgcgcagggcgugcaccucuucagcucccgguacguggaccuguacgggggcaacauguuccaguucgccacccugccggucuacgacacgaucaaguacuacagcaucaucccccacuccauccgcagcauccaguccgaccggaaggccugggccgccuucuacguguacaagcuccagccccugaccuuccugcucgacuucagcguggacggguacauccgccgggcgaucgacugcggcuucaacgaccugucccagcugcacugcagcuacgaguccuucgacgucgagagcggcguguacuccgugagcuccuucgaggccaagcccagcggguccgucguggagcaggccgagggcguggagugcgacuucagcccgcuccuguccgggaccccgccccaggucuacaacuucaagcgccugguguucaccaacugcaacuacaaccucacgaagcugcugagccucuucuccgucaacgacuucacgugcagccagaucagccccgccgccaucgcguccaacugcuacagcucccugauccuggacuacuucagcuacccccucuccaugaaguccgaccugagcgugagcuccgccgggcccaucagccaguucaacuacaagcaguccuucagcaacccgaccugccugauccucgccaccgugccccacaaccugaccaccaucaccaagccccugaaguacuccuacaucaacaagugcagccggcuccuguccgacgaccgcaccgaggucccccagcuggugaacgccaaccaguacagccccugcguguccaucguccccagcacggugugggaggacggggacuacuaccggaagcagcucagcccgcuggagggcggcggguggcugguggccuccggcagcaccgucgcgaugaccgagcagcuccagaugggguucggcaucaccgugcaguacgggaccgacacgaacuccgugugccccaagcuggaguucgccaacgacaccaagaucgccagccagcugggcaacugcgucgaguacucccuguacggcgugagcgggcgcggcguguuccagaacugcaccgccgucggggugcggcagcagcgcuucguguacgacgcguaccagaaccucgucggcuacuacuccgacgacggcaacuacuacugccugcgggccugcgugagcgugcccgucuccgugaucuacgacaaggagaccaagacgcacgccacccuguucgggagcguggccugcgagcacaucuccagcaccaugucccaguacagccgcuccacccgcagcaugcucaagcggcgcgacuccacguacggcccgcugcagacccccgucgggugcgugcugggccucgugaacagcucccuguucgucgaggacugcaagcugccccucgggcagagccugugcgcccugcccgacaccccgagcacccucacgccccgguccgugcgcagcgugcccggcgagaugcggcuggcguccaucgccuucaaccaccccauccaggucgaccagcugaacagcuccuacuucaagcucagcaucccgaccaacuucuccuucggcgugacccaggaguacauccagaccacgauccagaaggugaccgucgacugcaagcaguacgugugcaacggguuccagaagugcgagcagcugcugcgcgaguacggccaguucugcagcaagaucaaccaggcccuccacggggccaaccugcggcaggacgacuccgugcgcaaccuguucgccagcgucaaguccagccaguccagccccaucauccccggcuucgggggcgacuucaaccucacccugcuggagcccguguccaucagcaccggcucccggagcgcgcgcuccgccaucgaggaccuccuguucgacaaggugacgaucgccgacccgggguacaugcagggcuacgacgacugcaugcagcaggggcccgccagcgcccgggaccugaucugcgcgcaguacgucgccggcuacaaggugcucccgccccugauggacgugaacauggaggccgccuacaccagcucccugcucgggagcaucgcgggcgucggcuggaccgccgggcuguccagcuucgccgccauccccuucgcccaguccaucuucuaccgccugaacggcguggggaucacccagcagguccucagcgagaaccagaagcugaucgcgaacaaguucaaccaggcccugggcgccaugcagacgggguucaccaccaccaacgaggccuuccggaaggugcaggacgccgugaacaacaacgcgcaggcccucuccaagcuggccagcgagcuguccaacacguucggcgccaucagcgccuccaucggcgacaucauccagcgccucgacgugcuggagcaggacgcgcagaucgaccggcugaucaacgggcgccucaccacccugaacgccuucgucgcccagcagcuggugcggagcgaguccgccgcgcucagcgcccagcuggccaaggacaaggugaacgagugcgucaaggcccaguccaagcgcagcggcuucugcgggcagggcacccacaucguguccuucgucgugaacgcccccaacggccuguacuucaugcacgugggguacuaccccagcaaccacaucgaggucguguccgcguacggccucugcgacgccgccaaccccacgaacugcaucgccccggugaacggguacuucaucaagaccaacaacacccggaucgucgacgaguggagcuacaccggcagcuccuucuacgcccccgagcccaucacgagccugaacaccaaguacguggcgccccacgugaccuaccagaacaucuccaccaaccugccgccgccccuccuggggaacagcaccggcaucgacuuccaggacgagcuggacgaguucuucaagaacgucuccacgagcauccccaacuucggcucccucacccagaucaacaccacccugcuggaccucacguacgagaugcugagccugcagcaggucgugaaggcccucaacgaguccuacaucgaccugaaggagcuggggaacuacaccuacuacaacaaguggcccugguacaucuggcucggcuucaucgccgggcugguggcccuggcccucugcguguucuucauccugugcugcaccggcugcgggaccaacugcaugggcaagcugaagugcaaccgcugcugcgaccgcuacgaggaguacgaccucgagccccacaaggugcacguccacugaggacuaguuauaagacugacuagcccgaugggccucccaacgggcccuccuccccuccuugcaccgagauuaauaaaaaaaaaaaaaaaaaaaaaaaaaaaaaaaaaaaaaaaaaaaaaaaaaaaaaaaaaaaaaaaaugcaucccccccccccccccccccccccccccccccaaaggcucuuuucagagccaccagaauu

SEQ ID NO: 14877 - RNA, 4279 nt, Artificial Sequence
  MERS-CoV/Al-Hasa_4_2013__AGN70929.1 spike protein mRNA gc (1-1353)(V1060P_L1061P)
aggagaaagcuuaccaugauccacagcguguuccugcucauguuccugcugacccccaccgaguccuacgucgacgugggcccggacagcgugaaguccgccugcaucgaggucgacauccagcagacguucuucgacaagaccuggccccgccccaucgacgugagcaaggccgacgggaucaucuacccccagggccggaccuacuccaacaucaccaucacguaccagggccucuucccguaccagggcgaccacggggacauguacguguacagcgcgggccacgccaccggcaccacgccccagaagcuguucgucgccaacuacucccaggacgugaagcaguucgccaacggguucgugguccgcaucggcgccgcggccaacagcaccgggaccgugaucaucucccccagcaccuccgccaccauccggaagaucuaccccgccuucaugcugggcagcuccguggggaacuucagcgacggcaagaugggccgcuucuucaaccacacgcucguccugcugccggacgggugcggcacccuccugcgggcguucuacugcauccuggagccccgcuccgggaaccacugccccgccggcaacagcuacaccuccuucgccaccuaccacacgcccgccaccgacugcagcgacggcaacuacaaccggaacgccucccucaacagcuucaaggaguacuucaaccugcgcaacugcaccuucauguacaccuacaacaucacggaggacgagauccuggagugguucgggaucacccagaccgcgcagggcgugcaccucuucagcucccgguacguggaccuguacgggggcaacauguuccaguucgccacccugccggucuacgacacgaucaaguacuacagcaucaucccccacuccauccgcagcauccaguccgaccggaaggccugggccgccuucuacguguacaagcuccagccccugaccuuccugcucgacuucagcguggacggguacauccgccgggcgaucgacugcggcuucaacgaccugucccagcugcacugcagcuacgaguccuucgacgucgagagcggcguguacuccgugagcuccuucgaggccaagcccagcggguccgucguggagcaggccgagggcguggagugcgacuucagcccgcuccuguccgggaccccgccccaggucuacaacuucaagcgccugguguucaccaacugcaacuacaaccucacgaagcugcugagccucuucuccgucaacgacuucacgugcagccagaucagccccgccgccaucgcguccaacugcuacagcucccugauccuggacuacuucagcuacccccucuccaugaaguccgaccugagcgugagcuccgccgggcccaucagccaguucaacuacaagcaguccuucagcaacccgaccugccugauccucgccaccgugccccacaaccugaccaccaucaccaagccccugaaguacuccuacaucaacaagugcagccggcuccuguccgacgaccgcaccgaggucccccagcuggugaacgccaaccaguacagccccugcguguccaucguccccagcacggugugggaggacggggacuacuaccggaagcagcucagcccgcuggagggcggcggguggcugguggccuccggcagcaccgucgcgaugaccgagcagcuccagaugggguucggcaucaccgugcaguacgggaccgacacgaacuccgugugccccaagcuggaguucgccaacgacaccaagaucgccagccagcugggcaacugcgucgaguacucccuguacggcgugagcgggcgcggcguguuccagaacugcaccgccgucggggugcggcagcagcgcuucguguacgacgcguaccagaaccucgucggcuacuacuccgacgacggcaacuacuacugccugcgggccugcgugagcgugcccgucuccgugaucuacgacaaggagaccaagacgcacgccacccuguucgggagcguggccugcgagcacaucuccagcaccaugucccaguacagccgcuccacccgcagcaugcucaagcggcgcgacuccacguacggcccgcugcagacccccgucgggugcgugcugggccucgugaacagcucccuguucgucgaggacugcaagcugccccucgggcagagccugugcgcccugcccgacaccccgagcacccucacgccccgguccgugcgcagcgugcccggcgagaugcggcuggcguccaucgccuucaaccaccccauccaggucgaccagcugaacagcuccuacuucaagcucagcaucccgaccaacuucuccuucggcgugacccaggaguacauccagaccacgauccagaaggugaccgucgacugcaagcaguacgugugcaacggguuccagaagugcgagcagcugcugcgcgaguacggccaguucugcagcaagaucaaccaggcccuccacggggccaaccugcggcaggacgacuccgugcgcaaccuguucgccagcgucaaguccagccaguccagccccaucauccccggcuucgggggcgacuucaaccucacccugcuggagcccguguccaucagcaccggcucccggagcgcgcgcuccgccaucgaggaccuccuguucgacaaggugacgaucgccgacccgggguacaugcagggcuacgacgacugcaugcagcaggggcccgccagcgcccgggaccugaucugcgcgcaguacgucgccggcuacaaggugcucccgccccugauggacgugaacauggaggccgccuacaccagcucccugcucgggagcaucgcgggcgucggcuggaccgccgggcuguccagcuucgccgccauccccuucgcccaguccaucuucuaccgccugaacggcguggggaucacccagcagguccucagcgagaaccagaagcugaucgcgaacaaguucaaccaggcccugggcgccaugcagacgggguucaccaccaccaacgaggccuuccggaaggugcaggacgccgugaacaacaacgcgcaggcccucuccaagcuggccagcgagcuguccaacacguucggcgccaucagcgccuccaucggcgacaucauccagcgccucgacccgcccgagcaggacgcgcagaucgaccggcugaucaacgggcgccugaccacccucaacgccuucguggcccagcagcugguccggagcgaguccgccgcgcugagcgcccagcucgccaaggacaaggugaacgagugcgugaaggcccaguccaagcgcagcggcuucugcgggcagggcacccacaucgucuccuucguggucaacgcccccaacggccuguacuucaugcacgugggguacuaccccagcaaccacaucgagguggucuccgcguacggccugugcgacgccgccaaccccacgaacugcaucgcccccgugaacggguacuucaucaagaccaacaacacccggaucguggacgaguggagcuacaccggcagcuccuucuacgcccccgagccgaucacgagccucaacaccaaguacgucgcgccccacgugaccuaccagaacaucuccaccaaccugcccccgccccugcucgggaacagcaccggcaucgacuuccaggacgagcuggacgaguucuucaagaacguguccacgagcauccccaacuucggcucccugacccagaucaacaccacccuccuggaccugacguacgagaugcucagccugcagcaggucgugaaggcccugaacgaguccuacaucgaccucaaggagcuggggaacuacaccuacuacaacaaguggcccugguacaucuggcugggcuucaucgccgggcucguggcccuggcccugugcgucuucuucauccucugcugcaccggcugcgggaccaacugcaugggcaagcugaagugcaaccgcugcugcgaccgcuacgaggaguacgaccuggagccgcacaaggugcacgugcacugaggacuaguuauaagacugacuagcccgaugggccucccaacgggcccuccuccccuccuugcaccgagauuaauaaaaaaaaaaaaaaaaaaaaaaaaaaaaaaaaaaaaaaaaaaaaaaaaaaaaaaaaaaaaaaaaugcaucccccccccccccccccccccccccccccccaaaggcucuuuucagagccaccagaauu

SEQ ID NO: 14878 - RNA, 4279 nt, Artificial Sequence
  MERS-CoV/Riyadh_14_2013__AHI48572.1 spike protein mRNA gc (1-1353)
aggagaaagcuuaccaugauccacagcguguuccugcucauguuccugcugacccccaccgaguccuacgucgacgugggcccggacagcgugaaguccgccugcaucgaggucgacauccagcagacguucuucgacaagaccuggccccgccccaucgacgugagcaaggccgacgggaucaucuacccccagggccggaccuacuccaacaucaccaucacguaccagggccucuucccguaccagggcgaccacggggacauguacguguacagcgcgggccacgccaccggcaccacgccccagaagcuguucgucgccaacuacucccaggacgugaagcaguucgccaacggguucgugguccgcaucggcgccgcggccaacagcaccgggaccgugaucaucucccccagcaccuccgccaccauccggaagaucuaccccgccuucaugcugggcagcuccguggggaacuucagcgacggcaagaugggccgcuucuucaaccacacgcucguccugcugccggacgggugcggcacccuccugcgggcguucuacugcauccuggagccccgcuccgggaaccacugccccgccggcaacagcuacaccuccuucgccaccuaccacacgcccgccaccgacugcagcgacggcaacuacaaccggaacgccucccucaacagcuucaaggaguacuucaaccugcgcaacugcaccuucauguacaccuacaacaucacggaggacgagauccuggagugguucgggaucacccagaccgcgcagggcgugcaccucuucagcucccgguacguggaccuguacgggggcaacauguuccaguucgccacccugccggucuacgacacgaucaaguacuacagcaucaucccccacuccauccgcagcauccaguccgaccggaaggccugggccgccuucuacguguacaagcuccagccccugaccuuccugcucgacuucagcguggacggguacauccgccgggcgaucgacugcggcuucaacgaccugucccagcugcacugcagcuacgaguccuucgacgucgagagcggcguguacuccgugagcuccuucgaggccaagcccagcggguccgucguggagcaggccgagggcguggagugcgacuucagcccgcuccuguccgggaccccgccccaggucuacaacuucaagcgccugguguucaccaacugcaacuacaaccucacgaagcugcugagccucuucuccgucaacgacuucacgugcagccagaucagccccgccgccaucgcguccaacugcuacagcucccugauccuggacuacuucagcuacccccucuccaugaaguccgaccugagcgugagcuccgccgggcccaucagccaguucaacuacaagcaguccuucagcaacccgaccugccugauccucgccaccgugccccacaaccugaccaccaucaccaagccccugaaguacuccuacaucaacaagugcagccggcuccuguccgacgaccgcaccgaggucccccagcuggugaacgccaaccaguacagccccugcguguccaucguccccagcacggugugggaggacggggacuacuaccggaagcagcucagcccgcuggagggcggcggguggcugguggccuccggcagcaccgucgcgaugaccgagcagcuccagaugggguucggcaucaccgugcaguacgggaccgacacgaacuccgugugccccaagcuggaguucgccaacgacaccaagaucgccagccagcugggcaacugcgucgaguacucccuguacggcgugagcgggcgcggcguguuccagaacugcaccgccgucggggugcggcagcagcgcuucguguacgacgcguaccagaaccucgucggcuacuacuccgacgacggcaacuacuacugccugcgggccugcgugagcgugcccgucuccgugaucuacgacaaggagaccaagacgcacgccacccuguucgggagcguggccugcgagcacaucuccagcaccaugucccaguacagccgcuccacccgcagcaugcucaagcggcgcgacuccacguacggcccgcugcagacccccgucgggugcgugcugggccucgugaacagcucccuguucgucgaggacugcaagcugccccucgggcagagccugugcgcccugcccgacaccccgagcacccucacgccccgguccgugcgcagcgugcccggcgagaugcggcuggcguccaucgccuucaaccaccccauccaggucgaccagcugaacagcuccuacuucaagcucagcaucccgaccaacuucuccuucggcgugacccaggaguacauccagaccacgauccagaaggugaccgucgacugcaagcaguacgugugcaacggguuccagaagugcgagcagcugcugcgcgaguacggccaguucugcagcaagaucaaccaggcccuccacggggccaaccugcggcaggacgacuccgugcgcaaccuguucgccagcgucaaguccagccaguccagccccaucauccccggcuucgggggcgacuucaaccucacccugcuggagcccguguccaucagcaccggcucccggagcgcgcgcuccgccaucgaggaccuccuguucgacaaggugacgaucgccgacccgggguacaugcagggcuacgacgacugcaugcagcaggggcccgccagcgcccgggaccugaucugcgcgcaguacgucgccggcuacaaggugcucccgccccugauggacgugaacauggaggccgccuacaccagcucccugcucgggagcaucgcgggcgucggcuggaccgccgggcuguccagcuucgccgccauccccuucgcccaguccaucuucuaccgccugaacggcguggggaucacccagcagguccucagcgagaaccagaagcugaucgcgaacaaguucaaccaggcccugggcgccaugcagacgggguucaccaccaccaacgaggccuuccggaaggugcaggacgccgugaacaacaacgcgcaggcccucuccaagcuggccagcgagcuguccaacacguucggcgccaucagcgccuccaucggcgacaucauccagcgccucgacgugcuggagcaggacgcgcagaucgaccggcugaucaacgggcgccucaccacccugaacgccuucgucgcccagcagcuggugcggagcgaguccgccgcgcucagcgcccagcuggccaaggacaaggugaacgagugcgucaaggcccaguccaagcgcagcggcuucugcgggcagggcacccacaucguguccuucgucgugaacgcccccaacggccuguacuucaugcacgugggguacuaccccagcaaccacaucgaggucguguccgcguacggccucugcgacgccgccaaccccacgaacugcaucgccccggugaacggguacuucaucaagaccaacaacacccggaucgucgacgaguggagcuacaccggcagcuccuucuacgcccccgagcccaucacgagccugaacaccaaguacguggcgccccaggugaccuaccagaacaucuccaccaaccugccgccgccccuccuggggaacagcaccggcaucgacuuccaggacgagcuggacgaguucuucaagaacgucuccacgagcauccccaacuucggcucccucacccagaucaacaccacccugcuggaccucacguacgagaugcugagccugcagcaggucgugaaggcccucaacgaguccuacaucgaccugaaggagcuggggaacuacaccuacuacaacaaguggcccugguacaucuggcucggcuucaucgccgggcugguggcccuggcccucugcguguucuucauccugugcugcaccggcugcgggaccaacugcaugggcaagcugaagugcaaccgcugcugcgaccgcuacgaggaguacgaccucgagccccacaaggugcacguccacugaggacuaguuauaagacugacuagcccgaugggccucccaacgggcccuccuccccuccuugcaccgagauuaauaaaaaaaaaaaaaaaaaaaaaaaaaaaaaaaaaaaaaaaaaaaaaaaaaaaaaaaaaaaaaaaaugcaucccccccccccccccccccccccccccccccaaaggcucuuuucagagccaccagaauu

SEQ ID NO: 14879 - RNA, 4279 nt, Artificial Sequence
  MERS-CoV/Riyadh_14_2013__AHI48572.1 spike protein mRNA gc (1-1353)(V1060P_L1061P)
aggagaaagcuuaccaugauccacagcguguuccugcucauguuccugcugacccccaccgaguccuacgucgacgugggcccggacagcgugaaguccgccugcaucgaggucgacauccagcagacguucuucgacaagaccuggccccgccccaucgacgugagcaaggccgacgggaucaucuacccccagggccggaccuacuccaacaucaccaucacguaccagggccucuucccguaccagggcgaccacggggacauguacguguacagcgcgggccacgccaccggcaccacgccccagaagcuguucgucgccaacuacucccaggacgugaagcaguucgccaacggguucgugguccgcaucggcgccgcggccaacagcaccgggaccgugaucaucucccccagcaccuccgccaccauccggaagaucuaccccgccuucaugcugggcagcuccguggggaacuucagcgacggcaagaugggccgcuucuucaaccacacgcucguccugcugccggacgggugcggcacccuccugcgggcguucuacugcauccuggagccccgcuccgggaaccacugccccgccggcaacagcuacaccuccuucgccaccuaccacacgcccgccaccgacugcagcgacggcaacuacaaccggaacgccucccucaacagcuucaaggaguacuucaaccugcgcaacugcaccuucauguacaccuacaacaucacggaggacgagauccuggagugguucgggaucacccagaccgcgcagggcgugcaccucuucagcucccgguacguggaccuguacgggggcaacauguuccaguucgccacccugccggucuacgacacgaucaaguacuacagcaucaucccccacuccauccgcagcauccaguccgaccggaaggccugggccgccuucuacguguacaagcuccagccccugaccuuccugcucgacuucagcguggacggguacauccgccgggcgaucgacugcggcuucaacgaccugucccagcugcacugcagcuacgaguccuucgacgucgagagcggcguguacuccgugagcuccuucgaggccaagcccagcggguccgucguggagcaggccgagggcguggagugcgacuucagcccgcuccuguccgggaccccgccccaggucuacaacuucaagcgccugguguucaccaacugcaacuacaaccucacgaagcugcugagccucuucuccgucaacgacuucacgugcagccagaucagccccgccgccaucgcguccaacugcuacagcucccugauccuggacuacuucagcuacccccucuccaugaaguccgaccugagcgugagcuccgccgggcccaucagccaguucaacuacaagcaguccuucagcaacccgaccugccugauccucgccaccgugccccacaaccugaccaccaucaccaagccccugaaguacuccuacaucaacaagugcagccggcuccuguccgacgaccgcaccgaggucccccagcuggugaacgccaaccaguacagccccugcguguccaucguccccagcacggugugggaggacggggacuacuaccggaagcagcucagcccgcuggagggcggcggguggcugguggccuccggcagcaccgucgcgaugaccgagcagcuccagaugggguucggcaucaccgugcaguacgggaccgacacgaacuccgugugccccaagcuggaguucgccaacgacaccaagaucgccagccagcugggcaacugcgucgaguacucccuguacggcgugagcgggcgcggcguguuccagaacugcaccgccgucggggugcggcagcagcgcuucguguacgacgcguaccagaaccucgucggcuacuacuccgacgacggcaacuacuacugccugcgggccugcgugagcgugcccgucuccgugaucuacgacaaggagaccaagacgcacgccacccuguucgggagcguggccugcgagcacaucuccagcaccaugucccaguacagccgcuccacccgcagcaugcucaagcggcgcgacuccacguacggcccgcugcagacccccgucgggugcgugcugggccucgugaacagcucccuguucgucgaggacugcaagcugccccucgggcagagccugugcgcccugcccgacaccccgagcacccucacgccccgguccgugcgcagcgugcccggcgagaugcggcuggcguccaucgccuucaaccaccccauccaggucgaccagcugaacagcuccuacuucaagcucagcaucccgaccaacuucuccuucggcgugacccaggaguacauccagaccacgauccagaaggugaccgucgacugcaagcaguacgugugcaacggguuccagaagugcgagcagcugcugcgcgaguacggccaguucugcagcaagaucaaccaggcccuccacggggccaaccugcggcaggacgacuccgugcgcaaccuguucgccagcgucaaguccagccaguccagccccaucauccccggcuucgggggcgacuucaaccucacccugcuggagcccguguccaucagcaccggcucccggagcgcgcgcuccgccaucgaggaccuccuguucgacaaggugacgaucgccgacccgggguacaugcagggcuacgacgacugcaugcagcaggggcccgccagcgcccgggaccugaucugcgcgcaguacgucgccggcuacaaggugcucccgccccugauggacgugaacauggaggccgccuacaccagcucccugcucgggagcaucgcgggcgucggcuggaccgccgggcuguccagcuucgccgccauccccuucgcccaguccaucuucuaccgccugaacggcguggggaucacccagcagguccucagcgagaaccagaagcugaucgcgaacaaguucaaccaggcccugggcgccaugcagacgggguucaccaccaccaacgaggccuuccggaaggugcaggacgccgugaacaacaacgcgcaggcccucuccaagcuggccagcgagcuguccaacacguucggcgccaucagcgccuccaucggcgacaucauccagcgccucgacccgcccgagcaggacgcgcagaucgaccggcugaucaacgggcgccugaccacccucaacgccuucguggcccagcagcugguccggagcgaguccgccgcgcugagcgcccagcucgccaaggacaaggugaacgagugcgugaaggcccaguccaagcgcagcggcuucugcgggcagggcacccacaucgucuccuucguggucaacgcccccaacggccuguacuucaugcacgugggguacuaccccagcaaccacaucgagguggucuccgcguacggccugugcgacgccgccaaccccacgaacugcaucgcccccgugaacggguacuucaucaagaccaacaacacccggaucguggacgaguggagcuacaccggcagcuccuucuacgcccccgagccgaucacgagccucaacaccaaguacgucgcgccccaggugaccuaccagaacaucuccaccaaccugcccccgccccugcucgggaacagcaccggcaucgacuuccaggacgagcuggacgaguucuucaagaacguguccacgagcauccccaacuucggcucccugacccagaucaacaccacccuccuggaccugacguacgagaugcucagccugcagcaggucgugaaggcccugaacgaguccuacaucgaccucaaggagcuggggaacuacaccuacuacaacaaguggcccugguacaucuggcugggcuucaucgccgggcucguggcccuggcccugugcgucuucuucauccucugcugcaccggcugcgggaccaacugcaugggcaagcugaagugcaaccgcugcugcgaccgcuacgaggaguacgaccuggagccgcacaaggugcacgugcacugaggacuaguuauaagacugacuagcccgaugggccucccaacgggcccuccuccccuccuugcaccgagauuaauaaaaaaaaaaaaaaaaaaaaaaaaaaaaaaaaaaaaaaaaaaaaaaaaaaaaaaaaaaaaaaaaugcaucccccccccccccccccccccccccccccccaaaggcucuuuucagagccaccagaauu

SEQ ID NO: 14880 - RNA, 4279 nt, Artificial Sequence
  MERS-CoV/Riyadh_14_2013__AHI48572.1 spike protein mRNA gc (1-1353)(R1020Q)
aggagaaagcuuaccaugauccacagcguguuccugcucauguuccugcugacccccaccgaguccuacgucgacgugggcccggacagcgugaaguccgccugcaucgaggucgacauccagcagacguucuucgacaagaccuggccccgccccaucgacgugagcaaggccgacgggaucaucuacccccagggccggaccuacuccaacaucaccaucacguaccagggccucuucccguaccagggcgaccacggggacauguacguguacagcgcgggccacgccaccggcaccacgccccagaagcuguucgucgccaacuacucccaggacgugaagcaguucgccaacggguucgugguccgcaucggcgccgcggccaacagcaccgggaccgugaucaucucccccagcaccuccgccaccauccggaagaucuaccccgccuucaugcugggcagcuccguggggaacuucagcgacggcaagaugggccgcuucuucaaccacacgcucguccugcugccggacgggugcggcacccuccugcgggcguucuacugcauccuggagccccgcuccgggaaccacugccccgccggcaacagcuacaccuccuucgccaccuaccacacgcccgccaccgacugcagcgacggcaacuacaaccggaacgccucccucaacagcuucaaggaguacuucaaccugcgcaacugcaccuucauguacaccuacaacaucacggaggacgagauccuggagugguucgggaucacccagaccgcgcagggcgugcaccucuucagcucccgguacguggaccuguacgggggcaacauguuccaguucgccacccugccggucuacgacacgaucaaguacuacagcaucaucccccacuccauccgcagcauccaguccgaccggaaggccugggccgccuucuacguguacaagcuccagccccugaccuuccugcucgacuucagcguggacggguacauccgccgggcgaucgacugcggcuucaacgaccugucccagcugcacugcagcuacgaguccuucgacgucgagagcggcguguacuccgugagcuccuucgaggccaagcccagcggguccgucguggagcaggccgagggcguggagugcgacuucagcccgcuccuguccgggaccccgccccaggucuacaacuucaagcgccugguguucaccaacugcaacuacaaccucacgaagcugcugagccucuucuccgucaacgacuucacgugcagccagaucagccccgccgccaucgcguccaacugcuacagcucccugauccuggacuacuucagcuacccccucuccaugaaguccgaccugagcgugagcuccgccgggcccaucagccaguucaacuacaagcaguccuucagcaacccgaccugccugauccucgccaccgugccccacaaccugaccaccaucaccaagccccugaaguacuccuacaucaacaagugcagccggcuccuguccgacgaccgcaccgaggucccccagcuggugaacgccaaccaguacagccccugcguguccaucguccccagcacggugugggaggacggggacuacuaccggaagcagcucagcccgcuggagggcggcggguggcugguggccuccggcagcaccgucgcgaugaccgagcagcuccagaugggguucggcaucaccgugcaguacgggaccgacacgaacuccgugugccccaagcuggaguucgccaacgacaccaagaucgccagccagcugggcaacugcgucgaguacucccuguacggcgugagcgggcgcggcguguuccagaacugcaccgccgucggggugcggcagcagcgcuucguguacgacgcguaccagaaccucgucggcuacuacuccgacgacggcaacuacuacugccugcgggccugcgugagcgugcccgucuccgugaucuacgacaaggagaccaagacgcacgccacccuguucgggagcguggccugcgagcacaucuccagcaccaugucccaguacagccgcuccacccgcagcaugcucaagcggcgcgacuccacguacggcccgcugcagacccccgucgggugcgugcugggccucgugaacagcucccuguucgucgaggacugcaagcugccccucgggcagagccugugcgcccugcccgacaccccgagcacccucacgccccgguccgugcgcagcgugcccggcgagaugcggcuggcguccaucgccuucaaccaccccauccaggucgaccagcugaacagcuccuacuucaagcucagcaucccgaccaacuucuccuucggcgugacccaggaguacauccagaccacgauccagaaggugaccgucgacugcaagcaguacgugugcaacggguuccagaagugcgagcagcugcugcgcgaguacggccaguucugcagcaagaucaaccaggcccuccacggggccaaccugcggcaggacgacuccgugcgcaaccuguucgccagcgucaaguccagccaguccagccccaucauccccggcuucgggggcgacuucaaccucacccugcuggagcccguguccaucagcaccggcucccggagcgcgcgcuccgccaucgaggaccuccuguucgacaaggugacgaucgccgacccgggguacaugcagggcuacgacgacugcaugcagcaggggcccgccagcgcccgggaccugaucugcgcgcaguacgucgccggcuacaaggugcucccgccccugauggacgugaacauggaggccgccuacaccagcucccugcucgggagcaucgcgggcgucggcuggaccgccgggcuguccagcuucgccgccauccccuucgcccaguccaucuucuaccgccugaacggcguggggaucacccagcagguccucagcgagaaccagaagcugaucgcgaacaaguucaaccaggcccugggcgccaugcagacgggguucaccaccaccaacgaggccuuccagaaggugcaggacgccgugaacaacaacgcgcaggcccucuccaagcuggccagcgagcuguccaacacguucggcgccaucagcgccuccaucggcgacaucauccagcggcucgacgugcuggagcaggacgcgcagaucgaccgccugaucaacgggcggcucaccacccugaacgccuucgucgcccagcagcuggugcgcagcgaguccgccgcgcucagcgcccagcuggccaaggacaaggugaacgagugcgucaaggcccaguccaagcggagcggcuucugcgggcagggcacccacaucguguccuucgucgugaacgcccccaacggccuguacuucaugcacgugggguacuaccccagcaaccacaucgaggucguguccgcguacggccucugcgacgccgccaaccccacgaacugcaucgccccggugaacggguacuucaucaagaccaacaacacccgcaucgucgacgaguggagcuacaccggcagcuccuucuacgcccccgagcccaucacgagccugaacaccaaguacguggcgccccaggugaccuaccagaacaucuccaccaaccugccgccgccccuccuggggaacagcaccggcaucgacuuccaggacgagcuggacgaguucuucaagaacgucuccacgagcauccccaacuucggcucccucacccagaucaacaccacccugcuggaccucacguacgagaugcugagccugcagcaggucgugaaggcccucaacgaguccuacaucgaccugaaggagcuggggaacuacaccuacuacaacaaguggcccugguacaucuggcucggcuucaucgccgggcugguggcccuggcccucugcguguucuucauccugugcugcaccggcugcgggaccaacugcaugggcaagcugaagugcaaccggugcugcgaccgcuacgaggaguacgaccucgagccccacaaggugcacguccacugaggacuaguuauaagacugacuagcccgaugggccucccaacgggcccuccuccccuccuugcaccgagauuaauaaaaaaaaaaaaaaaaaaaaaaaaaaaaaaaaaaaaaaaaaaaaaaaaaaaaaaaaaaaaaaaaugcaucccccccccccccccccccccccccccccccaaaggcucuuuucagagccaccagaauu

SEQ ID NO: 14881 - RNA, 1984 nt, Artificial Sequence
  MERS-CoV/Riyadh_14_2013__AHI48572.1 spike protein mRNA gc (1-17_726-1296)(R1020Q)
aggagaaagcuuaccaugauccacagcguguuccugcucauguuccugcugacccccaccgaguccgacugcaagcucccccugggccagagccugugcgcccuccccgacacgcccuccacccugacgccccgcagcguccgguccgugccgggggagaugcgccuggccagcaucgcguucaaccaccccauccagguggaccagcucaacuccagcuacuucaagcuguccauccccaccaacuucagcuucggcgucacccaggaguacauccagaccaccauccagaaggugaccguggacugcaagcaguacgucugcaacggguuccagaagugcgagcagcugcuccgggaguacggccaguucugcuccaagaucaaccaggcccugcacggggccaaccugcgccaggacgacagcgugcggaaccucuucgccuccgucaagagcucccagagcucccccaucaucccgggcuucggcggggacuucaaccugacgcugcucgagcccgugagcaucuccaccggcagccgcagcgcccgguccgcgaucgaggaccugcuguucgacaaggugaccaucgccgaccccggguacaugcagggcuacgacgacugcaugcagcaggggcccgccagcgcccgcgaccucaucugcgcgcaguacguggccggcuacaagguccugccgccccugauggacgugaacauggaggccgccuacaccuccagccuccugggcuccaucgccggggugggcuggacggcggggcugagcuccuucgccgccauccccuucgcccagagcaucuucuaccggcucaacggcgucggcaucacccagcagguccuguccgagaaccagaagcugaucgccaacaaguucaaccaggcgcucggggccaugcagaccggcuucaccacgaccaacgaggccuuccagaaggugcaggacgccgugaacaacaacgcccaggcgcugagcaagcuggccuccgagcucagcaacaccuucggggccaucuccgccagcaucggcgacaucauccagcgccuggacgugcuggagcaggacgcccagaucgaccggcucaucaacgggcgccugaccacgcugaacgcguucguggcccagcagcucguccgguccgagagcgccgcccuguccgcgcagcuggccaaggacaaggugaacgagugcgugaaggcccagagcaagcgcuccggcuucugcggccaggggacccacaucgucagcuucguggucaacgcccccaacggccucuacuucaugcacgugggguacuacccgagcaaccacaucgagguggucuccgccuacggccugugcgacgcggccaaccccaccaacugcaucgcccccgugaacggguacuucaucaagaccaacaacacgcggaucguggacgaguggagcuacaccggcuccagcuucuacgcccccgagccgaucaccucccugaacaccaaguacgucgcgccccaggugacguaccagaacaucagcaccaaccucccgccgccccugcugggcaacuccaccgggaucgacuuccaggacgagcuggacgaguucuucaagaacgugagcaccuccauccccaacuucggcagccucacgcagaucaacaccacccugcuggaccucaccuacgagaugcugucccugcagcaggucgugaaggcccucaacgagagcuacaucgaccugaaggagcuggggaacuacacguacuacaacaaguggcccugaggacuaguuauaagacugacuagcccgaugggccucccaacgggcccuccuccccuccuugcaccgagauuaauaaaaaaaaaaaaaaaaaaaaaaaaaaaaaaaaaaaaaaaaaaaaaaaaaaaaaaaaaaaaaaaaugcaucccccccccccccccccccccccccccccccaaaggcucuuuucagagccaccagaauu

SEQ ID NO: 14882 - RNA, 2065 nt, Artificial Sequence
  MERS-CoV/Riyadh_14_2013__AHI48572.1 spike protein mRNA gc (1-17_726-1296)(R1020Q)_LeucineZipper
aggagaaagcuuaccaugauccacagcguguuccugcucauguuccugcugacccccaccgaguccgacugcaagcucccccugggccagagccugugcgcccuccccgacacgcccuccacccugacgccccgcagcguccgguccgugccgggggagaugcgccuggccagcaucgcguucaaccaccccauccagguggaccagcucaacuccagcuacuucaagcuguccauccccaccaacuucagcuucggcgucacccaggaguacauccagaccaccauccagaaggugaccguggacugcaagcaguacgucugcaacggguuccagaagugcgagcagcugcuccgggaguacggccaguucugcuccaagaucaaccaggcccugcacggggccaaccugcgccaggacgacagcgugcggaaccucuucgccuccgucaagagcucccagagcucccccaucaucccgggcuucggcggggacuucaaccugacgcugcucgagcccgugagcaucuccaccggcagccgcagcgcccgguccgcgaucgaggaccugcuguucgacaaggugaccaucgccgaccccggguacaugcagggcuacgacgacugcaugcagcaggggcccgccagcgcccgcgaccucaucugcgcgcaguacguggccggcuacaagguccugccgccccugauggacgugaacauggaggccgccuacaccuccagccuccugggcuccaucgccggggugggcuggacggcggggcugagcuccuucgccgccauccccuucgcccagagcaucuucuaccggcucaacggcgucggcaucacccagcagguccuguccgagaaccagaagcugaucgccaacaaguucaaccaggcgcucggggccaugcagaccggcuucaccacgaccaacgaggccuuccagaaggugcaggacgccgugaacaacaacgcccaggcgcugagcaagcuggccuccgagcucagcaacaccuucggggccaucuccgccagcaucggcgacaucauccagcgccuggacgugcuggagcaggacgcccagaucgaccggcucaucaacgggcgccugaccacgcugaacgcguucguggcccagcagcucguccgguccgagagcgccgcccuguccgcgcagcuggccaaggacaaggugaacgagugcgugaaggcccagagcaagcgcuccggcuucugcggccaggggacccacaucgucagcuucguggucaacgcccccaacggccucuacuucaugcacgugggguacuacccgagcaaccacaucgagguggucuccgccuacggccugugcgacgcggccaaccccaccaacugcaucgcccccgugaacggguacuucaucaagaccaacaacacgcggaucguggacgaguggagcuacaccggcuccagcuucuacgcccccgagccgaucaccucccugaacaccaaguacgucgcgccccaggugacguaccagaacaucagcaccaaccucccgccgccccugcugggcaacuccaccgggaucgacuuccaggacgagcuggacgaguucuucaagaacgugagcaccuccauccccaacuucggcagccucacgcagaucaacaccacccugcuggaccucaccuacgagaugcugucccugcagcaggucgugaaggcccucaacgagagcuacaucgaccugaaggagcuggggaacuacacguacuacaacaaguggcccgacaagaucgaggagauccucuccaagaucuaccacaucgagaacgagaucgcccgcaucaagaagcugaucggcgaggccugaggacuaguuauaagacugacuagcccgaugggccucccaacgggcccuccuccccuccuugcaccgagauuaauaaaaaaaaaaaaaaaaaaaaaaaaaaaaaaaaaaaaaaaaaaaaaaaaaaaaaaaaaaaaaaaaugcaucccccccccccccccccccccccccccccccaaaggcucuuuucagagccaccagaauu

SEQ ID NO: 14883 - RNA, 4279 nt, Artificial Sequence
  MERS-CoV/England 1__YP_007188579.1 spike protein mRNA gc (1-1353)
aggagaaagcuuaccaugauccacagcguguuccugcucauguuccugcugacccccaccgaguccuacgucgacgugggcccggacagcgugaaguccgccugcaucgaggucgacauccagcagacguucuucgacaagaccuggccccgccccaucgacgugagcaaggccgacgggaucaucuacccccagggccggaccuacuccaacaucaccaucacguaccagggccucuucccguaccagggcgaccacggggacauguacguguacagcgcgggccacgccaccggcaccacgccccagaagcuguucgucgccaacuacucccaggacgugaagcaguucgccaacggguucgugguccgcaucggcgccgcggccaacagcaccgggaccgugaucaucucccccagcaccuccgccaccauccggaagaucuaccccgccuucaugcugggcagcuccguggggaacuucagcgacggcaagaugggccgcuucuucaaccacacgcucguccugcugccggacgggugcggcacccuccugcgggcguucuacugcauccuggagccccgcuccgggaaccacugccccgccggcaacagcuacaccuccuucgccaccuaccacacgcccgccaccgacugcagcgacggcaacuacaaccggaacgccucccucaacagcuucaaggaguacuucaaccugcgcaacugcaccuucauguacaccuacaacaucacggaggacgagauccuggagugguucgggaucacccagaccgcgcagggcgugcaccucuucagcucccgguacguggaccuguacgggggcaacauguuccaguucgccacccugccggucuacgacacgaucaaguacuacagcaucaucccccacuccauccgcagcauccaguccgaccggaaggccugggccgccuucuacguguacaagcuccagccccugaccuuccugcucgacuucagcguggacggguacauccgccgggcgaucgacugcggcuucaacgaccugucccagcugcacugcagcuacgaguccuucgacgucgagagcggcguguacuccgugagcuccuucgaggccaagcccagcggguccgucguggagcaggccgagggcguggagugcgacuucagcccgcuccuguccgggaccccgccccaggucuacaacuucaagcgccugguguucaccaacugcaacuacaaccucacgaagcugcugagccucuucuccgucaacgacuucacgugcagccagaucagccccgccgccaucgcguccaacugcuacagcucccugauccuggacuacuucagcuacccccucuccaugaaguccgaccugagcgugagcuccgccgggcccaucagccaguucaacuacaagcaguccuucagcaacccgaccugccugauccucgccaccgugccccacaaccugaccaccaucaccaagccccugaaguacuccuacaucaacaagugcagccgguuccucuccgacgaccgcaccgaggucccccagcuggugaacgccaaccaguacagccccugcguguccaucguccccagcacggugugggaggacggggacuacuaccggaagcagcugagcccgcucgagggcggcggguggcugguggccuccggcagcaccgucgcgaugaccgagcagcugcagaugggguucggcaucaccgugcaguacgggaccgacacgaacuccgugugccccaagcucgaguucgccaacgacaccaagaucgccagccagcugggcaacugcgucgaguacucccuguacggcgugagcgggcgcggcguguuccagaacugcaccgccgucggggugcggcagcagcgcuucguguacgacgcguaccagaaccuggucggcuacuacuccgacgacggcaacuacuacugccuccgggccugcgugagcgugcccgucuccgugaucuacgacaaggagaccaagacgcacgccacccuguucgggagcguggccugcgagcacaucuccagcaccaugucccaguacagccgcuccacccgcagcaugcugaagcggcgcgacuccacguacggcccgcuccagacccccgucgggugcgugcugggccuggugaacagcucccucuucgucgaggacugcaagcugccccuggggcagagccucugcgcccugcccgacaccccgagcacccugacgccccgguccgugcgcagcgugcccggcgagaugcggcucgcguccaucgccuucaaccaccccauccaggucgaccagcugaacagcuccuacuucaagcugagcaucccgaccaacuucuccuucggcgugacccaggaguacauccagaccacgauccagaaggugaccgucgacugcaagcaguacgugugcaacggguuccagaagugcgagcagcuccugcgcgaguacggccaguucugcagcaagaucaaccaggcccugcacggggccaaccuccggcaggacgacuccgugcgcaaccuguucgccagcgucaaguccagccaguccagccccaucauccccggcuucgggggcgacuucaaccugacccuccuggagcccguguccaucagcaccggcucccggagcgcgcgcuccgccaucgaggaccuccuguucgacaaggugacgaucgccgacccgggguacaugcagggcuacgacgacugcaugcagcaggggcccgccagcgcccgggaccugaucugcgcgcaguacgucgccggcuacaaggugcugccgccccucauggacgugaacauggaggccgccuacaccagcucccugcuggggagcaucgcgggcgucggcuggaccgccgggcucuccagcuucgccgccauccccuucgcccaguccaucuucuaccgccugaacggcguggggaucacccagcagguccugagcgagaaccagaagcucaucgcgaacaaguucaaccaggcccugggcgccaugcagacgggguucaccaccaccaacgaggccuuccacaaggugcaggacgccgugaacaacaacgcgcaggcccuguccaagcucgccagcgagcuguccaacacguucggcgccaucagcgccuccaucggcgacaucauccagcggcuggacgugcucgagcaggacgcgcagaucgaccgccugaucaacgggcggcugaccacccucaacgccuucgucgcccagcagcuggugcgcagcgaguccgccgcgcugagcgcccagcucgccaaggacaaggugaacgagugcgucaaggcccaguccaagcggagcggcuucugcgggcagggcacccacaucguguccuucgucgugaacgcccccaacggccuguacuucaugcacgugggguacuaccccagcaaccacaucgaggucguguccgcguacggccugugcgacgccgccaaccccacgaacugcaucgccccggugaacggguacuucaucaagaccaacaacacccgcaucgucgacgaguggagcuacaccggcagcuccuucuacgcccccgagcccaucacgagccucaacaccaaguacguggcgccccaggugaccuaccagaacaucuccaccaaccugccgccgccccugcucgggaacagcaccggcaucgacuuccaggacgagcuggacgaguucuucaagaacgucuccacgagcauccccaacuucggcucccugacccagaucaacaccacccuccuggaccugacguacgagaugcucagccugcagcaggucgugaaggcccugaacgaguccuacaucgaccucaaggagcuggggaacuacaccuacuacaacaaguggcccugguacaucuggcugggcuucaucgccgggcucguggcccuggcccugugcguguucuucauccucugcugcaccggcugcgggaccaacugcaugggcaagcugaagugcaaccggugcugcgaccgcuacgaggaguacgaccuggagccccacaaggugcacguccacugaggacuaguuauaagacugacuagcccgaugggccucccaacgggcccuccuccccuccuugcaccgagauuaauaaaaaaaaaaaaaaaaaaaaaaaaaaaaaaaaaaaaaaaaaaaaaaaaaaaaaaaaaaaaaaaaugcaucccccccccccccccccccccccccccccccaaaggcucuuuucagagccaccagaauu

SEQ ID NO: 14884 - RNA, 4279 nt, Artificial Sequence
  MERS-CoV/England 1__YP_007188579.1 spike protein mRNA gc (1-1353)(V1060P_L1061P)
aggagaaagcuuaccaugauccacagcguguuccugcucauguuccugcugacccccaccgaguccuacgucgacgugggcccggacagcgugaaguccgccugcaucgaggucgacauccagcagacguucuucgacaagaccuggccccgccccaucgacgugagcaaggccgacgggaucaucuacccccagggccggaccuacuccaacaucaccaucacguaccagggccucuucccguaccagggcgaccacggggacauguacguguacagcgcgggccacgccaccggcaccacgccccagaagcuguucgucgccaacuacucccaggacgugaagcaguucgccaacggguucgugguccgcaucggcgccgcggccaacagcaccgggaccgugaucaucucccccagcaccuccgccaccauccggaagaucuaccccgccuucaugcugggcagcuccguggggaacuucagcgacggcaagaugggccgcuucuucaaccacacgcucguccugcugccggacgggugcggcacccuccugcgggcguucuacugcauccuggagccccgcuccgggaaccacugccccgccggcaacagcuacaccuccuucgccaccuaccacacgcccgccaccgacugcagcgacggcaacuacaaccggaacgccucccucaacagcuucaaggaguacuucaaccugcgcaacugcaccuucauguacaccuacaacaucacggaggacgagauccuggagugguucgggaucacccagaccgcgcagggcgugcaccucuucagcucccgguacguggaccuguacgggggcaacauguuccaguucgccacccugccggucuacgacacgaucaaguacuacagcaucaucccccacuccauccgcagcauccaguccgaccggaaggccugggccgccuucuacguguacaagcuccagccccugaccuuccugcucgacuucagcguggacggguacauccgccgggcgaucgacugcggcuucaacgaccugucccagcugcacugcagcuacgaguccuucgacgucgagagcggcguguacuccgugagcuccuucgaggccaagcccagcggguccgucguggagcaggccgagggcguggagugcgacuucagcccgcuccuguccgggaccccgccccaggucuacaacuucaagcgccugguguucaccaacugcaacuacaaccucacgaagcugcugagccucuucuccgucaacgacuucacgugcagccagaucagccccgccgccaucgcguccaacugcuacagcucccugauccuggacuacuucagcuacccccucuccaugaaguccgaccugagcgugagcuccgccgggcccaucagccaguucaacuacaagcaguccuucagcaacccgaccugccugauccucgccaccgugccccacaaccugaccaccaucaccaagccccugaaguacuccuacaucaacaagugcagccgguuccucuccgacgaccgcaccgaggucccccagcuggugaacgccaaccaguacagccccugcguguccaucguccccagcacggugugggaggacggggacuacuaccggaagcagcugagcccgcucgagggcggcggguggcugguggccuccggcagcaccgucgcgaugaccgagcagcugcagaugggguucggcaucaccgugcaguacgggaccgacacgaacuccgugugccccaagcucgaguucgccaacgacaccaagaucgccagccagcugggcaacugcgucgaguacucccuguacggcgugagcgggcgcggcguguuccagaacugcaccgccgucggggugcggcagcagcgcuucguguacgacgcguaccagaaccuggucggcuacuacuccgacgacggcaacuacuacugccuccgggccugcgugagcgugcccgucuccgugaucuacgacaaggagaccaagacgcacgccacccuguucgggagcguggccugcgagcacaucuccagcaccaugucccaguacagccgcuccacccgcagcaugcugaagcggcgcgacuccacguacggcccgcuccagacccccgucgggugcgugcugggccuggugaacagcucccucuucgucgaggacugcaagcugccccuggggcagagccucugcgcccugcccgacaccccgagcacccugacgccccgguccgugcgcagcgugcccggcgagaugcggcucgcguccaucgccuucaaccaccccauccaggucgaccagcugaacagcuccuacuucaagcugagcaucccgaccaacuucuccuucggcgugacccaggaguacauccagaccacgauccagaaggugaccgucgacugcaagcaguacgugugcaacggguuccagaagugcgagcagcuccugcgcgaguacggccaguucugcagcaagaucaaccaggcccugcacggggccaaccuccggcaggacgacuccgugcgcaaccuguucgccagcgucaaguccagccaguccagccccaucauccccggcuucgggggcgacuucaaccugacccuccuggagcccguguccaucagcaccggcucccggagcgcgcgcuccgccaucgaggaccuccuguucgacaaggugacgaucgccgacccgggguacaugcagggcuacgacgacugcaugcagcaggggcccgccagcgcccgggaccugaucugcgcgcaguacgucgccggcuacaaggugcugccgccccucauggacgugaacauggaggccgccuacaccagcucccugcuggggagcaucgcgggcgucggcuggaccgccgggcucuccagcuucgccgccauccccuucgcccaguccaucuucuaccgccugaacggcguggggaucacccagcagguccugagcgagaaccagaagcucaucgcgaacaaguucaaccaggcccugggcgccaugcagacgggguucaccaccaccaacgaggccuuccacaaggugcaggacgccgugaacaacaacgcgcaggcccuguccaagcucgccagcgagcuguccaacacguucggcgccaucagcgccuccaucggcgacaucauccagcggcuggacccgcccgagcaggacgcgcagaucgaccgccucaucaacgggcggcugaccacccugaacgccuucguggcccagcagcucguccgcagcgaguccgccgcgcugagcgcccagcuggccaaggacaaggugaacgagugcgugaaggcccaguccaagcggagcggcuucugcgggcagggcacccacaucgucuccuucguggucaacgcccccaacggccucuacuucaugcacgugggguacuaccccagcaaccacaucgagguggucuccgcguacggccugugcgacgccgccaaccccacgaacugcaucgcccccgugaacggguacuucaucaagaccaacaacacccgcaucguggacgaguggagcuacaccggcagcuccuucuacgcccccgagccgaucacgagccugaacaccaaguacgucgcgccccaggugaccuaccagaacaucuccaccaaccugcccccgccccuccuggggaacagcaccggcaucgacuuccaggacgagcucgacgaguucuucaagaacguguccacgagcauccccaacuucggcucccugacccagaucaacaccacccugcucgaccugacguacgagaugcugagccuccagcaggucgugaaggcccugaacgaguccuacaucgaccugaaggagcucgggaacuacaccuacuacaacaaguggcccugguacaucuggcugggcuucaucgccgggcugguggcccucgcccugugcgucuucuucauccugugcugcaccggcugcgggaccaacugcaugggcaagcucaagugcaaccggugcugcgaccgcuacgaggaguacgaccuggagccgcacaaggugcacgugcacugaggacuaguuauaagacugacuagcccgaugggccucccaacgggcccuccuccccuccuugcaccgagauuaauaaaaaaaaaaaaaaaaaaaaaaaaaaaaaaaaaaaaaaaaaaaaaaaaaaaaaaaaaaaaaaaaugcaucccccccccccccccccccccccccccccccaaaggcucuuuucagagccaccagaauu

SEQ ID NO: 14885 - RNA, 4093 nt, Artificial Sequence
  MERS-CoV/England 1__YP_007188579.1 spike protein mRNA gc (variant)
aggagaaagcuuaccaugauccacagcguguuccugcucauguuccugcugacccccaccgaguccuacgucgacgugggcccggacagcgugaaguccgccugcaucgaggucgacauccagcagacguucuucgacaagaccuggccccgccccaucgacgugagcaaggccgacgggaucaucuacccccagggccggaccuacuccaacaucaccaucacguaccagggccucuucccguaccagggcgaccacggggacauguacguguacagcgcgggccacgccaccggcaccacgccccagaagcuguucgucgccaacuacucccaggacgugaagcaguucgccaacggguucgugguccgcaucggcgccgcggccaacagcaccgggaccgugaucaucucccccagcaccuccgccaccauccggaagaucuaccccgccuucaugcugggcagcuccguggggaacuucagcgacggcaagaugggccgcuucuucaaccacacgcucguccugcugccggacgggugcggcacccuccugcgggcguucuacugcauccuggagccccgcuccgggaaccacugccccgccggcaacagcuacaccuccuucgccaccuaccacacgcccgccaccgacugcagcgacggcaacuacaaccggaacgccucccucaacagcuucaaggaguacuucaaccugcgcaacugcaccuucauguacaccuacaacaucacggaggacgagauccuggagugguucgggaucacccagaccgcgcagggcgugcaccucuucagcucccgguacguggaccuguacgggggcaacauguuccaguucgccacccugccggucuacgacacgaucaaguacuacagcaucaucccccacuccauccgcagcauccaguccgaccggaaggccugggccgccuucuacguguacaagcuccagccccugaccuuccugcucgacuucagcguggacggguacauccgccgggcgaucgacugcggcuucaacgaccugucccagcugcacugcagcuacgaguccuucgacgucgagagcggcguguacuccgugagcuccuucgaggccaagcccagcggguccgucguggagcaggccgagggcguggagugcgacuucagcccgcuccuguccgggaccccgccccaggucuacaacuucaagcgccugguguucaccaacugcaacuacaaccucacgaagcugcugagccucuucuccgucaacgacuucacgugcagccagaucagccccgccgccaucgcguccaacugcuacagcucccugauccuggacuacuucagcuacccccucuccaugaaguccgaccugagcgugagcuccgccgggcccaucagccaguucaacuacaagcaguccuucagcaacccgaccugccugauccucgccaccgugccccacaaccugaccaccaucaccaagccccugaaguacuccuacaucaacaagugcagccgguuccucuccgacgaccgcaccgaggucccccagcuggugaacgccaaccaguacagccccugcguguccaucguccccagcacggugugggaggacggggacuacuaccggaagcagcugagcccgcucgagggcggcggguggcugguggccuccggcagcaccgucgcgaugaccgagcagcugcagaugggguucggcaucaccgugcaguacgggaccgacacgaacuccgugugccccaagcucgaguucgccaacgacaccaagaucgccagccagcugggcaacugcgucgaguacucccuguacggcgugagcgggcgcggcguguuccagaacugcaccgccgucggggugcggcagcagcgcuucguguacgacgcguaccagaaccuggucggcuacuacuccgacgacggcaacuacuacugccuccgggccugcgugagcgugcccgucuccgugaucuacgacaaggagaccaagacgcacgccacccuguucgggagcguggccugcgagcacaucuccagcaccaugucccaguacagccgcuccacccgcagcaugcugaagcggcgcgacuccacguacggcccgcuccagacccccgucgggugcgugcugggccuggugaacagcucccucuucgucgaggacugcaagcugccccuggggcagagccucugcgcccugcccgacaccccgagcacccugacgccccgguccgugcgcagcgugcccggcgagaugcggcucgcguccaucgccuucaaccaccccauccaggucgaccagcugaacagcuccuacuucaagcugagcaucccgaccaacuucuccuucggcgugacccaggaguacauccagaccacgauccagaaggugaccgucgacugcaagcaguacgugugcaacggguuccagaagugcgagcagcuccugcgcgaguacggccaguucugcagcaagaucaaccaggcccugcacggggccaaccuccggcaggacgacuccgugcgcaaccuguucgccagcgucaaguccagccaguccagccccaucauccccggcuucgggggcgacuucaaccugacccuccuggagcccguguccaucagcaccggcucccggagcgcgcgcuccgccaucgaggaccuccuguucgacaaggugacgaucgccgacccgggguacaugcagggcuacgacgacugcaugcagcaggggcccgccagcgcccgggaccugaucugcgcgcaguacgucgccggcuacaaggugcugccgccccucauggacgugaacauggaggccgccuacaccagcucccugcuggggagcaucgcgggcgucggcuggaccgccgggcucuccagcuucgccgccauccccuucgcccaguccaucuucuaccgccugaacggcguggggaucacccagcagguccugagcgagaaccagaagcucaucgcgaacaaguucaaccaggcccugggcgccaugcagacgggguucaccaccaccaacgaggccuuccacaaggugcaggacgccgugaacaacaacgcgcaggcccuguccaagcucgccagcgagcuguccaacacguucggcgccaucagcgccuccaucggcgacaucauccagcggcuggacccgcccgagcaggacgcgcagaucgaccgccucaucaacgggcggcugaccacccugaacgccuucguggcccagcagcucguccgcagcgaguccgccgcgcugagcgcccagcuggccaaggacaaggugaacgagugcgugaaggcccaguccaagcggagcggcuucugcgggcagggcacccacaucgucuccuucguggucaacgcccccaacggccucuacuucaugcacgugggguacuaccccagcaaccacaucgagguggucuccgcguacggccugugcgacgccgccaaccccacgaacugcaucgcccccgugaacggguacuucaucaagaccaacaacacccgcaucguggacgaguggagcuacaccggcagcuccuucuacgcccccgagccgaucacgagccugaacaccaaguacgucgcgccccaggugaccuaccagaacaucuccaccaaccugcccccgccccuccuggggaacagcaccggcaucgacuuccaggacgagcucgacgaguucuucaagaacguguccacgagcauccccaacuucggcucccugacccagaucaacaccacccugcucgaccugacguacgagaugcugagccuccagcaggucgugaaggcccugaacgaguccuacaucgaccugaaggagcucgggaacuacaccuacugaggacuaguuauaagacugacuagcccgaugggccucccaacgggcccuccuccccuccuugcaccgagauuaauaaaaaaaaaaaaaaaaaaaaaaaaaaaaaaaaaaaaaaaaaaaaaaaaaaaaaaaaaaaaaaaaugcaucccccccccccccccccccccccccccccccaaaggcucuuuucagagccaccagaauu

SEQ ID NO: 14886 - RNA, 4093 nt, Artificial Sequence
  MERS-CoV/England 1__YP_007188579.1 spike protein mRNA gc (variant)
aggagaaagcuuaccaugauccacagcguguuccugcucauguuccugcugacccccaccgaguccuacgucgacgugggcccggacagcgugaaguccgccugcaucgaggucgacauccagcagacguucuucgacaagaccuggccccgccccaucgacgugagcaaggccgacgggaucaucuacccccagggccggaccuacuccaacaucaccaucacguaccagggccucuucccguaccagggcgaccacggggacauguacguguacagcgccggccacgccaccggcaccacgccccagaagcuguucgucgccaacuacucccaggacgugaagcaguucgccaacggguucgugguccgcaucggcgccgcggccaacagcaccgggaccgugaucaucucccccagcaccuccgccaccauccggaagaucuaccccgccuucaugcugggcagcuccguggggaacuucagcgacggcaagaugggccgcuucuucaaccacacgcucguccugcugccggacgggugcggcacccuccugcgggcguucuacugcauccuggagccccgcuccgggaaccacugccccgccggcaacagcuacaccuccuucgccaccuaccacacgcccgccaccgacugcagcgacggcaacuacaaccggaacgccucccucaacagcuucaaggaguacuucaaccugcgcaacugcaccuucauguacaccuacaacaucacggaggacgagauccuggagugguucgggaucacccagaccgcgcagggcgugcaccucuucagcucccgguacguggaccuguacgggggcaacauguuccaguucgccacccugccggucuacgacacgaucaaguacuacagcaucaucccccacuccauccgcagcauccaguccgaccggaaggccugggccgccuucuacguguacaagcuccagccccugaccuuccugcucgacuucagcguggacggguacauccgccgggcgaucgacugcggcuucaacgaccugucccagcugcacugcagcuacgaguccuucgacgucgagagcggcguguacuccgugagcuccuucgaggccaagcccagcggguccgucguggagcaggccgagggcguggagugcgacuucagcccgcuccuguccgggaccccgccccaggucuacaacuucaagcgccugguguucaccaacugcaacuacaaccucacgaagcugcugagccucuucuccgucaacgacuucacgugcagccagaucagccccgccgccaucgcguccaacugcuacagcucccugauccuggacuacuucagcuacccccucuccaugaaguccgaccugagcgugagcuccgccgggcccaucagccaguucaacuacaagcaguccuucagcaacccgaccugccugauccucgccaccgugccccacaaccugaccaccaucaccaagccccugaaguacuccuacaucaacaagugcagccgguuccucuccgacgaccgcaccgaggucccccagcuggugaacgccaaccaguacagccccugcguguccaucguccccagcacggugugggaggacggggacuacuaccggaagcagcugagcccgcucgagggcggcggguggcugguggccuccggcagcaccgucgcgaugaccgagcagcugcagaugggguucggcaucaccgugcaguacgggaccgacacgaacuccgugugccccaagcucgaguucgccaacgacaccaagaucgccagccagcugggcaacugcgucgaguacucccuguacggcgugagcgggcgcggcguguuccagaacugcaccgccgucggggugcggcagcagcgcuucguguacgacgcguaccagaaccuggucggcuacuacuccgacgacggcaacuacuacugccuccgggccugcgugagcgugcccgucuccgugaucuacgacaaggagaccaagacgcacgccacccuguucgggagcguggccugcgagcacaucuccagcaccaugucccaguacagccgcuccacccgcagcaugcugaagcggcgcgacuccacguacggcccgcuccagacccccgucgggugcgugcugggccuggugaacagcucccucuucgucgaggacugcaagcugccccuggggcagagccucugcgcccugcccgacaccccgagcacccugacgcccgcguccgugggcagcgugcccggcgagaugcggcucgccuccaucgccuucaaccaccccauccaggucgaccagcugaacagcuccuacuucaagcugagcaucccgaccaacuucuccuucggggugacccaggaguacauccagaccacgauccagaaggugaccgucgacugcaagcaguacgugugcaacggcuuccagaagugcgagcagcuccugcgcgaguacgggcaguucugcagcaagaucaaccaggcccugcacggcgccaaccuccggcaggacgacuccgugcgcaaccuguucgcgagcgucaaguccagccaguccagccccaucauccccggguucggcggcgacuucaaccugacccuccuggagcccguguccaucagcaccgggucccggagcgcccgcuccgccaucgaggaccuccuguucgacaaggugacgaucgccgacccgggcuacaugcagggguacgacgacugcaugcagcagggccccgccagcgcgcgggaccugaucugcgcccaguacgucgccggguacaaggugcugccgccccucauggacgugaacauggaggccgcguacaccagcucccugcugggcagcaucgccggcgucggguggaccgccggccucuccagcuucgccgccauccccuucgcgcaguccaucuucuaccgccugaacggggugggcaucacccagcagguccugagcgagaaccagaagcucaucgccaacaaguucaaccaggcccugggggccaugcagacgggcuucaccaccaccaacgaggccuuccacaaggugcaggacgcggugaacaacaacgcccaggcccuguccaagcucgccagcgagcuguccaacacguucggcgccaucagcgcguccaucggggacaucauccagcggcuggacccgcccgagcaggacgcccagaucgaccgccucaucaacggccggcugaccacccugaacgccuucguggcccagcagcucguccgcagcgaguccgcggcccugagcgcccagcuggccaaggacaaggugaacgagugcgugaaggcccaguccaagcggagcggguucugcggccagggcacccacaucgucuccuucguggucaacgcgcccaacgggcucuacuucaugcacgugggcuacuaccccagcaaccacaucgagguggucuccgccuacgggcugugcgacgccgccaaccccacgaacugcaucgcccccgugaacggcuacuucaucaagaccaacaacacccgcaucguggacgaguggagcuacaccgggagcuccuucuacgcgcccgagccgaucacgagccugaacaccaaguacgucgcgccccaggugaccuaccagaacaucuccaccaaccugcccccgccccuccugggcaacagcaccggcaucgacuuccaggacgagcucgacgaguucuucaagaacguguccacgagcauccccaacuucgggucccugacccagaucaacaccacccugcucgaccugacguacgagaugcugagccuccagcaggucgugaaggcccugaacgaguccuacaucgaccugaaggagcucggcaacuacaccuacugaggacuaguuauaagacugacuagcccgaugggccucccaacgggcccuccuccccuccuugcaccgagauuaauaaaaaaaaaaaaaaaaaaaaaaaaaaaaaaaaaaaaaaaaaaaaaaaaaaaaaaaaaaaaaaaaugcaucccccccccccccccccccccccccccccccaaaggcucuuuucagagccaccagaauu

SEQ ID NO: 14887 - RNA, 4093 nt, Artificial Sequence
  MERS-CoV/England 1__YP_007188579.1 spike protein mRNA gc (variant)
aggagaaagcuuaccaugauccacagcguguuccugcucauguuccugcugacccccaccgaguccuacgucgacgugggcccggacagcgugaaguccgccugcaucgaggucgacauccagcagacguucuucgacaagaccuggccccgccccaucgacgugagcaaggccgacgggaucaucuacccccagggccggaccuacuccaacaucaccaucacguaccagggccucuucccguaccagggcgaccacggggacauguacguguacagcgccggccacgccaccggcaccacgccccagaagcuguucgucgccaacuacucccaggacgugaagcaguucgccaacggguucgugguccgcaucggcgccgcggccaacagcaccgggaccgugaucaucucccccagcaccuccgccaccauccggaagaucuaccccgccuucaugcugggcagcuccguggggaacuucagcgacggcaagaugggccgcuucuucaaccacacgcucguccugcugccggacgggugcggcacccuccugcgggcguucuacugcauccuggagccccgcuccgggaaccacugccccgccggcaacagcuacaccuccuucgccaccuaccacacgcccgccaccgacugcagcgacggcaacuacaaccggaacgccucccucaacagcuucaaggaguacuucaaccugcgcaacugcaccuucauguacaccuacaacaucacggaggacgagauccuggagugguucgggaucacccagaccgcgcagggcgugcaccucuucagcucccgguacguggaccuguacgggggcaacauguuccaguucgccacccugccggucuacgacacgaucaaguacuacagcaucaucccccacuccauccgcagcauccaguccgaccggaaggccugggccgccuucuacguguacaagcuccagccccugaccuuccugcucgacuucagcguggacggguacauccgccgggcgaucgacugcggcuucaacgaccugucccagcugcacugcagcuacgaguccuucgacgucgagagcggcguguacuccgugagcuccuucgaggccaagcccagcggguccgucguggagcaggccgagggcguggagugcgacuucagcccgcuccuguccgggaccccgccccaggucuacaacuucaagcgccugguguucaccaacugcaacuacaaccucacgaagcugcugagccucuucuccgucaacgacuucacgugcagccagaucagccccgccgccaucgcguccaacugcuacagcucccugauccuggacuacuucagcuacccccucuccaugaaguccgaccugagcgugagcuccgccgggcccaucagccaguucaacuacaagcaguccuucagcaacccgaccugccugauccucgccaccgugccccacaaccugaccaccaucaccaagccccugaaguacuccuacaucaacaagugcagccgguuccucuccgacgaccgcaccgaggucccccagcuggugaacgccaaccaguacagccccugcguguccaucguccccagcacggugugggaggacggggacuacuaccggaagcagcugagcccgcucgagggcggcggguggcugguggccuccggcagcaccgucgcgaugaccgagcagcugcagaugggguucggcaucaccgugcaguacgggaccgacacgaacuccgugugccccaagcucgaguucgccaacgacaccaagaucgccagccagcugggcaacugcgucgaguacucccuguacggcgugagcgggcgcggcguguuccagaacugcaccgccgucggggugcggcagcagcgcuucguguacgacgcguaccagaaccuggucggcuacuacuccgacgacggcaacuacuacugccuccgggccugcgugagcgugcccgucuccgugaucuacgacaaggagaccaagacgcacgccacccuguucgggagcguggccugcgagcacaucuccagcaccaugucccaguacagccgcuccacccgcagcaugcugaagcggcgcgacuccacguacggcccgcuccagacccccgucgggugcgugcugggccuggugaacagcucccucuucgucgaggacugcaagcugccccuggggcagagccucugcgcccugcccgacaccccgagcacccugacgcccgcguccgugggcagcgugcccggcgagaugcggcucgccuccaucgccuucaaccaccccauccaggucgaccagcugaacagcuccuacuucaagcugagcaucccgaccaacuucuccuucggggugacccaggaguacauccagaccacgauccagaaggugaccgucgacugcaagcaguacgugugcaacggcuuccagaagugcgagcagcuccugcgcgaguacgggcaguucugcagcaagaucaaccaggcccugcacggcgccaaccuccggcaggacgacuccgugcgcaaccuguucgcgagcgucaaguccagccaguccagccccaucauccccggguucggcggcgacuucaaccugacccuccuggagcccguguccaucagcaccggguccggcagcgccggguccgccaucgaggaccuccuguucgacaaggugacgaucgccgacccgggcuacaugcagggguacgacgacugcaugcagcagggccccgccagcgcgcgggaccugaucugcgcccaguacgucgccggcuacaaggugcugccgccccucauggacgugaacauggaggccgcguacaccagcucccugcuggggagcaucgccggcgucggguggaccgccggccucuccagcuucgccgccauccccuucgcgcaguccaucuucuaccgccugaacggggugggcaucacccagcagguccugagcgagaaccagaagcucaucgccaacaaguucaaccaggcccugggcgccaugcagacgggguucaccaccaccaacgaggccuuccacaaggugcaggacgcggugaacaacaacgcccaggcccuguccaagcucgccagcgagcuguccaacacguucggcgccaucagcgcguccaucggggacaucauccagcggcuggacccgcccgagcaggacgcccagaucgaccgccucaucaacggccggcugaccacccugaacgccuucguggcccagcagcucguccgcagcgaguccgcggcccugagcgcccagcuggccaaggacaaggugaacgagugcgugaaggcccaguccaagcggagcggcuucugcgggcagggcacccacaucgucuccuucguggucaacgcgcccaacgggcucuacuucaugcacgugggcuacuaccccagcaaccacaucgagguggucuccgccuacgggcugugcgacgccgccaaccccacgaacugcaucgcccccgugaacggcuacuucaucaagaccaacaacacccgcaucguggacgaguggagcuacaccggcagcuccuucuacgcgcccgagccgaucacgagccugaacaccaaguacgucgcgccccaggugaccuaccagaacaucuccaccaaccugcccccgccccuccuggggaacagcaccggcaucgacuuccaggacgagcucgacgaguucuucaagaacguguccacgagcauccccaacuucgggucccugacccagaucaacaccacccugcucgaccugacguacgagaugcugagccuccagcaggucgugaaggcccugaacgaguccuacaucgaccugaaggagcucggcaacuacaccuacugaggacuaguuauaagacugacuagcccgaugggccucccaacgggcccuccuccccuccuugcaccgagauuaauaaaaaaaaaaaaaaaaaaaaaaaaaaaaaaaaaaaaaaaaaaaaaaaaaaaaaaaaaaaaaaaaugcaucccccccccccccccccccccccccccccccaaaggcucuuuucagagccaccagaauu

SEQ ID NO: 14888 - RNA, 4174 nt, Artificial Sequence
  MERS-CoV/England 1__YP_007188579.1 spike protein mRNA gc (variant)
aggagaaagcuuaccaugauccacagcguguuccugcucauguuccugcugacccccaccgaguccuacgucgacgugggcccggacagcgugaaguccgccugcaucgaggucgacauccagcagacguucuucgacaagaccuggccccgccccaucgacgugagcaaggccgacgggaucaucuacccccagggccggaccuacuccaacaucaccaucacguaccagggccucuucccguaccagggcgaccacggggacauguacguguacagcgccggccacgccaccggcaccacgccccagaagcuguucgucgccaacuacucccaggacgugaagcaguucgccaacggguucgugguccgcaucggcgccgcggccaacagcaccgggaccgugaucaucucccccagcaccuccgccaccauccggaagaucuaccccgccuucaugcugggcagcuccguggggaacuucagcgacggcaagaugggccgcuucuucaaccacacgcucguccugcugccggacgggugcggcacccuccugcgggcguucuacugcauccuggagccccgcuccgggaaccacugccccgccggcaacagcuacaccuccuucgccaccuaccacacgcccgccaccgacugcagcgacggcaacuacaaccggaacgccucccucaacagcuucaaggaguacuucaaccugcgcaacugcaccuucauguacaccuacaacaucacggaggacgagauccuggagugguucgggaucacccagaccgcgcagggcgugcaccucuucagcucccgguacguggaccuguacgggggcaacauguuccaguucgccacccugccggucuacgacacgaucaaguacuacagcaucaucccccacuccauccgcagcauccaguccgaccggaaggccugggccgccuucuacguguacaagcuccagccccugaccuuccugcucgacuucagcguggacggguacauccgccgggcgaucgacugcggcuucaacgaccugucccagcugcacugcagcuacgaguccuucgacgucgagagcggcguguacuccgugagcuccuucgaggccaagcccagcggguccgucguggagcaggccgagggcguggagugcgacuucagcccgcuccuguccgggaccccgccccaggucuacaacuucaagcgccugguguucaccaacugcaacuacaaccucacgaagcugcugagccucuucuccgucaacgacuucacgugcagccagaucagccccgccgccaucgcguccaacugcuacagcucccugauccuggacuacuucagcuacccccucuccaugaaguccgaccugagcgugagcuccgccgggcccaucagccaguucaacuacaagcaguccuucagcaacccgaccugccugauccucgccaccgugccccacaaccugaccaccaucaccaagccccugaaguacuccuacaucaacaagugcagccgguuccucuccgacgaccgcaccgaggucccccagcuggugaacgccaaccaguacagccccugcguguccaucguccccagcacggugugggaggacggggacuacuaccggaagcagcugagcccgcucgagggcggcggguggcugguggccuccggcagcaccgucgcgaugaccgagcagcugcagaugggguucggcaucaccgugcaguacgggaccgacacgaacuccgugugccccaagcucgaguucgccaacgacaccaagaucgccagccagcugggcaacugcgucgaguacucccuguacggcgugagcgggcgcggcguguuccagaacugcaccgccgucggggugcggcagcagcgcuucguguacgacgcguaccagaaccuggucggcuacuacuccgacgacggcaacuacuacugccuccgggccugcgugagcgugcccgucuccgugaucuacgacaaggagaccaagacgcacgccacccuguucgggagcguggccugcgagcacaucuccagcaccaugucccaguacagccgcuccacccgcagcaugcugaagcggcgcgacuccacguacggcccgcuccagacccccgucgggugcgugcugggccuggugaacagcucccucuucgucgaggacugcaagcugccccuggggcagagccucugcgcccugcccgacaccccgagcacccugacgcccgcguccgugggcagcgugcccggcgagaugcggcucgccuccaucgccuucaaccaccccauccaggucgaccagcugaacagcuccuacuucaagcugagcaucccgaccaacuucuccuucggggugacccaggaguacauccagaccacgauccagaaggugaccgucgacugcaagcaguacgugugcaacggcuuccagaagugcgagcagcuccugcgcgaguacgggcaguucugcagcaagaucaaccaggcccugcacggcgccaaccuccggcaggacgacuccgugcgcaaccuguucgcgagcgucaaguccagccaguccagccccaucauccccggguucggcggcgacuucaaccugacccuccuggagcccguguccaucagcaccgggucccggagcgcccgcuccgccaucgaggaccuccuguucgacaaggugacgaucgccgacccgggcuacaugcagggguacgacgacugcaugcagcagggccccgccagcgcgcgggaccugaucugcgcccaguacgucgccggguacaaggugcugccgccccucauggacgugaacauggaggccgcguacaccagcucccugcugggcagcaucgccggcgucggguggaccgccggccucuccagcuucgccgccauccccuucgcgcaguccaucuucuaccgccugaacggggugggcaucacccagcagguccugagcgagaaccagaagcucaucgccaacaaguucaaccaggcccugggggccaugcagacgggcuucaccaccaccaacgaggccuuccacaaggugcaggacgcggugaacaacaacgcccaggcccuguccaagcucgccagcgagcuguccaacacguucggcgccaucagcgcguccaucggggacaucauccagcggcuggacccgcccgagcaggacgcccagaucgaccgccucaucaacggccggcugaccacccugaacgccuucguggcccagcagcucguccgcagcgaguccgcggcccugagcgcccagcuggccaaggacaaggugaacgagugcgugaaggcccaguccaagcggagcggguucugcggccagggcacccacaucgucuccuucguggucaacgcgcccaacgggcucuacuucaugcacgugggcuacuaccccagcaaccacaucgagguggucuccgccuacgggcugugcgacgccgccaaccccacgaacugcaucgcccccgugaacggcuacuucaucaagaccaacaacacccgcaucguggacgaguggagcuacaccgggagcuccuucuacgcgcccgagccgaucacgagccugaacaccaaguacgucgcgccccaggugaccuaccagaacaucuccaccaaccugcccccgccccuccugggcaacagcaccggcaucgacuuccaggacgagcucgacgaguucuucaagaacguguccacgagcauccccaacuucgggucccugacccagaucaacaccacccugcucgaccugacguacgagaugcugagccuccagcaggucgugaaggcccugaacgaguccuacaucgaccugaaggagcucggcaacuacaccuacgggggcuacauccccgaggccccgcgggacgggcaggccuacgugcgcaaggacggcgaguggguccugcugagcaccuucugaggacuaguuauaagacugacuagcccgaugggccucccaacgggcccuccuccccuccuugcaccgagauuaauaaaaaaaaaaaaaaaaaaaaaaaaaaaaaaaaaaaaaaaaaaaaaaaaaaaaaaaaaaaaaaaaugcaucccccccccccccccccccccccccccccccaaaggcucuuuucagagccaccagaauu

SEQ ID NO: 14889 - RNA, 4174 nt, Artificial Sequence
  MERS-CoV/England 1__YP_007188579.1 spike protein mRNA gc (variant)
aggagaaagcuuaccaugauccacagcguguuccugcucauguuccugcugacccccaccgaguccuacgucgacgugggcccggacagcgugaaguccgccugcaucgaggucgacauccagcagacguucuucgacaagaccuggccccgccccaucgacgugagcaaggccgacgggaucaucuacccccagggccggaccuacuccaacaucaccaucacguaccagggccucuucccguaccagggcgaccacggggacauguacguguacagcgccggccacgccaccggcaccacgccccagaagcuguucgucgccaacuacucccaggacgugaagcaguucgccaacggguucgugguccgcaucggcgccgcggccaacagcaccgggaccgugaucaucucccccagcaccuccgccaccauccggaagaucuaccccgccuucaugcugggcagcuccguggggaacuucagcgacggcaagaugggccgcuucuucaaccacacgcucguccugcugccggacgggugcggcacccuccugcgggcguucuacugcauccuggagccccgcuccgggaaccacugccccgccggcaacagcuacaccuccuucgccaccuaccacacgcccgccaccgacugcagcgacggcaacuacaaccggaacgccucccucaacagcuucaaggaguacuucaaccugcgcaacugcaccuucauguacaccuacaacaucacggaggacgagauccuggagugguucgggaucacccagaccgcgcagggcgugcaccucuucagcucccgguacguggaccuguacgggggcaacauguuccaguucgccacccugccggucuacgacacgaucaaguacuacagcaucaucccccacuccauccgcagcauccaguccgaccggaaggccugggccgccuucuacguguacaagcuccagccccugaccuuccugcucgacuucagcguggacggguacauccgccgggcgaucgacugcggcuucaacgaccugucccagcugcacugcagcuacgaguccuucgacgucgagagcggcguguacuccgugagcuccuucgaggccaagcccagcggguccgucguggagcaggccgagggcguggagugcgacuucagcccgcuccuguccgggaccccgccccaggucuacaacuucaagcgccugguguucaccaacugcaacuacaaccucacgaagcugcugagccucuucuccgucaacgacuucacgugcagccagaucagccccgccgccaucgcguccaacugcuacagcucccugauccuggacuacuucagcuacccccucuccaugaaguccgaccugagcgugagcuccgccgggcccaucagccaguucaacuacaagcaguccuucagcaacccgaccugccugauccucgccaccgugccccacaaccugaccaccaucaccaagccccugaaguacuccuacaucaacaagugcagccgguuccucuccgacgaccgcaccgaggucccccagcuggugaacgccaaccaguacagccccugcguguccaucguccccagcacggugugggaggacggggacuacuaccggaagcagcugagcccgcucgagggcggcggguggcugguggccuccggcagcaccgucgcgaugaccgagcagcugcagaugggguucggcaucaccgugcaguacgggaccgacacgaacuccgugugccccaagcucgaguucgccaacgacaccaagaucgccagccagcugggcaacugcgucgaguacucccuguacggcgugagcgggcgcggcguguuccagaacugcaccgccgucggggugcggcagcagcgcuucguguacgacgcguaccagaaccuggucggcuacuacuccgacgacggcaacuacuacugccuccgggccugcgugagcgugcccgucuccgugaucuacgacaaggagaccaagacgcacgccacccuguucgggagcguggccugcgagcacaucuccagcaccaugucccaguacagccgcuccacccgcagcaugcugaagcggcgcgacuccacguacggcccgcuccagacccccgucgggugcgugcugggccuggugaacagcucccucuucgucgaggacugcaagcugccccuggggcagagccucugcgcccugcccgacaccccgagcacccugacgcccgcguccgugggcagcgugcccggcgagaugcggcucgccuccaucgccuucaaccaccccauccaggucgaccagcugaacagcuccuacuucaagcugagcaucccgaccaacuucuccuucggggugacccaggaguacauccagaccacgauccagaaggugaccgucgacugcaagcaguacgugugcaacggcuuccagaagugcgagcagcuccugcgcgaguacgggcaguucugcagcaagaucaaccaggcccugcacggcgccaaccuccggcaggacgacuccgugcgcaaccuguucgcgagcgucaaguccagccaguccagccccaucauccccggguucggcggcgacuucaaccugacccuccuggagcccguguccaucagcaccggguccggcagcgccggguccgccaucgaggaccuccuguucgacaaggugacgaucgccgacccgggcuacaugcagggguacgacgacugcaugcagcagggccccgccagcgcgcgggaccugaucugcgcccaguacgucgccggcuacaaggugcugccgccccucauggacgugaacauggaggccgcguacaccagcucccugcuggggagcaucgccggcgucggguggaccgccggccucuccagcuucgccgccauccccuucgcgcaguccaucuucuaccgccugaacggggugggcaucacccagcagguccugagcgagaaccagaagcucaucgccaacaaguucaaccaggcccugggcgccaugcagacgggguucaccaccaccaacgaggccuuccacaaggugcaggacgcggugaacaacaacgcccaggcccuguccaagcucgccagcgagcuguccaacacguucggcgccaucagcgcguccaucggggacaucauccagcggcuggacccgcccgagcaggacgcccagaucgaccgccucaucaacggccggcugaccacccugaacgccuucguggcccagcagcucguccgcagcgaguccgcggcccugagcgcccagcuggccaaggacaaggugaacgagugcgugaaggcccaguccaagcggagcggcuucugcgggcagggcacccacaucgucuccuucguggucaacgcgcccaacgggcucuacuucaugcacgugggcuacuaccccagcaaccacaucgagguggucuccgccuacgggcugugcgacgccgccaaccccacgaacugcaucgcccccgugaacggcuacuucaucaagaccaacaacacccgcaucguggacgaguggagcuacaccggcagcuccuucuacgcgcccgagccgaucacgagccugaacaccaaguacgucgcgccccaggugaccuaccagaacaucuccaccaaccugcccccgccccuccuggggaacagcaccggcaucgacuuccaggacgagcucgacgaguucuucaagaacguguccacgagcauccccaacuucgggucccugacccagaucaacaccacccugcucgaccugacguacgagaugcugagccuccagcaggucgugaaggcccugaacgaguccuacaucgaccugaaggagcucggcaacuacaccuacgggggcuacauccccgaggccccgcgggacggccaggccuacgugcgcaaggacggggaguggguccugcugagcaccuucugaggacuaguuauaagacugacuagcccgaugggccucccaacgggcccuccuccccuccuugcaccgagauuaauaaaaaaaaaaaaaaaaaaaaaaaaaaaaaaaaaaaaaaaaaaaaaaaaaaaaaaaaaaaaaaaaugcaucccccccccccccccccccccccccccccccaaaggcucuuuucagagccaccagaauu

SEQ ID NO: 14890 - RNA, 4279 nt, Artificial Sequence
  MERS-CoV/MERS-CoV-Jeddah-human-1__AHE78108.1 spike protein mRNA human (1-1353)
aggagaaagcuuaccaugauccacagcguguuccugcucauguuucuucugacccccacagaguccuacgucgacguuggcccugauucugugaagucagccugcauugaaguagacauacagcaaacuuucuuugauaaaacguggccaagaccgaucgacgugaguaaggcugaugggauuaucuauccccagggaaggaccuacagcaacauuacaaucacuuaucaggguuuguucccuuaccagggcgaccauggggauauguaugucuacuccgcaggacacgccaccggcacaaccccacaaaaauuauuuguggcgaauuauucucaggacguuaagcaguucgcuaacgguuuugugguccggauaggggccgcagccaauucgacuggaacagugaucauuucacccagcaccagugcuacgauccgcaaaauuuacccugcauucaugcugggcuccucuguaggcaacuuuagcgaugggaagaugggacgauucuuuaaucauacucuaguucuccugccagacgguuguggcacccuucugcgugccuucuacugcaucuuggagcccagauccgggaaccacuguccugcuggaaauucauauacaaguuuugccacuuaccauaccccagcgacagauugcagcgacggcaacuauaauaggaacgcaucucucaauuccuucaaggaauacuucaaccugcggaauuguaccuuuauguauacguacaacauaacugaggaugaaauucuggagugguucgguaucacacagaccgcccaaggggugcaccucuuuucaagccgcuaugucgacuuauacggaggcaauauguuccaguuugcuacucugccgguguacgacacaauuaaauauuacaguaucaucccccacucuauuagauccauacagagcgauaggaaggccugggcagcuuucuauguguacaaacuucagccuuugaccuuucugcuagacuucucggucgauggcuauauccggcgcgccauugacugcggguuuaacgaucucucucaacugcauuguuccuacgagucauucgacguugaaaguggaguguauagcguauccucuuuugaggcgaagccaagcgguucaguggucgaacaggccgagggcguggagugcgauuucaguccccuucuguccgggacgccuccacagguuuacaacuuuaaacgauugguguucaccaauuguaacuacaaucucacaaagcuguuaagccuguucucugucaacgacuuuacuugcucacaaaucagucccgcagcuauagccagcaauuguuauuccucucucauucuugauuacuucucguauccgcugagcaugaaguccgacuugucagugaguucugcuggaccuaucagccaguuuaacuacaaacaguccuucucaaauccaaccugccuaauccuggccacaguaccccacaaccucacuaccauuacaaagccucugaaauauagcuacaucaauaagugcucuagacuucuguccgaugacaggaccgaaguuccccaguuggugaacgcaaaucaauauaguccaugugucagcauugugcccucuacugucugggaggacggcgauuacuaccggaaacagcucuccccucuggaaggugggggcugguuaguggccucaggaaguacgguugcuaugacagagcagcugcagaugggcuuugggauaaccgugcaauauggaacugacaccaacagcguaugcccaaagcuagaguucgcgaaugauacaaaaaucgcaucgcagcucgguaacugugucgaauacucccuguauggcgugucugggcguggaguuuuucagaauugcaccgccgugggcguccgccagcaaagauucguguacgacgcuuaucagaaccuuguagguuacuauagcgaugacgggaacuacuacuguuugagggccugcgugucaguuccggucagugugauuuaugauaaggagacuaagacacaugcaacgcuguuuggcuccguggccugugaacacaucucuagcaccaugucccaguacucacggagcacucgaaguaugcucaaacgcagagacucuacauauggaccccugcagaccccugucggcugcguucuugggcugguaaauuccagcuuguucguggaggauuguaagcucccacugggacaaucguuaugcgcucugcccgacacaccuucaacucuaaccccaaggucugugcggaguguccccggugaaaugcgccucgccuccaucgcauuuaaccacccgauucagguggaucagcugaauagcucuuacuucaaacuuagcauaccuacgaacuuuuccuucggcguuacccaagaguauauccagacaacuauucagaaggugaccgucgacuguaaacaguacgugugcaauggguuccaaaagugcgaacaguugcugagagaguauggacaguuuuguucaaagaucaaccaggcgcuccauggcgcuaaucugaggcaagaugacaguguucguaacuuauucgccagcgugaaaucuucccagucaaguccaauuauccccgguuuugggggcgacuucaaucugacacuuuuggagccuguaagcauauccacuggaucucggucggcacgaagcgccaucgaagaucuccuguuugacaaggucaccauugcugaucccggcuacaugcagggguacgacgauugcaugcagcaaggaccagccucagcaagagaccuaaucugugcucaguauguggccggcuacaaagugcugccuccccucauggaugucaacauggaggcggccuauacguccagucugcuugguucuauugcugggguuggauggacagcaggcuugagcuccuucgccgcuaucccauuugcccagucaauauucuacaggcugaauggugugggcauuacccaacagguauuaucugaaaaccagaagcucaucgcaaauaaauuuaaccaggcgcugggggccaugcaaacuggauucacaaccacuaaugaggcuuuucacaaggugcaggacgccgucaacaacaaugcacaggcucuuagcaagcuggccagugaauuguccaacaccuucggcgcaauuagcgccucuaucggggauauaauccagcgccucgacgugcuggagcaagaugcucagauugaccggcuaaucaauggaagacugacaacgcucaacgcguucguugcccagcagcuggugaggucagaguccgcagcucuuagugcccaauuggccaaagauaaggucaaugaaugcgugaaagcucagagcaagcgcucgggcuuuuguggucaggggacccauauuguuucuuucguggucaacgcaccgaauggacuguauuuuaugcacguaggcuacuauccuuccaaccauaucgaggugguuagcgccuacgguuuaugcgacgcggcuaaucccacuaacuguauagccccagugaauggcuacuucauuaaaacaaacaauacccgaaucgucgacgaauggucauauacagggaguucuuuuuacgcacccgagccuaucacuucccucaacaccaaguauguggccccacagguaacguaccaaaauauuagcacaaaccugcccccuccgcuucugggaaacucaaccggcaucgauuuccaggacgagcuagaugaauuuuucaagaaugugaguacuagcauuccaaacuuugggucccucacccagauaaauacaacucuguuggaccugaccuaugagauguuaucucuccaacaggucguuaaagcucugaacgaaagcuacaucgaucuuaaggagcugggaaauuauacauacuacaacaaauggcccugguauauuugguugggcuucaucgcaggucucguggcccuggcgcuaugcguguuuuucauucuguguugcacgggguguggaaccaauugcaugggcaaacuuaagugcaaccgguguugcgaccguuacgaagaguaugaucucgagccucacaagguccacgugcauugaggacuaguuauaagacugacuagcccgaugggccucccaacgggcccuccuccccuccuugcaccgagauuaauaaaaaaaaaaaaaaaaaaaaaaaaaaaaaaaaaaaaaaaaaaaaaaaaaaaaaaaaaaaaaaaaugcaucccccccccccccccccccccccccccccccaaaggcucuuuucagagccaccagaauu

SEQ ID NO: 14891 - RNA, 4279 nt, Artificial Sequence
  MERS-CoV/MERS-CoV-Jeddah-human-1__AHE78108.1 spike protein mRNA human (1-1353)(V1060P_L1061P)
aggagaaagcuuaccaugauccacagcguguuccugcucauguuucuucugacccccacagaguccuacgucgacguuggcccugauucugugaagucagccugcauugaaguagacauacagcaaacuuucuuugauaaaacguggccaagaccgaucgacgugaguaaggcugaugggauuaucuauccccagggaaggaccuacagcaacauuacaaucacuuaucaggguuuguucccuuaccagggcgaccauggggauauguaugucuacuccgcaggacacgccaccggcacaaccccacaaaaauuauuuguggcgaauuauucucaggacguuaagcaguucgcuaacgguuuugugguccggauaggggccgcagccaauucgacuggaacagugaucauuucacccagcaccagugcuacgauccgcaaaauuuacccugcauucaugcugggcuccucuguaggcaacuuuagcgaugggaagaugggacgauucuuuaaucauacucuaguucuccugccagacgguuguggcacccuucugcgugccuucuacugcaucuuggagcccagauccgggaaccacuguccugcuggaaauucauauacaaguuuugccacuuaccauaccccagcgacagauugcagcgacggcaacuauaauaggaacgcaucucucaauuccuucaaggaauacuucaaccugcggaauuguaccuuuauguauacguacaacauaacugaggaugaaauucuggagugguucgguaucacacagaccgcccaaggggugcaccucuuuucaagccgcuaugucgacuuauacggaggcaauauguuccaguuugcuacucugccgguguacgacacaauuaaauauuacaguaucaucccccacucuauuagauccauacagagcgauaggaaggccugggcagcuuucuauguguacaaacuucagccuuugaccuuucugcuagacuucucggucgauggcuauauccggcgcgccauugacugcggguuuaacgaucucucucaacugcauuguuccuacgagucauucgacguugaaaguggaguguauagcguauccucuuuugaggcgaagccaagcgguucaguggucgaacaggccgagggcguggagugcgauuucaguccccuucuguccgggacgccuccacagguuuacaacuuuaaacgauugguguucaccaauuguaacuacaaucucacaaagcuguuaagccuguucucugucaacgacuuuacuugcucacaaaucagucccgcagcuauagccagcaauuguuauuccucucucauucuugauuacuucucguauccgcugagcaugaaguccgacuugucagugaguucugcuggaccuaucagccaguuuaacuacaaacaguccuucucaaauccaaccugccuaauccuggccacaguaccccacaaccucacuaccauuacaaagccucugaaauauagcuacaucaauaagugcucuagacuucuguccgaugacaggaccgaaguuccccaguuggugaacgcaaaucaauauaguccaugugucagcauugugcccucuacugucugggaggacggcgauuacuaccggaaacagcucuccccucuggaaggugggggcugguuaguggccucaggaaguacgguugcuaugacagagcagcugcagaugggcuuugggauaaccgugcaauauggaacugacaccaacagcguaugcccaaagcuagaguucgcgaaugauacaaaaaucgcaucgcagcucgguaacugugucgaauacucccuguauggcgugucugggcguggaguuuuucagaauugcaccgccgugggcguccgccagcaaagauucguguacgacgcuuaucagaaccuuguagguuacuauagcgaugacgggaacuacuacuguuugagggccugcgugucaguuccggucagugugauuuaugauaaggagacuaagacacaugcaacgcuguuuggcuccguggccugugaacacaucucuagcaccaugucccaguacucacggagcacucgaaguaugcucaaacgcagagacucuacauauggaccccugcagaccccugucggcugcguucuugggcugguaaauuccagcuuguucguggaggauuguaagcucccacugggacaaucguuaugcgcucugcccgacacaccuucaacucuaaccccaaggucugugcggaguguccccggugaaaugcgccucgccuccaucgcauuuaaccacccgauucagguggaucagcugaauagcucuuacuucaaacuuagcauaccuacgaacuuuuccuucggcguuacccaagaguauauccagacaacuauucagaaggugaccgucgacuguaaacaguacgugugcaauggguuccaaaagugcgaacaguugcugagagaguauggacaguuuuguucaaagaucaaccaggcgcuccauggcgcuaaucugaggcaagaugacaguguucguaacuuauucgccagcgugaaaucuucccagucaaguccaauuauccccgguuuugggggcgacuucaaucugacacuuuuggagccuguaagcauauccacuggaucucggucggcacgaagcgccaucgaagaucuccuguuugacaaggucaccauugcugaucccggcuacaugcagggguacgacgauugcaugcagcaaggaccagccucagcaagagaccuaaucugugcucaguauguggccggcuacaaagugcugccuccccucauggaugucaacauggaggcggccuauacguccagucugcuugguucuauugcugggguuggauggacagcaggcuugagcuccuucgccgcuaucccauuugcccagucaauauucuacaggcugaauggugugggcauuacccaacagguauuaucugaaaaccagaagcucaucgcaaauaaauuuaaccaggcgcugggggccaugcaaacuggauucacaaccacuaaugaggcuuuucacaaggugcaggacgccgucaacaacaaugcacaggcucuuagcaagcuggccagugaauuguccaacaccuucggcgcaauuagcgccucuaucggggauauaauccagcgccucgacccgccugagcaagaugcucagauugaccggcugaucaauggaagacuaacaacgcugaacgcguucguggcccagcagcucguuaggucagaguccgcagcucugagugcccaacuugccaaagauaaggugaaugaaugcgucaaagcucagagcaagcgcucgggcuuuuguggucaggggacccauauugugucuuucguugugaacgcacccaauggauuguauuuuaugcacgucggcuacuauccauccaaccauaucgagguagugagcgccuacggucugugcgacgcggcuaaucccacuaacuguauagccccuguuaauggcuacuucauuaaaacaaacaauacccgaaucguggacgaauggucauauacagggaguucuuuuuacgcaccagagcccaucacuuccuuaaacaccaaguaugucgccccucaggugacguaccaaaauauuagcacaaaccucccgccaccccugcuuggaaacucaaccggcaucgauuuccaggacgagcuggaugaauuuuucaagaauguaaguacuagcauuccuaacuuugggucccuaacccagauaaauacaacucuccuggacuugaccuaugagaugcugucuuuacaacagguggucaaagcucucaacgaaagcuacaucgaucugaaggagcuuggaaauuauacauacuacaacaaauggccaugguauauuuggcugggcuucaucgcagguuugguugcccucgcgcugugcguguuuuucauucuauguugcacgggguguggaaccaauugcaugggcaagcugaaaugcaaccgguguugcgaccguuacgaagaguaugaucuugagccccacaaggugcacguccauugaggacuaguuauaagacugacuagcccgaugggccucccaacgggcccuccuccccuccuugcaccgagauuaauaaaaaaaaaaaaaaaaaaaaaaaaaaaaaaaaaaaaaaaaaaaaaaaaaaaaaaaaaaaaaaaaugcaucccccccccccccccccccccccccccccccaaaggcucuuuucagagccaccagaauu

SEQ ID NO: 14892 - RNA, 4279 nt, Artificial Sequence
  MERS-CoV/Al-Hasa_4_2013__AGN70929.1 spike protein mRNA human (1-1353)
aggagaaagcuuaccaugauccacagcguguuccugcucauguuucuucugacccccacagaguccuacgucgacguuggcccugauucugugaagucagccugcauugaaguagacauacagcaaacuuucuuugauaaaacguggccaagaccgaucgacgugaguaaggcugaugggauuaucuauccccagggaaggaccuacagcaacauuacaaucacuuaucaggguuuguucccuuaccagggcgaccauggggauauguaugucuacuccgcaggacacgccaccggcacaaccccacaaaaauuauuuguggcgaauuauucucaggacguuaagcaguucgcuaacgguuuugugguccggauaggggccgcagccaauucgacuggaacagugaucauuucacccagcaccagugcuacgauccgcaaaauuuacccugcauucaugcugggcuccucuguaggcaacuuuagcgaugggaagaugggacgauucuuuaaucauacucuaguucuccugccagacgguuguggcacccuucugcgugccuucuacugcaucuuggagcccagauccgggaaccacuguccugcuggaaauucauauacaaguuuugccacuuaccauaccccagcgacagauugcagcgacggcaacuauaauaggaacgcaucucucaauuccuucaaggaauacuucaaccugcggaauuguaccuuuauguauacguacaacauaacugaggaugaaauucuggagugguucgguaucacacagaccgcccaaggggugcaccucuuuucaagccgcuaugucgacuuauacggaggcaauauguuccaguuugcuacucugccgguguacgacacaauuaaauauuacaguaucaucccccacucuauuagauccauacagagcgauaggaaggccugggcagcuuucuauguguacaaacuucagccuuugaccuuucugcuagacuucucggucgauggcuauauccggcgcgccauugacugcggguuuaacgaucucucucaacugcauuguuccuacgagucauucgacguugaaaguggaguguauagcguauccucuuuugaggcgaagccaagcgguucaguggucgaacaggccgagggcguggagugcgauuucaguccccuucuguccgggacgccuccacagguuuacaacuuuaaacgauugguguucaccaauuguaacuacaaucucacaaagcuguuaagccuguucucugucaacgacuuuacuugcucacaaaucagucccgcagcuauagccagcaauuguuauuccucucucauucuugauuacuucucguauccgcugagcaugaaguccgacuugucagugaguucugcuggaccuaucagccaguuuaacuacaaacaguccuucucaaauccaaccugccuaauccuggccacaguaccccacaaccucacuaccauuacaaagccucugaaauauagcuacaucaauaagugcucuagacuucuguccgaugacaggaccgaaguuccccaguuggugaacgcaaaucaauauaguccaugugucagcauugugcccucuacugucugggaggacggcgauuacuaccggaaacagcucuccccucuggaaggugggggcugguuaguggccucaggaaguacgguugcuaugacagagcagcugcagaugggcuuugggauaaccgugcaauauggaacugacaccaacagcguaugcccaaagcuagaguucgcgaaugauacaaaaaucgcaucgcagcucgguaacugugucgaauacucccuguauggcgugucugggcguggaguuuuucagaauugcaccgccgugggcguccgccagcaaagauucguguacgacgcuuaucagaaccuuguagguuacuauagcgaugacgggaacuacuacuguuugagggccugcgugucaguuccggucagugugauuuaugauaaggagacuaagacacaugcaacgcuguuuggcuccguggccugugaacacaucucuagcaccaugucccaguacucacggagcacucgaaguaugcucaaacgcagagacucuacauauggaccccugcagaccccugucggcugcguucuugggcugguaaauuccagcuuguucguggaggauuguaagcucccacugggacaaucguuaugcgcucugcccgacacaccuucaacucuaaccccaaggucugugcggaguguccccggugaaaugcgccucgccuccaucgcauuuaaccacccgauucagguggaucagcugaauagcucuuacuucaaacuuagcauaccuacgaacuuuuccuucggcguuacccaagaguauauccagacaacuauucagaaggugaccgucgacuguaaacaguacgugugcaauggguuccaaaagugcgaacaguugcugagagaguauggacaguuuuguucaaagaucaaccaggcgcuccauggcgcuaaucugaggcaagaugacaguguucguaacuuauucgccagcgugaaaucuucccagucaaguccaauuauccccgguuuugggggcgacuucaaucugacacuuuuggagccuguaagcauauccacuggaucucggucggcacgaagcgccaucgaagaucuccuguuugacaaggucaccauugcugaucccggcuacaugcagggguacgacgauugcaugcagcaaggaccagccucagcaagagaccuaaucugugcucaguauguggccggcuacaaagugcugccuccccucauggaugucaacauggaggcggccuauacguccagucugcuugguucuauugcugggguuggauggacagcaggcuugagcuccuucgccgcuaucccauuugcccagucaauauucuacaggcugaauggugugggcauuacccaacagguauuaucugaaaaccagaagcucaucgcaaauaaauuuaaccaggcgcugggggccaugcaaacuggauucacaaccacuaaugaggcuuuucgcaaggugcaggacgccgucaacaacaaugcacaggcucuuagcaagcuggccagugaauuguccaacaccuucggcgcaauuagcgccucuaucggggauauaauccagcggcucgacgugcuggagcaagaugcucagauugacagacuaaucaauggaaggcugacaacgcucaacgcguucguugcccagcagcuggugcgcucagaguccgcagcucuuagugcccaauuggccaaagauaaggucaaugaaugcgugaaagcucagagcaagcgaucgggcuuuuguggucaggggacccacauuguuucuuucguggucaacgcaccgaauggacuguauuuuaugcauguaggcuacuauccuuccaaccacaucgaggugguuagcgccuacgguuuaugcgacgcggcuaaucccacuaacuguauagccccagugaauggcuacuucauuaaaacaaacaauacccggaucgucgacgaauggucauauacagggaguucuuuuuacgcacccgagccuaucacuucccucaacaccaaguauguggccccacauguaacguaccagaauauuagcacaaaccugcccccuccgcuucugggaaacucaaccggcaucgauuuccaagacgagcuagaugaauuuuucaagaaugugaguacuagcauuccaaacuuugggucccucacccagauaaauacaacucuguuggaccugaccuaugagauguuaucucuccagcaagucguuaaagcucugaacgaaagcuacaucgaucuuaaggagcugggaaauuauacauacuacaacaaauggcccugguauauuugguugggcuucaucgcaggucucguggcccuggcgcuaugcguguuuuucauucuguguugcacgggguguggaaccaauugcaugggcaaacuuaagugcaaccguuguugcgacagauacgaagaguaugaucucgagccucacaagguccacgugcauugaggacuaguuauaagacugacuagcccgaugggccucccaacgggcccuccuccccuccuugcaccgagauuaauaaaaaaaaaaaaaaaaaaaaaaaaaaaaaaaaaaaaaaaaaaaaaaaaaaaaaaaaaaaaaaaaugcaucccccccccccccccccccccccccccccccaaaggcucuuuucagagccaccagaauu

SEQ ID NO: 14893 - RNA, 4279 nt, Artificial Sequence
  MERS-CoV/Al-Hasa_4_2013__AGN70929.1 spike protein mRNA human (1-1353)(V1060P_L1061P)
aggagaaagcuuaccaugauccacagcguguuccugcucauguuucuucugacccccacagaguccuacgucgacguuggcccugauucugugaagucagccugcauugaaguagacauacagcaaacuuucuuugauaaaacguggccaagaccgaucgacgugaguaaggcugaugggauuaucuauccccagggaaggaccuacagcaacauuacaaucacuuaucaggguuuguucccuuaccagggcgaccauggggauauguaugucuacuccgcaggacacgccaccggcacaaccccacaaaaauuauuuguggcgaauuauucucaggacguuaagcaguucgcuaacgguuuugugguccggauaggggccgcagccaauucgacuggaacagugaucauuucacccagcaccagugcuacgauccgcaaaauuuacccugcauucaugcugggcuccucuguaggcaacuuuagcgaugggaagaugggacgauucuuuaaucauacucuaguucuccugccagacgguuguggcacccuucugcgugccuucuacugcaucuuggagcccagauccgggaaccacuguccugcuggaaauucauauacaaguuuugccacuuaccauaccccagcgacagauugcagcgacggcaacuauaauaggaacgcaucucucaauuccuucaaggaauacuucaaccugcggaauuguaccuuuauguauacguacaacauaacugaggaugaaauucuggagugguucgguaucacacagaccgcccaaggggugcaccucuuuucaagccgcuaugucgacuuauacggaggcaauauguuccaguuugcuacucugccgguguacgacacaauuaaauauuacaguaucaucccccacucuauuagauccauacagagcgauaggaaggccugggcagcuuucuauguguacaaacuucagccuuugaccuuucugcuagacuucucggucgauggcuauauccggcgcgccauugacugcggguuuaacgaucucucucaacugcauuguuccuacgagucauucgacguugaaaguggaguguauagcguauccucuuuugaggcgaagccaagcgguucaguggucgaacaggccgagggcguggagugcgauuucaguccccuucuguccgggacgccuccacagguuuacaacuuuaaacgauugguguucaccaauuguaacuacaaucucacaaagcuguuaagccuguucucugucaacgacuuuacuugcucacaaaucagucccgcagcuauagccagcaauuguuauuccucucucauucuugauuacuucucguauccgcugagcaugaaguccgacuugucagugaguucugcuggaccuaucagccaguuuaacuacaaacaguccuucucaaauccaaccugccuaauccuggccacaguaccccacaaccucacuaccauuacaaagccucugaaauauagcuacaucaauaagugcucuagacuucuguccgaugacaggaccgaaguuccccaguuggugaacgcaaaucaauauaguccaugugucagcauugugcccucuacugucugggaggacggcgauuacuaccggaaacagcucuccccucuggaaggugggggcugguuaguggccucaggaaguacgguugcuaugacagagcagcugcagaugggcuuugggauaaccgugcaauauggaacugacaccaacagcguaugcccaaagcuagaguucgcgaaugauacaaaaaucgcaucgcagcucgguaacugugucgaauacucccuguauggcgugucugggcguggaguuuuucagaauugcaccgccgugggcguccgccagcaaagauucguguacgacgcuuaucagaaccuuguagguuacuauagcgaugacgggaacuacuacuguuugagggccugcgugucaguuccggucagugugauuuaugauaaggagacuaagacacaugcaacgcuguuuggcuccguggccugugaacacaucucuagcaccaugucccaguacucacggagcacucgaaguaugcucaaacgcagagacucuacauauggaccccugcagaccccugucggcugcguucuugggcugguaaauuccagcuuguucguggaggauuguaagcucccacugggacaaucguuaugcgcucugcccgacacaccuucaacucuaaccccaaggucugugcggaguguccccggugaaaugcgccucgccuccaucgcauuuaaccacccgauucagguggaucagcugaauagcucuuacuucaaacuuagcauaccuacgaacuuuuccuucggcguuacccaagaguauauccagacaacuauucagaaggugaccgucgacuguaaacaguacgugugcaauggguuccaaaagugcgaacaguugcugagagaguauggacaguuuuguucaaagaucaaccaggcgcuccauggcgcuaaucugaggcaagaugacaguguucguaacuuauucgccagcgugaaaucuucccagucaaguccaauuauccccgguuuugggggcgacuucaaucugacacuuuuggagccuguaagcauauccacuggaucucggucggcacgaagcgccaucgaagaucuccuguuugacaaggucaccauugcugaucccggcuacaugcagggguacgacgauugcaugcagcaaggaccagccucagcaagagaccuaaucugugcucaguauguggccggcuacaaagugcugccuccccucauggaugucaacauggaggcggccuauacguccagucugcuugguucuauugcugggguuggauggacagcaggcuugagcuccuucgccgcuaucccauuugcccagucaauauucuacaggcugaauggugugggcauuacccaacagguauuaucugaaaaccagaagcucaucgcaaauaaauuuaaccaggcgcugggggccaugcaaacuggauucacaaccacuaaugaggcuuuucgcaaggugcaggacgccgucaacaacaaugcacaggcucuuagcaagcuggccagugaauuguccaacaccuucggcgcaauuagcgccucuaucggggauauaauccagcggcucgacccgccugagcaagaugcucagauugacagacugaucaauggaaggcuaacaacgcugaacgcguucguggcccagcagcucguucgcucagaguccgcagcucugagugcccaacuugccaaagauaaggugaaugaaugcgucaaagcucagagcaagcgaucgggcuuuuguggucaggggacccacauugugucuuucguugugaacgcacccaauggauuguauuuuaugcaugucggcuacuauccauccaaccacaucgagguagugagcgccuacggucugugcgacgcggcuaaucccacuaacuguauagccccuguuaauggcuacuucauuaaaacaaacaauacccggaucguggacgaauggucauauacagggaguucuuuuuacgcaccagagcccaucacuuccuuaaacaccaaguaugucgccccucaugugacguaccagaauauuagcacaaaccucccgccaccccugcuuggaaacucaaccggcaucgauuuccaagacgagcuggaugaauuuuucaagaauguaaguacuagcauuccuaacuuugggucccuaacccagauaaauacaacucuccuggacuugaccuaugagaugcugucuuuacagcaaguggucaaagcucucaacgaaagcuacaucgaucugaaggagcuuggaaauuauacauacuacaacaaauggccaugguauauuuggcugggcuucaucgcagguuugguugcccucgcgcugugcguguuuuucauucuauguugcacgggguguggaaccaauugcaugggcaagcugaaaugcaaccguuguugcgacagauacgaagaguaugaucuugagccccacaaggugcacguccauugaggacuaguuauaagacugacuagcccgaugggccucccaacgggcccuccuccccuccuugcaccgagauuaauaaaaaaaaaaaaaaaaaaaaaaaaaaaaaaaaaaaaaaaaaaaaaaaaaaaaaaaaaaaaaaaaugcaucccccccccccccccccccccccccccccccaaaggcucuuuucagagccaccagaauu

SEQ ID NO: 14894 - RNA, 4279 nt, Artificial Sequence
  MERS-CoV/Riyadh_14_2013__AHI48572.1 spike protein mRNA human (1-1353)
aggagaaagcuuaccaugauccacagcguguuccugcucauguuucuucugacccccacagaguccuacgucgacguuggcccugauucugugaagucagccugcauugaaguagacauacagcaaacuuucuuugauaaaacguggccaagaccgaucgacgugaguaaggcugaugggauuaucuauccccagggaaggaccuacagcaacauuacaaucacuuaucaggguuuguucccuuaccagggcgaccauggggauauguaugucuacuccgcaggacacgccaccggcacaaccccacaaaaauuauuuguggcgaauuauucucaggacguuaagcaguucgcuaacgguuuugugguccggauaggggccgcagccaauucgacuggaacagugaucauuucacccagcaccagugcuacgauccgcaaaauuuacccugcauucaugcugggcuccucuguaggcaacuuuagcgaugggaagaugggacgauucuuuaaucauacucuaguucuccugccagacgguuguggcacccuucugcgugccuucuacugcaucuuggagcccagauccgggaaccacuguccugcuggaaauucauauacaaguuuugccacuuaccauaccccagcgacagauugcagcgacggcaacuauaauaggaacgcaucucucaauuccuucaaggaauacuucaaccugcggaauuguaccuuuauguauacguacaacauaacugaggaugaaauucuggagugguucgguaucacacagaccgcccaaggggugcaccucuuuucaagccgcuaugucgacuuauacggaggcaauauguuccaguuugcuacucugccgguguacgacacaauuaaauauuacaguaucaucccccacucuauuagauccauacagagcgauaggaaggccugggcagcuuucuauguguacaaacuucagccuuugaccuuucugcuagacuucucggucgauggcuauauccggcgcgccauugacugcggguuuaacgaucucucucaacugcauuguuccuacgagucauucgacguugaaaguggaguguauagcguauccucuuuugaggcgaagccaagcgguucaguggucgaacaggccgagggcguggagugcgauuucaguccccuucuguccgggacgccuccacagguuuacaacuuuaaacgauugguguucaccaauuguaacuacaaucucacaaagcuguuaagccuguucucugucaacgacuuuacuugcucacaaaucagucccgcagcuauagccagcaauuguuauuccucucucauucuugauuacuucucguauccgcugagcaugaaguccgacuugucagugaguucugcuggaccuaucagccaguuuaacuacaaacaguccuucucaaauccaaccugccuaauccuggccacaguaccccacaaccucacuaccauuacaaagccucugaaauauagcuacaucaauaagugcucuagacuucuguccgaugacaggaccgaaguuccccaguuggugaacgcaaaucaauauaguccaugugucagcauugugcccucuacugucugggaggacggcgauuacuaccggaaacagcucuccccucuggaaggugggggcugguuaguggccucaggaaguacgguugcuaugacagagcagcugcagaugggcuuugggauaaccgugcaauauggaacugacaccaacagcguaugcccaaagcuagaguucgcgaaugauacaaaaaucgcaucgcagcucgguaacugugucgaauacucccuguauggcgugucugggcguggaguuuuucagaauugcaccgccgugggcguccgccagcaaagauucguguacgacgcuuaucagaaccuuguagguuacuauagcgaugacgggaacuacuacuguuugagggccugcgugucaguuccggucagugugauuuaugauaaggagacuaagacacaugcaacgcuguuuggcuccguggccugugaacacaucucuagcaccaugucccaguacucacggagcacucgaaguaugcucaaacgcagagacucuacauauggaccccugcagaccccugucggcugcguucuugggcugguaaauuccagcuuguucguggaggauuguaagcucccacugggacaaucguuaugcgcucugcccgacacaccuucaacucuaaccccaaggucugugcggaguguccccggugaaaugcgccucgccuccaucgcauuuaaccacccgauucagguggaucagcugaauagcucuuacuucaaacuuagcauaccuacgaacuuuuccuucggcguuacccaagaguauauccagacaacuauucagaaggugaccgucgacuguaaacaguacgugugcaauggguuccaaaagugcgaacaguugcugagagaguauggacaguuuuguucaaagaucaaccaggcgcuccauggcgcuaaucugaggcaagaugacaguguucguaacuuauucgccagcgugaaaucuucccagucaaguccaauuauccccgguuuugggggcgacuucaaucugacacuuuuggagccuguaagcauauccacuggaucucggucggcacgaagcgccaucgaagaucuccuguuugacaaggucaccauugcugaucccggcuacaugcagggguacgacgauugcaugcagcaaggaccagccucagcaagagaccuaaucugugcucaguauguggccggcuacaaagugcugccuccccucauggaugucaacauggaggcggccuauacguccagucugcuugguucuauugcugggguuggauggacagcaggcuugagcuccuucgccgcuaucccauuugcccagucaauauucuacaggcugaauggugugggcauuacccaacagguauuaucugaaaaccagaagcucaucgcaaauaaauuuaaccaggcgcugggggccaugcaaacuggauucacaaccacuaaugaggcuuuucgcaaggugcaggacgccgucaacaacaaugcacaggcucuuagcaagcuggccagugaauuguccaacaccuucggcgcaauuagcgccucuaucggggauauaauccagcggcucgacgugcuggagcaagaugcucagauugacagacuaaucaauggaaggcugacaacgcucaacgcguucguugcccagcagcuggugcgcucagaguccgcagcucuuagugcccaauuggccaaagauaaggucaaugaaugcgugaaagcucagagcaagcgaucgggcuuuuguggucaggggacccacauuguuucuuucguggucaacgcaccgaauggacuguauuuuaugcauguaggcuacuauccuuccaaccacaucgaggugguuagcgccuacgguuuaugcgacgcggcuaaucccacuaacuguauagccccagugaauggcuacuucauuaaaacaaacaauacccggaucgucgacgaauggucauauacagggaguucuuuuuacgcacccgagccuaucacuucccucaacaccaaguauguggccccacagguaacguaccaaaauauuagcacaaaccugcccccuccgcuucugggaaacucaaccggcaucgauuuccaggacgagcuagaugaauuuuucaagaaugugaguacuagcauuccaaacuuugggucccucacccagauaaauacaacucuguuggaccugaccuaugagauguuaucucuccaacaggucguuaaagcucugaacgaaagcuacaucgaucuuaaggagcugggaaauuauacauacuacaacaaauggcccugguauauuugguugggcuucaucgcaggucucguggcccuggcgcuaugcguguuuuucauucuguguugcacgggguguggaaccaauugcaugggcaaacuuaagugcaaccguuguugcgacagauacgaagaguaugaucucgagccucauaagguccacgugcacugaggacuaguuauaagacugacuagcccgaugggccucccaacgggcccuccuccccuccuugcaccgagauuaauaaaaaaaaaaaaaaaaaaaaaaaaaaaaaaaaaaaaaaaaaaaaaaaaaaaaaaaaaaaaaaaaugcaucccccccccccccccccccccccccccccccaaaggcucuuuucagagccaccagaauu

SEQ ID NO: 14895 - RNA, 4279 nt, Artificial Sequence
  MERS-CoV/Riyadh_14_2013__AHI48572.1 spike protein mRNA human (1-1353)(V1060P_L1061P)
aggagaaagcuuaccaugauccacagcguguuccugcucauguuucuucugacccccacagaguccuacgucgacguuggcccugauucugugaagucagccugcauugaaguagacauacagcaaacuuucuuugauaaaacguggccaagaccgaucgacgugaguaaggcugaugggauuaucuauccccagggaaggaccuacagcaacauuacaaucacuuaucaggguuuguucccuuaccagggcgaccauggggauauguaugucuacuccgcaggacacgccaccggcacaaccccacaaaaauuauuuguggcgaauuauucucaggacguuaagcaguucgcuaacgguuuugugguccggauaggggccgcagccaauucgacuggaacagugaucauuucacccagcaccagugcuacgauccgcaaaauuuacccugcauucaugcugggcuccucuguaggcaacuuuagcgaugggaagaugggacgauucuuuaaucauacucuaguucuccugccagacgguuguggcacccuucugcgugccuucuacugcaucuuggagcccagauccgggaaccacuguccugcuggaaauucauauacaaguuuugccacuuaccauaccccagcgacagauugcagcgacggcaacuauaauaggaacgcaucucucaauuccuucaaggaauacuucaaccugcggaauuguaccuuuauguauacguacaacauaacugaggaugaaauucuggagugguucgguaucacacagaccgcccaaggggugcaccucuuuucaagccgcuaugucgacuuauacggaggcaauauguuccaguuugcuacucugccgguguacgacacaauuaaauauuacaguaucaucccccacucuauuagauccauacagagcgauaggaaggccugggcagcuuucuauguguacaaacuucagccuuugaccuuucugcuagacuucucggucgauggcuauauccggcgcgccauugacugcggguuuaacgaucucucucaacugcauuguuccuacgagucauucgacguugaaaguggaguguauagcguauccucuuuugaggcgaagccaagcgguucaguggucgaacaggccgagggcguggagugcgauuucaguccccuucuguccgggacgccuccacagguuuacaacuuuaaacgauugguguucaccaauuguaacuacaaucucacaaagcuguuaagccuguucucugucaacgacuuuacuugcucacaaaucagucccgcagcuauagccagcaauuguuauuccucucucauucuugauuacuucucguauccgcugagcaugaaguccgacuugucagugaguucugcuggaccuaucagccaguuuaacuacaaacaguccuucucaaauccaaccugccuaauccuggccacaguaccccacaaccucacuaccauuacaaagccucugaaauauagcuacaucaauaagugcucuagacuucuguccgaugacaggaccgaaguuccccaguuggugaacgcaaaucaauauaguccaugugucagcauugugcccucuacugucugggaggacggcgauuacuaccggaaacagcucuccccucuggaaggugggggcugguuaguggccucaggaaguacgguugcuaugacagagcagcugcagaugggcuuugggauaaccgugcaauauggaacugacaccaacagcguaugcccaaagcuagaguucgcgaaugauacaaaaaucgcaucgcagcucgguaacugugucgaauacucccuguauggcgugucugggcguggaguuuuucagaauugcaccgccgugggcguccgccagcaaagauucguguacgacgcuuaucagaaccuuguagguuacuauagcgaugacgggaacuacuacuguuugagggccugcgugucaguuccggucagugugauuuaugauaaggagacuaagacacaugcaacgcuguuuggcuccguggccugugaacacaucucuagcaccaugucccaguacucacggagcacucgaaguaugcucaaacgcagagacucuacauauggaccccugcagaccccugucggcugcguucuugggcugguaaauuccagcuuguucguggaggauuguaagcucccacugggacaaucguuaugcgcucugcccgacacaccuucaacucuaaccccaaggucugugcggaguguccccggugaaaugcgccucgccuccaucgcauuuaaccacccgauucagguggaucagcugaauagcucuuacuucaaacuuagcauaccuacgaacuuuuccuucggcguuacccaagaguauauccagacaacuauucagaaggugaccgucgacuguaaacaguacgugugcaauggguuccaaaagugcgaacaguugcugagagaguauggacaguuuuguucaaagaucaaccaggcgcuccauggcgcuaaucugaggcaagaugacaguguucguaacuuauucgccagcgugaaaucuucccagucaaguccaauuauccccgguuuugggggcgacuucaaucugacacuuuuggagccuguaagcauauccacuggaucucggucggcacgaagcgccaucgaagaucuccuguuugacaaggucaccauugcugaucccggcuacaugcagggguacgacgauugcaugcagcaaggaccagccucagcaagagaccuaaucugugcucaguauguggccggcuacaaagugcugccuccccucauggaugucaacauggaggcggccuauacguccagucugcuugguucuauugcugggguuggauggacagcaggcuugagcuccuucgccgcuaucccauuugcccagucaauauucuacaggcugaauggugugggcauuacccaacagguauuaucugaaaaccagaagcucaucgcaaauaaauuuaaccaggcgcugggggccaugcaaacuggauucacaaccacuaaugaggcuuuucgcaaggugcaggacgccgucaacaacaaugcacaggcucuuagcaagcuggccagugaauuguccaacaccuucggcgcaauuagcgccucuaucggggauauaauccagcggcucgacccgccugagcaagaugcucagauugacagacugaucaauggaaggcuaacaacgcugaacgcguucguggcccagcagcucguucgcucagaguccgcagcucugagugcccaacuugccaaagauaaggugaaugaaugcgucaaagcucagagcaagcgaucgggcuuuuguggucaggggacccacauugugucuuucguugugaacgcacccaauggauuguauuuuaugcaugucggcuacuauccauccaaccacaucgagguagugagcgccuacggucugugcgacgcggcuaaucccacuaacuguauagccccuguuaauggcuacuucauuaaaacaaacaauacccggaucguggacgaauggucauauacagggaguucuuuuuacgcaccagagcccaucacuuccuuaaacaccaaguaugucgccccucaggugacguaccaaaauauuagcacaaaccucccgccaccccugcuuggaaacucaaccggcaucgauuuccaggacgagcuggaugaauuuuucaagaauguaaguacuagcauuccuaacuuugggucccuaacccagauaaauacaacucuccuggacuugaccuaugagaugcugucuuuacaacagguggucaaagcucucaacgaaagcuacaucgaucugaaggagcuuggaaauuauacauacuacaacaaauggccaugguauauuuggcugggcuucaucgcagguuugguugcccucgcgcugugcguguuuuucauucuauguugcacgggguguggaaccaauugcaugggcaagcugaaaugcaaccguuguugcgacagauacgaagaguaugaucuugagccccauaaggugcacguccacugaggacuaguuauaagacugacuagcccgaugggccucccaacgggcccuccuccccuccuugcaccgagauuaauaaaaaaaaaaaaaaaaaaaaaaaaaaaaaaaaaaaaaaaaaaaaaaaaaaaaaaaaaaaaaaaaugcaucccccccccccccccccccccccccccccccaaaggcucuuuucagagccaccagaauu

SEQ ID NO: 14896 - RNA, 4279 nt, Artificial Sequence
  MERS-CoV/Riyadh_14_2013__AHI48572.1 spike protein mRNA human (1-1353)(R1020Q)
aggagaaagcuuaccaugauccacagcguguuccugcucauguuucuucugacccccacagaguccuacgucgacguuggcccugauucugugaagucagccugcauugaaguagacauacagcaaacuuucuuugauaaaacguggccaagaccgaucgacgugaguaaggcugaugggauuaucuauccccagggaaggaccuacagcaacauuacaaucacuuaucaggguuuguucccuuaccagggcgaccauggggauauguaugucuacuccgcaggacacgccaccggcacaaccccacaaaaauuauuuguggcgaauuauucucaggacguuaagcaguucgcuaacgguuuugugguccggauaggggccgcagccaauucgacuggaacagugaucauuucacccagcaccagugcuacgauccgcaaaauuuacccugcauucaugcugggcuccucuguaggcaacuuuagcgaugggaagaugggacgauucuuuaaucauacucuaguucuccugccagacgguuguggcacccuucugcgugccuucuacugcaucuuggagcccagauccgggaaccacuguccugcuggaaauucauauacaaguuuugccacuuaccauaccccagcgacagauugcagcgacggcaacuauaauaggaacgcaucucucaauuccuucaaggaauacuucaaccugcggaauuguaccuuuauguauacguacaacauaacugaggaugaaauucuggagugguucgguaucacacagaccgcccaaggggugcaccucuuuucaagccgcuaugucgacuuauacggaggcaauauguuccaguuugcuacucugccgguguacgacacaauuaaauauuacaguaucaucccccacucuauuagauccauacagagcgauaggaaggccugggcagcuuucuauguguacaaacuucagccuuugaccuuucugcuagacuucucggucgauggcuauauccggcgcgccauugacugcggguuuaacgaucucucucaacugcauuguuccuacgagucauucgacguugaaaguggaguguauagcguauccucuuuugaggcgaagccaagcgguucaguggucgaacaggccgagggcguggagugcgauuucaguccccuucuguccgggacgccuccacagguuuacaacuuuaaacgauugguguucaccaauuguaacuacaaucucacaaagcuguuaagccuguucucugucaacgacuuuacuugcucacaaaucagucccgcagcuauagccagcaauuguuauuccucucucauucuugauuacuucucguauccgcugagcaugaaguccgacuugucagugaguucugcuggaccuaucagccaguuuaacuacaaacaguccuucucaaauccaaccugccuaauccuggccacaguaccccacaaccucacuaccauuacaaagccucugaaauauagcuacaucaauaagugcucuagacuucuguccgaugacaggaccgaaguuccccaguuggugaacgcaaaucaauauaguccaugugucagcauugugcccucuacugucugggaggacggcgauuacuaccggaaacagcucuccccucuggaaggugggggcugguuaguggccucaggaaguacgguugcuaugacagagcagcugcagaugggcuuugggauaaccgugcaauauggaacugacaccaacagcguaugcccaaagcuagaguucgcgaaugauacaaaaaucgcaucgcagcucgguaacugugucgaauacucccuguauggcgugucugggcguggaguuuuucagaauugcaccgccgugggcguccgccagcaaagauucguguacgacgcuuaucagaaccuuguagguuacuauagcgaugacgggaacuacuacuguuugagggccugcgugucaguuccggucagugugauuuaugauaaggagacuaagacacaugcaacgcuguuuggcuccguggccugugaacacaucucuagcaccaugucccaguacucacggagcacucgaaguaugcucaaacgcagagacucuacauauggaccccugcagaccccugucggcugcguucuugggcugguaaauuccagcuuguucguggaggauuguaagcucccacugggacaaucguuaugcgcucugcccgacacaccuucaacucuaaccccaaggucugugcggaguguccccggugaaaugcgccucgccuccaucgcauuuaaccacccgauucagguggaucagcugaauagcucuuacuucaaacuuagcauaccuacgaacuuuuccuucggcguuacccaagaguauauccagacaacuauucagaaggugaccgucgacuguaaacaguacgugugcaauggguuccaaaagugcgaacaguugcugagagaguauggacaguuuuguucaaagaucaaccaggcgcuccauggcgcuaaucugaggcaagaugacaguguucguaacuuauucgccagcgugaaaucuucccagucaaguccaauuauccccgguuuugggggcgacuucaaucugacacuuuuggagccuguaagcauauccacuggaucucggucggcacgaagcgccaucgaagaucuccuguuugacaaggucaccauugcugaucccggcuacaugcagggguacgacgauugcaugcagcaaggaccagccucagcaagagaccuaaucugugcucaguauguggccggcuacaaagugcugccuccccucauggaugucaacauggaggcggccuauacguccagucugcuugguucuauugcugggguuggauggacagcaggcuugagcuccuucgccgcuaucccauuugcccagucaauauucuacaggcugaauggugugggcauuacccaacagguauuaucugaaaaccagaagcucaucgcaaauaaauuuaaccaggcgcugggggccaugcaaacuggauucacaaccacuaaugaggcuuuucagaaggugcaggacgccgucaacaacaaugcacaggcucuuagcaagcuggccagugaauuguccaacaccuucggcgcaauuagcgccucuaucggggauauaauccaacgccucgacgugcuggagcaggaugcucagauugaccggcuaaucaauggaagacugacaacgcucaacgcguucguugcccagcaacuggugaggucagaguccgcagcucuuagugcccaguuggccaaagauaaggucaaugaaugcgugaaagcucagagcaagcgcucgggcuuuuguggucaggggacccacauuguuucuuucguggucaacgcaccgaauggacuguauuuuaugcauguaggcuacuauccuuccaaccacaucgaggugguuagcgccuacgguuuaugcgacgcggcuaaucccacuaacuguauagccccagugaauggcuacuucauuaaaacaaacaauacccgaaucgucgacgaauggucauauacagggaguucuuuuuacgcacccgagccuaucacuucccucaacaccaaguauguggccccacaaguaacguaccagaauauuagcacaaaccugcccccuccgcuucugggaaacucaaccggcaucgauuuccaggacgagcuagaugaauuuuucaagaaugugaguacuagcauuccaaacuuugggucccucacccaaauaaauacaacucuguuggaccugaccuaugagauguuaucucuccagcaggucguuaaagcucugaacgaaagcuacaucgaucuuaaggagcugggaaauuauacauacuacaacaaauggcccugguauauuugguugggcuucaucgcaggucucguggcccuggcgcuaugcguguuuuucauucuguguugcacgggguguggaaccaauugcaugggcaaacuuaagugcaaccgguguugcgaccguuacgaagaguaugaucucgagccucauaagguccacgugcacugaggacuaguuauaagacugacuagcccgaugggccucccaacgggcccuccuccccuccuugcaccgagauuaauaaaaaaaaaaaaaaaaaaaaaaaaaaaaaaaaaaaaaaaaaaaaaaaaaaaaaaaaaaaaaaaaugcaucccccccccccccccccccccccccccccccaaaggcucuuuucagagccaccagaauu

SEQ ID NO: 14897 - RNA, 1984 nt, Artificial Sequence
  MERS-CoV/Riyadh_14_2013__AHI48572.1 spike protein mRNA human (1-17_726-1296)(R1020Q)
aggagaaagcuuaccaugauccacagcguguuccugcucauguuucuucugacccccacagaguccgacugcaaguugccuuuaggccagucucugugugcccuaccagauacuccgucaacgcucacccccagaagugucaggagcguuccuggggaaaugcggcuggcuuccauugcauucaaccauccaauacaaguggaccagcuuaauucuucguacuuuaaacugucaauccccacaaacuucagcuuuggaguaacucaggaguauauucagaccacaauccaaaaggugaccgucgauugcaaacaguacguguguaaugguuuccagaagugcgaacaguugcuccgcgaguauggccaauuuuguaguaaaauuaaccaggcccugcacggggcgaaucugcgacaggacgauuccguucguaaccucuucgcuucugugaagucaucccagucaaguccuaucauaccaggauuuggcggugacuucaauuuaacucugcuugaacccgucagcaucucuacaggguccagaucagccaggagcgcaauugaggauuugcuguuugacaaggugaccaucgccgauccuggauacaugcaaggcuaugacgauugcaugcagcagggcccagcuagugcacgggaccuaauuugugcccaauacguagcuggguauaaaguucucccgccccugauggaugugaacauggaggccgcguacacgucuucccuucugggaagcaucgccggugucggcuggacugcaggguugucgucuuucgcugccauaccuuuugcacaguccauuuucuaccgccucaauggagugggcaucacccaacaggugcugucagaaaaccagaaguuaauugcuaauaaauucaaccaggcccugggugcgaugcagacaggguuuacuaccacaaaugaggccuuccagaagguccaagacgcaguuaacaauaacgcucaggcccucaguaaacuugcuagcgaacuguccaacaccuuuggagccaucucugcaagcaucggcgacauuauacagagauuggaugugcuagagcaggacgcccaaaucgauaggcugauuaauggccggcucacgacucugaacgcuuucguagcgcagcagcuugugcgcucagagagugcagcccuguccgcucaguuggccaaggacaaggucaaugaaugcgugaaagcacaaagcaagcgaucuggguuuuguggacaggguacacauaucguuucauucguggucaacgccccaaauggccucuauuuuaugcacgugggguacuaucccaguaaccauauagagguaguuagcgcuuacggacugugcgaugccgcaaauccuaccaacuguauugcgccagugaauggcuauuucaucaaaacuaacaauacaagaaucgucgacgaaugguccuacaccgguucuucguuuuaugcucccgagccgauuacgagcuuaaacaccaaguacguggccccucaggucacauaccaaaauaucuccacuaaccugcccccaccucuacucgggaauagcaccggcauugauuuccaggacgaacuggaugaguuuuucaaaaacgugaguacaucuauacccaacuuuggaagccuuacucagaucaauaccacauugcuggaccucaccuaugagaugcugucccuucagcaaguugugaaggcacugaacgaaucauacauugauuugaaagagcucggcaauuauacuuacuauaacaaguggccaugaggacuaguuauaagacugacuagcccgaugggccucccaacgggcccuccuccccuccuugcaccgagauuaauaaaaaaaaaaaaaaaaaaaaaaaaaaaaaaaaaaaaaaaaaaaaaaaaaaaaaaaaaaaaaaaaugcaucccccccccccccccccccccccccccccccaaaggcucuuuucagagccaccagaauu

SEQ ID NO: 14898 - RNA, 2065 nt, Artificial Sequence
  MERS-CoV/Riyadh_14_2013__AHI48572.1 spike protein mRNA human (1-17_726-1296)(R1020Q)_LeucineZipper
aggagaaagcuuaccaugauccacagcguguuccugcucauguuucuucugacccccacagaguccgacugcaaguugccuuuaggccagucucugugugcccuaccagauacuccgucaacgcucacccccagaagugucaggagcguuccuggggaaaugcggcuggcuuccauugcauucaaccauccaauacaaguggaccagcuuaauucuucguacuuuaaacugucaauccccacaaacuucagcuuuggaguaacucaggaguauauucagaccacaauccaaaaggugaccgucgauugcaaacaguacguguguaaugguuuccagaagugcgaacaguugcuccgcgaguauggccaauuuuguaguaaaauuaaccaggcccugcacggggcgaaucugcgacaggacgauuccguucguaaccucuucgcuucugugaagucaucccagucaaguccuaucauaccaggauuuggcggugacuucaauuuaacucugcuugaacccgucagcaucucuacaggguccagaucagccaggagcgcaauugaggauuugcuguuugacaaggugaccaucgccgauccuggauacaugcaaggcuaugacgauugcaugcagcagggcccagcuagugcacgggaccuaauuugugcccaauacguagcuggguauaaaguucucccgccccugauggaugugaacauggaggccgcguacacgucuucccuucugggaagcaucgccggugucggcuggacugcaggguugucgucuuucgcugccauaccuuuugcacaguccauuuucuaccgccucaauggagugggcaucacccaacaggugcugucagaaaaccagaaguuaauugcuaauaaauucaaccaggcccugggugcgaugcagacaggguuuacuaccacaaaugaggccuuccagaagguccaagacgcaguuaacaauaacgcucaggcccucaguaaacuugcuagcgaacuguccaacaccuuuggagccaucucugcaagcaucggcgacauuauacagagauuggaugugcuagagcaggacgcccaaaucgauaggcugauuaauggccggcucacgacucugaacgcuuucguagcgcagcagcuugugcgcucagagagugcagcccuguccgcucaguuggccaaggacaaggucaaugaaugcgugaaagcacaaagcaagcgaucuggguuuuguggacaggguacacauaucguuucauucguggucaacgccccaaauggccucuauuuuaugcacgugggguacuaucccaguaaccauauagagguaguuagcgcuuacggacugugcgaugccgcaaauccuaccaacuguauugcgccagugaauggcuauuucaucaaaacuaacaauacaagaaucgucgacgaaugguccuacaccgguucuucguuuuaugcucccgagccgauuacgagcuuaaacaccaaguacguggccccucaggucacauaccaaaauaucuccacuaaccugcccccaccucuacucgggaauagcaccggcauugauuuccaggacgaacuggaugaguuuuucaaaaacgugaguacaucuauacccaacuuuggaagccuuacucagaucaauaccacauugcuggaccucaccuaugagaugcugucccuucagcaaguugugaaggcacugaacgaaucauacauugauuugaaagagcucggcaauuauacuuacuauaacaaguggccagacaagaucgaagagauccugagcaaaauuuaccacauagaaaaugagaucgccaggauuaagaaauuaaucggggaggcuugaggacuaguuauaagacugacuagcccgaugggccucccaacgggcccuccuccccuccuugcaccgagauuaauaaaaaaaaaaaaaaaaaaaaaaaaaaaaaaaaaaaaaaaaaaaaaaaaaaaaaaaaaaaaaaaaugcaucccccccccccccccccccccccccccccccaaaggcucuuuucagagccaccagaauu

SEQ ID NO: 14899 - RNA, 4279 nt, Artificial Sequence
  MERS-CoV/England 1__YP_007188579.1 spike protein mRNA human (1-1353)
aggagaaagcuuaccaugauccacagcguguuccugcucauguuucuucugacccccacagaguccuacgucgacguuggcccugauucugugaagucagccugcauugaaguagacauacagcaaacuuucuuugauaaaacguggccaagaccgaucgacgugaguaaggcugaugggauuaucuauccccagggaaggaccuacagcaacauuacaaucacuuaucaggguuuguucccuuaccagggcgaccauggggauauguaugucuacuccgcaggacacgccaccggcacaaccccacaaaaauuauuuguggcgaauuauucucaggacguuaagcaguucgcuaacgguuuugugguccggauaggggccgcagccaauucgacuggaacagugaucauuucacccagcaccagugcuacgauccgcaaaauuuacccugcauucaugcugggcuccucuguaggcaacuuuagcgaugggaagaugggacgauucuuuaaucauacucuaguucuccugccagacgguuguggcacccuucugcgugccuucuacugcaucuuggagcccagauccgggaaccacuguccugcuggaaauucauauacaaguuuugccacuuaccauaccccagcgacagauugcagcgacggcaacuauaauaggaacgcaucucucaauuccuucaaggaauacuucaaccugcggaauuguaccuuuauguauacguacaacauaacugaggaugaaauucuggagugguucgguaucacacagaccgcccaaggggugcaccucuuuucaagccgcuaugucgacuuauacggaggcaauauguuccaguuugcuacucugccgguguacgacacaauuaaauauuacaguaucaucccccacucuauuagauccauacagagcgauaggaaggccugggcagcuuucuauguguacaaacuucagccuuugaccuuucugcuagacuucucggucgauggcuauauccggcgcgccauugacugcggguuuaacgaucucucucaacugcauuguuccuacgagucauucgacguugaaaguggaguguauagcguauccucuuuugaggcgaagccaagcgguucaguggucgaacaggccgagggcguggagugcgauuucaguccccuucuguccgggacgccuccacagguuuacaacuuuaaacgauugguguucaccaauuguaacuacaaucucacaaagcuguuaagccuguucucugucaacgacuuuacuugcucacaaaucagucccgcagcuauagccagcaauuguuauuccucucucauucuugauuacuucucguauccgcugagcaugaaguccgacuugucagugaguucugcuggaccuaucagccaguuuaacuacaaacaguccuucucaaauccaaccugccuaauccuggccacaguaccccacaaccucacuaccauuacaaagccucugaaauauagcuacaucaauaagugcucuagauuucuuuccgaugacaggaccgaaguuccccagcuggugaacgcaaaucaauauaguccaugugucagcauugugcccucuacugucugggaggacggcgauuacuaccggaaacaguuguccccucucgaaggugggggcuggcugguggccucaggaaguacgguugcuaugacagagcaguuacagaugggcuucgggauaaccgugcaauauggaacugacaccaacagcguaugcccaaagcuggaauuugcgaaugauacaaaaaucgcaucgcagcuagguaacugugucgaguacucccucuauggcgugucugggcguggaguuuuccagaauugcaccgccgugggcguccgccagcaaagauuuguguacgacgcuuaucagaaccugguagguuacuauagcgaugacgggaacuacuacugucuuagggccugcgugucaguuccggucagugugauuuaugauaaggagacuaagacacaugcaacguuguucggcuccguggccugugaacacaucucuagcaccaugucccaguacucacggagcacucgaaguaugcugaaacgcagagacucuacauauggaccccuccagaccccugucggcugcguucuggggcuuguaaauuccagccuguuuguggaggauuguaaguugccacucggacaaucgcugugcgcuuuacccgacacaccuucaacucugaccccaaggucugugcggaguguccccggugaaaugcgccuagccuccaucgcauucaaccacccgauucagguggaucagcucaauagcucuuacuuuaaacugagcauaccuacgaacuucuccuucggcguuacccaagaguauauccagacaacuauucagaaggugaccgucgacuguaaacaguacgugugcaauggguuucaaaagugcgaacagcuuuugagagaguauggacaguucuguucaaagaucaaccaggcgcugcauggcgcuaaucucaggcaagaugacaguguucguaaccuguuugccagcgugaaaucuucccagucaaguccaauuauccccgguuucgggggcgacuuuaauuuaacacugcuugagccuguaagcauauccacuggaucucggucggcacgaagcgccaucgaagaucuccucuucgacaaggucaccauugcugaucccggcuacaugcagggguacgacgauugcaugcagcaaggaccagccucagcaagagaccugaucugugcucaguauguggccggcuacaaagugcuaccuccccugauggaugucaacauggaggcggccuauacguccagucuccuggguucuauugcugggguuggauggacagcaggccuuagcuccuuugccgcuaucccauucgcccagucaauauuuuacagguugaauggugugggcauuacccaacagguacugucugaaaaccagaaguuaaucgcaaauaaauucaaccaggcgcucggggccaugcaaacuggauuuacaaccacuaaugaggcuuuccacaaggugcaggacgccgucaacaacaaugcacaggcucugagcaaacuugccagugaacuguccaacaccuucggcgcaauuagcgccucuaucggggauauaauccagcgcuuggacgugcucgagcaagaugcucagauugaccggcugaucaauggaagacuaacaacgcugaacgcguuuguugcccagcagcucgugaggucagaguccgcagcucugagugcccaacuugccaaggauaaggucaaugaaugcgugaaagcucagagcaagcgcucgggcuucuguggucaggggacccauauuguuucuuuuguggucaacgcaccgaauggauuguauuucaugcacguaggcuacuauccuuccaaccauaucgaggugguuagcgccuacggucugugcgacgcggcuaaucccacuaacuguauagccccagugaauggcuacuuuauuaaaacaaacaauacccgaaucgucgacgaauggucauauacagggaguucuuucuacgcacccgagccuaucacuuccuuaaacaccaaguauguggccccacagguaacguaccaaaauauuagcacaaacuugcccccuccgcugcuuggaaacucaaccggcaucgauuuucaggacgagcuggaugaguucuuuaagaaugugaguacuagcauuccaaacuucgggucccuaacccagauaaauacaacucuccuggacuugaccuaugaaaugcugucuuuacaacaggucguuaaagcucucaacgaaagcuacaucgaucugaaggagcuuggaaauuauacauacuacaacaaauggcccugguauauuuggcugggcuuuaucgcagguuugguggcccucgcgcugugcguguucuuuauucuauguugcacgggguguggaaccaauugcaugggcaagcugaaaugcaaccgguguugcgaccguuacgaagaguaugaucuugagccucacaagguccacgugcauugaggacuaguuauaagacugacuagcccgaugggccucccaacgggcccuccuccccuccuugcaccgagauuaauaaaaaaaaaaaaaaaaaaaaaaaaaaaaaaaaaaaaaaaaaaaaaaaaaaaaaaaaaaaaaaaaugcaucccccccccccccccccccccccccccccccaaaggcucuuuucagagccaccagaauu

SEQ ID NO: 14900 - RNA, 4279 nt, Artificial Sequence
  MERS-CoV/England 1__YP_007188579.1 spike protein mRNA human (1-1353)(V1060P_L1061P)
aggagaaagcuuaccaugauccacagcguguuccugcucauguuucuucugacccccacagaguccuacgucgacguuggcccugauucugugaagucagccugcauugaaguagacauacagcaaacuuucuuugauaaaacguggccaagaccgaucgacgugaguaaggcugaugggauuaucuauccccagggaaggaccuacagcaacauuacaaucacuuaucaggguuuguucccuuaccagggcgaccauggggauauguaugucuacuccgcaggacacgccaccggcacaaccccacaaaaauuauuuguggcgaauuauucucaggacguuaagcaguucgcuaacgguuuugugguccggauaggggccgcagccaauucgacuggaacagugaucauuucacccagcaccagugcuacgauccgcaaaauuuacccugcauucaugcugggcuccucuguaggcaacuuuagcgaugggaagaugggacgauucuuuaaucauacucuaguucuccugccagacgguuguggcacccuucugcgugccuucuacugcaucuuggagcccagauccgggaaccacuguccugcuggaaauucauauacaaguuuugccacuuaccauaccccagcgacagauugcagcgacggcaacuauaauaggaacgcaucucucaauuccuucaaggaauacuucaaccugcggaauuguaccuuuauguauacguacaacauaacugaggaugaaauucuggagugguucgguaucacacagaccgcccaaggggugcaccucuuuucaagccgcuaugucgacuuauacggaggcaauauguuccaguuugcuacucugccgguguacgacacaauuaaauauuacaguaucaucccccacucuauuagauccauacagagcgauaggaaggccugggcagcuuucuauguguacaaacuucagccuuugaccuuucugcuagacuucucggucgauggcuauauccggcgcgccauugacugcggguuuaacgaucucucucaacugcauuguuccuacgagucauucgacguugaaaguggaguguauagcguauccucuuuugaggcgaagccaagcgguucaguggucgaacaggccgagggcguggagugcgauuucaguccccuucuguccgggacgccuccacagguuuacaacuuuaaacgauugguguucaccaauuguaacuacaaucucacaaagcuguuaagccuguucucugucaacgacuuuacuugcucacaaaucagucccgcagcuauagccagcaauuguuauuccucucucauucuugauuacuucucguauccgcugagcaugaaguccgacuugucagugaguucugcuggaccuaucagccaguuuaacuacaaacaguccuucucaaauccaaccugccuaauccuggccacaguaccccacaaccucacuaccauuacaaagccucugaaauauagcuacaucaauaagugcucuagauuucuuuccgaugacaggaccgaaguuccccagcuggugaacgcaaaucaauauaguccaugugucagcauugugcccucuacugucugggaggacggcgauuacuaccggaaacaguuguccccucucgaaggugggggcuggcugguggccucaggaaguacgguugcuaugacagagcaguuacagaugggcuucgggauaaccgugcaauauggaacugacaccaacagcguaugcccaaagcuggaauuugcgaaugauacaaaaaucgcaucgcagcuagguaacugugucgaguacucccucuauggcgugucugggcguggaguuuuccagaauugcaccgccgugggcguccgccagcaaagauuuguguacgacgcuuaucagaaccugguagguuacuauagcgaugacgggaacuacuacugucuuagggccugcgugucaguuccggucagugugauuuaugauaaggagacuaagacacaugcaacguuguucggcuccguggccugugaacacaucucuagcaccaugucccaguacucacggagcacucgaaguaugcugaaacgcagagacucuacauauggaccccuccagaccccugucggcugcguucuggggcuuguaaauuccagccuguuuguggaggauuguaaguugccacucggacaaucgcugugcgcuuuacccgacacaccuucaacucugaccccaaggucugugcggaguguccccggugaaaugcgccuagccuccaucgcauucaaccacccgauucagguggaucagcucaauagcucuuacuuuaaacugagcauaccuacgaacuucuccuucggcguuacccaagaguauauccagacaacuauucagaaggugaccgucgacuguaaacaguacgugugcaauggguuucaaaagugcgaacagcuuuugagagaguauggacaguucuguucaaagaucaaccaggcgcugcauggcgcuaaucucaggcaagaugacaguguucguaaccuguuugccagcgugaaaucuucccagucaaguccaauuauccccgguuucgggggcgacuuuaauuuaacacugcuugagccuguaagcauauccacuggaucucggucggcacgaagcgccaucgaagaucucuuguucgacaaggucaccauugcugaucccggcuacaugcagggguacgacgauugcaugcagcaaggaccagccucagcaagagaccugaucugugcucaguauguggccggcuacaaagugcuaccuccccugauggaugucaacauggaggcggccuauacguccagucuccuggguucuauugcugggguuggauggacagcaggccuuagcuccuuugccgcuaucccauucgcccagucaauauuuuacagguugaauggugugggcauuacccaacagguacugucugaaaaccagaaguuaaucgcaaauaaauucaaccaggcgcucggggccaugcaaacuggauuuacaaccacuaaugaggcuuuccacaaggugcaggacgccgucaacaacaaugcacaggcucugagcaaacuugccagugaacuguccaacaccuucggcgcaauuagcgccucuaucggggauauaauccagcgcuuggacccgccugagcaagaugcucagauugaccggcucaucaauggaagacugacaacgcuaaacgcguuuguggcccagcagcugguuaggucagaguccgcagcucucagugcccaacuggccaaagauaaggugaaugaaugcgucaaagcucagagcaagcgcucgggcuucuguggucaggggacccauauugugucuuuuguugugaacgcacccaauggacuuuauuucaugcacgucggcuacuauccauccaaccauaucgagguagugagcgccuacgguuugugcgacgcggcuaaucccacuaacuguauagccccuguuaauggcuacuuuauuaaaacaaacaauacccgaaucguggacgaauggucauauacagggaguucuuucuacgcaccagagcccaucacuucccugaacaccaaguaugucgccccucaggugacguaccaaaauauuagcacaaacuuaccgccaccccuccugggaaacucaaccggcaucgauuuucaggacgagcuugaugaguucuuuaagaauguaaguacuagcauuccuaacuucgggucccugacccagauaaauacaacucuacucgaccugaccuaugaaauguugucucugcaacagguggucaaggcuuuaaacgaaagcuacaucgaucucaaggagcugggaaauuauacauacuacaacaaauggccaugguauauuuggcuuggcuuuaucgcaggucugguugccuuggcgcucugcguguucuuuauucuguguugcacgggguguggaaccaauugcaugggcaagcuaaaaugcaaccgguguugcgaccguuacgaagaguaugaucuggagccccacaaggugcacguccauugaggacuaguuauaagacugacuagcccgaugggccucccaacgggcccuccuccccuccuugcaccgagauuaauaaaaaaaaaaaaaaaaaaaaaaaaaaaaaaaaaaaaaaaaaaaaaaaaaaaaaaaaaaaaaaaaugcaucccccccccccccccccccccccccccccccaaaggcucuuuucagagccaccagaauu

SEQ ID NO: 14901 - RNA, 4093 nt, Artificial Sequence
  MERS-CoV/England 1__YP_007188579.1 spike protein mRNA human (variant)
aggagaaagcuuaccaugauccacagcguguuccugcucauguuucuucugacccccacagaguccuacgucgacguuggcccugauucugugaagucagccugcauugaaguagacauacagcaaacuuucuuugauaaaacguggccaagaccgaucgacgugaguaaggcugaugggauuaucuauccccagggaaggaccuacagcaacauuacaaucacuuaucaggguuuguucccuuaccagggcgaccauggggauauguaugucuacuccgcaggacacgccaccggcacaaccccacaaaaauuauuuguggcgaauuauucucaggacguuaagcaguucgcuaacgguuuugugguccggauaggggccgcagccaauucgacuggaacagugaucauuucacccagcaccagugcuacgauccgcaaaauuuacccugcauucaugcugggcuccucuguaggcaacuuuagcgaugggaagaugggacgauucuuuaaucauacucuaguucuccugccagacgguuguggcacccuucugcgugccuucuacugcaucuuggagcccagauccgggaaccacuguccugcuggaaauucauauacaaguuuugccacuuaccauaccccagcgacagauugcagcgacggcaacuauaauaggaacgcaucucucaauuccuucaaggaauacuucaaccugcggaauuguaccuuuauguauacguacaacauaacugaggaugaaauucuggagugguucgguaucacacagaccgcccaaggggugcaccucuuuucaagccgcuaugucgacuuauacggaggcaauauguuccaguuugcuacucugccgguguacgacacaauuaaauauuacaguaucaucccccacucuauuagauccauacagagcgauaggaaggccugggcagcuuucuauguguacaaacuucagccuuugaccuuucugcuagacuucucggucgauggcuauauccggcgcgccauugacugcggguuuaacgaucucucucaacugcauuguuccuacgagucauucgacguugaaaguggaguguauagcguauccucuuuugaggcgaagccaagcgguucaguggucgaacaggccgagggcguggagugcgauuucaguccccuucuguccgggacgccuccacagguuuacaacuuuaaacgauugguguucaccaauuguaacuacaaucucacaaagcuguuaagccuguucucugucaacgacuuuacuugcucacaaaucagucccgcagcuauagccagcaauuguuauuccucucucauucuugauuacuucucguauccgcugagcaugaaguccgacuugucagugaguucugcuggaccuaucagccaguuuaacuacaaacaguccuucucaaauccaaccugccuaauccuggccacaguaccccacaaccucacuaccauuacaaagccucugaaauauagcuacaucaauaagugcucuagauuucuuuccgaugacaggaccgaaguuccccagcuggugaacgcaaaucaauauaguccaugugucagcauugugcccucuacugucugggaggacggcgauuacuaccggaaacaguuguccccucucgaaggugggggcuggcugguggccucaggaaguacgguugcuaugacagagcaguuacagaugggcuucgggauaaccgugcaauauggaacugacaccaacagcguaugcccaaagcuggaauuugcgaaugauacaaaaaucgcaucgcagcuagguaacugugucgaguacucccucuauggcgugucugggcguggaguuuuccagaauugcaccgccgugggcguccgccagcaaagauuuguguacgacgcuuaucagaaccugguagguuacuauagcgaugacgggaacuacuacugucuuagggccugcgugucaguuccggucagugugauuuaugauaaggagacuaagacacaugcaacguuguucggcuccguggccugugaacacaucucuagcaccaugucccaguacucacggagcacucgaaguaugcugaaacgcagagacucuacauauggaccccuccagaccccugucggcugcguucuggggcuuguaaauuccagccuguuuguggaggauuguaaguugccacucggacaaucgcugugcgcuuuacccgacacaccuucaacucugaccccaaggucugugcggaguguccccggugaaaugcgccuagccuccaucgcauucaaccacccgauucagguggaucagcucaauagcucuuacuuuaaacugagcauaccuacgaacuucuccuucggcguuacccaagaguauauccagacaacuauucagaaggugaccgucgacuguaaacaguacgugugcaauggguuucaaaagugcgaacagcuuuugagagaguauggacaguucuguucaaagaucaaccaggcgcugcauggcgcuaaucucaggcaagaugacaguguucguaaccuguuugccagcgugaaaucuucccagucaaguccaauuauccccgguuucgggggcgacuuuaauuuaacacugcuugagccuguaagcauauccacuggaucucggucggcacgaagcgccaucgaagaucucuuguucgacaaggucaccauugcugaucccggcuacaugcagggguacgacgauugcaugcagcaaggaccagccucagcaagagaccugaucugugcucaguauguggccggcuacaaagugcuaccuccccugauggaugucaacauggaggcggccuauacguccagucuccuggguucuauugcugggguuggauggacagcaggccuuagcuccuuugccgcuaucccauucgcccagucaauauuuuacagguugaauggugugggcauuacccaacagguacugucugaaaaccagaaguuaaucgcaaauaaauucaaccaggcgcucggggccaugcaaacuggauuuacaaccacuaaugaggcuuuccacaaggugcaggacgccgucaacaacaaugcacaggcucugagcaaacuugccagugaacuguccaacaccuucggcgcaauuagcgccucuaucggggauauaauccagcgcuuggacccgccugagcaagaugcucagauugaccggcucaucaauggaagacugacaacgcuaaacgcguuuguggcccagcagcugguuaggucagaguccgcagcucucagugcccaacuggccaaagauaaggugaaugaaugcgucaaagcucagagcaagcgcucgggcuucuguggucaggggacccauauugugucuuuuguugugaacgcacccaauggacuuuauuucaugcacgucggcuacuauccauccaaccauaucgagguagugagcgccuacgguuugugcgacgcggcuaaucccacuaacuguauagccccuguuaauggcuacuuuauuaaaacaaacaauacccgaaucguggacgaauggucauauacagggaguucuuucuacgcaccagagcccaucacuucccugaacaccaaguaugucgccccucaggugacguaccaaaauauuagcacaaacuuaccgccaccccuccugggaaacucaaccggcaucgauuuucaggacgagcuugaugaguucuuuaagaauguaaguacuagcauuccuaacuucgggucccugacccagauaaauacaacucuacucgaccugaccuaugaaauguugucucugcaacagguggucaaggcuuuaaacgaaagcuacaucgaucucaaggagcugggaaauuauacauacugaggacuaguuauaagacugacuagcccgaugggccucccaacgggcccuccuccccuccuugcaccgagauuaauaaaaaaaaaaaaaaaaaaaaaaaaaaaaaaaaaaaaaaaaaaaaaaaaaaaaaaaaaaaaaaaaugcaucccccccccccccccccccccccccccccccaaaggcucuuuucagagccaccagaauu

SEQ ID NO: 14902 - RNA, 4093 nt, Artificial Sequence
  MERS-CoV/England 1__YP_007188579.1 spike protein mRNA human (variant)
aggagaaagcuuaccaugauccacagcguguuccugcucauguuucuucugacccccacagaguccuacgucgacguuggcccugauucugugaagucagccugcauugaaguagacauacagcaaacuuucuuugauaaaacguggccaagaccgaucgacgugaguaaggcugaugggauuaucuauccccagggaaggaccuacagcaacauuacaaucacuuaucaggguuuguucccuuaccagggcgaccauggggauauguaugucuacuccgcaggacacgccaccggcacaaccccacaaaaauuauuuguggcgaauuauucucaggacguuaagcaguucgcuaacgguuuugugguccggauaggggccgcagccaauucgacuggaacagugaucauuucacccagcaccagugcuacgauccgcaaaauuuacccugcauucaugcugggcuccucuguaggcaacuuuagcgaugggaagaugggacgauucuuuaaucauacucuaguucuccugccagacgguuguggcacccuucugcgugccuucuacugcaucuuggagcccagauccgggaaccacuguccugcuggaaauucauauacaaguuuugccacuuaccauaccccagcgacagauugcagcgacggcaacuauaauaggaacgcaucucucaauuccuucaaggaauacuucaaccugcggaauuguaccuuuauguauacguacaacauaacugaggaugaaauucuggagugguucgguaucacacagaccgcccaaggggugcaccucuuuucaagccgcuaugucgacuuauacggaggcaauauguuccaguuugcuacucugccgguguacgacacaauuaaauauuacaguaucaucccccacucuauuagauccauacagagcgauaggaaggccugggcagcuuucuauguguacaaacuucagccuuugaccuuucugcuagacuucucggucgauggcuauauccggcgcgccauugacugcggguuuaacgaucucucucaacugcauuguuccuacgagucauucgacguugaaaguggaguguauagcguauccucuuuugaggcgaagccaagcgguucaguggucgaacaggccgagggcguggagugcgauuucaguccccuucuguccgggacgccuccacagguuuacaacuuuaaacgauugguguucaccaauuguaacuacaaucucacaaagcuguuaagccuguucucugucaacgacuuuacuugcucacaaaucagucccgcagcuauagccagcaauuguuauuccucucucauucuugauuacuucucguauccgcugagcaugaaguccgacuugucagugaguucugcuggaccuaucagccaguuuaacuacaaacaguccuucucaaauccaaccugccuaauccuggccacaguaccccacaaccucacuaccauuacaaagccucugaaauauagcuacaucaauaagugcucuagauuucuuuccgaugacaggaccgaaguuccccagcuggugaacgcaaaucaauauaguccaugugucagcauugugcccucuacugucugggaggacggcgauuacuaccggaaacaguuguccccucucgaaggugggggcuggcugguggccucaggaaguacgguugcuaugacagagcaguuacagaugggcuucgggauaaccgugcaauauggaacugacaccaacagcguaugcccaaagcuggaauuugcgaaugauacaaaaaucgcaucgcagcuagguaacugugucgaguacucccucuauggcgugucugggcguggaguuuuccagaauugcaccgccgugggcguccgccagcaaagauuuguguacgacgcuuaucagaaccugguagguuacuauagcgaugacgggaacuacuacugucuuagggccugcgugucaguuccggucagugugauuuaugauaaggagacuaagacacaugcaacguuguucggcuccguggccugugaacacaucucuagcaccaugucccaguacucacggagcacucgaaguaugcugaaacgcagagacucuacauauggaccccuccagaccccugucggcugcguucuggggcuuguaaauuccagccuguuuguggaggauuguaaguugccacucggacaaucgcugugcgcuuuacccgacacaccuucaacucugaccccagccucuguggguaguguccccggcgaaaugaggcuagcauccaucgcguucaaccacccgauucagguggaucagcucaauagcucuuacuuuaaacugagcauaccuacgaacuucuccuucgggguuacccaagaguauauccagacaacuauucagaaggugaccgucgacuguaaacaguacgugugcaauggauuucaaaagugcgaacagcuuuugcgggaguauggccaguucuguucaaagaucaaccaggcucugcauggugccaaucuccgccaagaugacaguguuagaaaccuguuugcaagcgugaaaucuucccagucaaguccaauuauccccggguucggcggagacuuuaauuuaacacugcuugagccuguaagcauauccacuggcucuaggucggcccguagcgcuaucgaagaucuucucuucgacaaggucaccauugccgaucccggguacaugcagggauacgacgauugcaugcagcaaggcccagcaucagcucgggaccugaucugugcccaguauguggcggguuacaaagugcuaccuccccugauggaugucaacauggaggccgcuuauacguccagucuccuggggucuauugcaggaguuggcuggacagccggucuuagcuccuuugcugccaucccauucgcacagucaauauuuuaccgauugaauggcguggggauuacccaacagguacugucugaaaaccagaaguuaaucgcgaauaaauucaaccaggcccucggagcuaugcaaacuggcuuuacaaccacuaaugaggccuuccacaaggugcaggacgcagucaacaacaaugcucaggcccugagcaaguuggcaagugaacuguccaacaccuucggggccauuagcgcuucuaucggagauauaauccagagauuggacccgccugagcaagaugcgcagauugacaggcucaucaauggccgccugacaacgcuaaacgccuuuguggcacagcagcugguucggucagaguccgcugcccucagugcccaacuggcuaaagauaaggugaaugaaugcgucaaagcacagagcaagagaucggguuucugugggcagggaacccauauugugucuuuuguugugaacgcccccaauggccuuuauuucaugcacgucgguuacuauccauccaaccauaucgagguagugagcgcguacggcuugugcgacgcugccaaucccacuaacuguauagcaccuguuaauggguacuuuauuaaaacaaacaauaccaggaucguggacgaauggucauauacaggaaguucuuucuacgccccagagcccaucacuucccugaacaccaaguaugucgcuccucaggugacguaccaaaauauuagcacaaacuuaccgccaccccuccugggcaacucaaccgggaucgauuuucaggacgagcuugaugaguucuuuaagaauguaaguacuagcauuccuaacuucggaucccugacccagauaaauacaacucuacucgaccugaccuaugaaauguugucucugcaacagguggucaaagcauuaaacgaaagcuacaucgaucucaaggagcugggcaauuauacauacugaggacuaguuauaagacugacuagcccgaugggccucccaacgggcccuccuccccuccuugcaccgagauuaauaaaaaaaaaaaaaaaaaaaaaaaaaaaaaaaaaaaaaaaaaaaaaaaaaaaaaaaaaaaaaaaaugcaucccccccccccccccccccccccccccccccaaaggcucuuuucagagccaccagaauu

SEQ ID NO: 14903 - RNA, 4093 nt, Artificial Sequence
  MERS-CoV/England 1__YP_007188579.1 spike protein mRNA human (variant)
aggagaaagcuuaccaugauccacagcguguuccugcucauguuucuucugacccccacagaguccuacgucgacguuggcccugauucugugaagucagccugcauugaaguagacauacagcaaacuuucuuugauaaaacguggccaagaccgaucgacgugaguaaggcugaugggauuaucuauccccagggaaggaccuacagcaacauuacaaucacuuaucaggguuuguucccuuaccagggcgaccauggggauauguaugucuacuccgcaggacacgccaccggcacaaccccacaaaaauuauuuguggcgaauuauucucaggacguuaagcaguucgcuaacgguuuugugguccggauaggggccgcagccaauucgacuggaacagugaucauuucacccagcaccagugcuacgauccgcaaaauuuacccugcauucaugcugggcuccucuguaggcaacuuuagcgaugggaagaugggacgauucuuuaaucauacucuaguucuccugccagacgguuguggcacccuucugcgugccuucuacugcaucuuggagcccagauccgggaaccacuguccugcuggaaauucauauacaaguuuugccacuuaccauaccccagcgacagauugcagcgacggcaacuauaauaggaacgcaucucucaauuccuucaaggaauacuucaaccugcggaauuguaccuuuauguauacguacaacauaacugaggaugaaauucuggagugguucgguaucacacagaccgcccaaggggugcaccucuuuucaagccgcuaugucgacuuauacggaggcaauauguuccaguuugcuacucugccgguguacgacacaauuaaauauuacaguaucaucccccacucuauuagauccauacagagcgauaggaaggccugggcagcuuucuauguguacaaacuucagccuuugaccuuucugcuagacuucucggucgauggcuauauccggcgcgccauugacugcggguuuaacgaucucucucaacugcauuguuccuacgagucauucgacguugaaaguggaguguauagcguauccucuuuugaggcgaagccaagcgguucaguggucgaacaggccgagggcguggagugcgauuucaguccccuucuguccgggacgccuccacagguuuacaacuuuaaacgauugguguucaccaauuguaacuacaaucucacaaagcuguuaagccuguucucugucaacgacuuuacuugcucacaaaucagucccgcagcuauagccagcaauuguuauuccucucucauucuugauuacuucucguauccgcugagcaugaaguccgacuugucagugaguucugcuggaccuaucagccaguuuaacuacaaacaguccuucucaaauccaaccugccuaauccuggccacaguaccccacaaccucacuaccauuacaaagccucugaaauauagcuacaucaauaagugcucuagauuucuuuccgaugacaggaccgaaguuccccagcuggugaacgcaaaucaauauaguccaugugucagcauugugcccucuacugucugggaggacggcgauuacuaccggaaacaguuguccccucucgaaggugggggcuggcugguggccucaggaaguacgguugcuaugacagagcaguuacagaugggcuucgggauaaccgugcaauauggaacugacaccaacagcguaugcccaaagcuggaauuugcgaaugauacaaaaaucgcaucgcagcuagguaacugugucgaguacucccucuauggcgugucugggcguggaguuuuccagaauugcaccgccgugggcguccgccagcaaagauuuguguacgacgcuuaucagaaccugguagguuacuauagcgaugacgggaacuacuacugucuuagggccugcgugucaguuccggucagugugauuuaugauaaggagacuaagacacaugcaacguuguucggcuccguggccugugaacacaucucuagcaccaugucccaguacucacggagcacucgaaguaugcugaaacgcagagacucuacauauggaccccuccagaccccugucggcugcguucuggggcuuguaaauuccagccuguuuguggaggauuguaaguugccacucggacaaucgcugugcgcuuuacccgacacaccuucaacucugaccccagccucuguggguaguguccccggcgaaaugaggcuagcauccaucgcguucaaccacccgauucagguggaucagcucaauagcucuuacuuuaaacugagcauaccuacgaacuucuccuucgggguuacccaagaguauauccagacaacuauucagaaggugaccgucgacuguaaacaguacgugugcaauggauuucaaaagugcgaacagcuuuugcgggaguauggccaguucuguucaaagaucaaccaggcucugcauggugccaaucuccgccaagaugacaguguuagaaaccuguuugcaagcgugaaaucuucccagucaaguccaauuauccccggguucggcggagacuuuaauuuaacacugcuugagccuguaagcauauccacuggcucugggucggccggaagcgcuaucgaagaucuucucuucgacaaggucaccauugccgaucccggcuacaugcaggguuacgacgauugcaugcagcaagggccagcaucagcuagggaccugaucugugcccaguauguggcgggauacaaagugcuaccuccccugauggaugucaacauggaggccgcuuauacguccagucuccugggcucuauugccgguguuggcuggacagcagggcuuagcuccuuugcugccaucccauucgcacagucaauauuuuaccguuugaauggagugggcauuacccaacagguacugucugaaaaccagaaguuaaucgcgaauaaauucaaccaggcccucggggcuaugcaaacuggauuuacaaccacuaaugaggccuuccacaaggugcaggacgcagucaacaacaaugcucaggcccugagcaaguuggcaagugaacuguccaacaccuucggcgccauuagcgcuucuaucggugauauaauccagcgguuggacccgccugagcaagaugcgcagauugaccgacucaucaaugggagacugacaacgcuaaacgccuuuguggcacagcagcugguuaggucagaguccgcugcccucagugcccaacuggcuaaagauaaggugaaugaaugcgucaaagcacagagcaagcgcucgggauucuguggccaggguacccauauugugucuuuuguugugaacgcccccaauggccuuuauuucaugcacgucggguacuauccauccaaccauaucgagguagugagcgcguacggauugugcgacgcugccaaucccacuaacuguauagcaccuguuaauggcuacuuuauuaaaacaaacaauacccggaucguggacgaauggucauauacagggaguucuuucuacgccccagagcccaucacuucccugaacaccaaguaugucgcuccucaggugacguaccaaaauauuagcacaaacuuaccgccaccccuccugggaaacucaaccggcaucgauuuucaggacgagcuugaugaguucuuuaagaauguaaguacuagcauuccuaacuucgguucccugacccagauaaauacaacucuacucgaccugaccuaugaaauguugucucugcaacagguggucaaagcauuaaacgaaagcuacaucgaucucaaggagcuggggaauuauacauacugaggacuaguuauaagacugacuagcccgaugggccucccaacgggcccuccuccccuccuugcaccgagauuaauaaaaaaaaaaaaaaaaaaaaaaaaaaaaaaaaaaaaaaaaaaaaaaaaaaaaaaaaaaaaaaaaugcaucccccccccccccccccccccccccccccccaaaggcucuuuucagagccaccagaauu

SEQ ID NO: 14904 - RNA, 4174 nt, Artificial Sequence
  MERS-CoV/England 1__YP_007188579.1 spike protein mRNA human (variant)
aggagaaagcuuaccaugauccacagcguguuccugcucauguuucuucugacccccacagaguccuacgucgacguuggcccugauucugugaagucagccugcauugaaguagacauacagcaaacuuucuuugauaaaacguggccaagaccgaucgacgugaguaaggcugaugggauuaucuauccccagggaaggaccuacagcaacauuacaaucacuuaucaggguuuguucccuuaccagggcgaccauggggauauguaugucuacuccgcaggacacgccaccggcacaaccccacaaaaauuauuuguggcgaauuauucucaggacguuaagcaguucgcuaacgguuuugugguccggauaggggccgcagccaauucgacuggaacagugaucauuucacccagcaccagugcuacgauccgcaaaauuuacccugcauucaugcugggcuccucuguaggcaacuuuagcgaugggaagaugggacgauucuuuaaucauacucuaguucuccugccagacgguuguggcacccuucugcgugccuucuacugcaucuuggagcccagauccgggaaccacuguccugcuggaaauucauauacaaguuuugccacuuaccauaccccagcgacagauugcagcgacggcaacuauaauaggaacgcaucucucaauuccuucaaggaauacuucaaccugcggaauuguaccuuuauguauacguacaacauaacugaggaugaaauucuggagugguucgguaucacacagaccgcccaaggggugcaccucuuuucaagccgcuaugucgacuuauacggaggcaauauguuccaguuugcuacucugccgguguacgacacaauuaaauauuacaguaucaucccccacucuauuagauccauacagagcgauaggaaggccugggcagcuuucuauguguacaaacuucagccuuugaccuuucugcuagacuucucggucgauggcuauauccggcgcgccauugacugcggguuuaacgaucucucucaacugcauuguuccuacgagucauucgacguugaaaguggaguguauagcguauccucuuuugaggcgaagccaagcgguucaguggucgaacaggccgagggcguggagugcgauuucaguccccuucuguccgggacgccuccacagguuuacaacuuuaaacgauugguguucaccaauuguaacuacaaucucacaaagcuguuaagccuguucucugucaacgacuuuacuugcucacaaaucagucccgcagcuauagccagcaauuguuauuccucucucauucuugauuacuucucguauccgcugagcaugaaguccgacuugucagugaguucugcuggaccuaucagccaguuuaacuacaaacaguccuucucaaauccaaccugccuaauccuggccacaguaccccacaaccucacuaccauuacaaagccucugaaauauagcuacaucaauaagugcucuagauuucuuuccgaugacaggaccgaaguuccccagcuggugaacgcaaaucaauauaguccaugugucagcauugugcccucuacugucugggaggacggcgauuacuaccggaaacaguuguccccucucgaaggugggggcuggcugguggccucaggaaguacgguugcuaugacagagcaguuacagaugggcuucgggauaaccgugcaauauggaacugacaccaacagcguaugcccaaagcuggaauuugcgaaugauacaaaaaucgcaucgcagcuagguaacugugucgaguacucccucuauggcgugucugggcguggaguuuuccagaauugcaccgccgugggcguccgccagcaaagauuuguguacgacgcuuaucagaaccugguagguuacuauagcgaugacgggaacuacuacugucuuagggccugcgugucaguuccggucagugugauuuaugauaaggagacuaagacacaugcaacguuguucggcuccguggccugugaacacaucucuagcaccaugucccaguacucacggagcacucgaaguaugcugaaacgcagagacucuacauauggaccccuccagaccccugucggcugcguucuggggcuuguaaauuccagccuguuuguggaggauuguaaguugccacucggacaaucgcugugcgcuuuacccgacacaccuucaacucugaccccagccucuguggguaguguccccggcgaaaugaggcuagcauccaucgcguucaaccacccgauucagguggaucagcucaauagcucuuacuuuaaacugagcauaccuacgaacuucuccuucgggguuacccaagaguauauccagacaacuauucagaaggugaccgucgacuguaaacaguacgugugcaauggauuucaaaagugcgaacagcuuuugcgggaguauggccaguucuguucaaagaucaaccaggcucugcauggugccaaucuccgccaagaugacaguguuagaaaccuguuugcaagcgugaaaucuucccagucaaguccaauuauccccggguucggcggagacuuuaauuuaacacugcuugagccuguaagcauauccacuggcucuaggucggcccguagcgcuaucgaagaucuucucuucgacaaggucaccauugccgaucccggguacaugcagggauacgacgauugcaugcagcaaggcccagcaucagcucgggaccugaucugugcccaguauguggcggguuacaaagugcuaccuccccugauggaugucaacauggaggccgcuuauacguccagucuccuggggucuauugcaggaguuggcuggacagccggucuuagcuccuuugcugccaucccauucgcacagucaauauuuuaccgauugaauggcguggggauuacccaacagguacugucugaaaaccagaaguuaaucgcgaauaaauucaaccaggcccucggagcuaugcaaacuggcuuuacaaccacuaaugaggccuuccacaaggugcaggacgcagucaacaacaaugcucaggcccugagcaaguuggcaagugaacuguccaacaccuucggggccauuagcgcuucuaucggagauauaauccagagauuggacccgccugagcaagaugcgcagauugacaggcucaucaauggccgccugacaacgcuaaacgccuuuguggcacagcagcugguucggucagaguccgcugcccucagugcccaacuggcuaaagauaaggugaaugaaugcgucaaagcacagagcaagagaucggguuucugugggcagggaacccauauugugucuuuuguugugaacgcccccaauggccuuuauuucaugcacgucgguuacuauccauccaaccauaucgagguagugagcgcguacggcuugugcgacgcugccaaucccacuaacuguauagcaccuguuaauggguacuuuauuaaaacaaacaauaccaggaucguggacgaauggucauauacaggaaguucuuucuacgccccagagcccaucacuucccugaacaccaaguaugucgcuccucaggugacguaccaaaauauuagcacaaacuuaccgccaccccuccugggcaacucaaccgggaucgauuuucaggacgagcuugaugaguucuuuaagaauguaaguacuagcauuccuaacuucggaucccugacccagauaaauacaacucuacucgaccugaccuaugaaauguugucucugcaacagguggucaaagcauuaaacgaaagcuacaucgaucucaaggagcugggcaauuauacauacgguggguacauuccagaagcgccccgcgacggacaggccuauguucgaaaagauggcgagugggugcuucuguccacguuuugaggacuaguuauaagacugacuagcccgaugggccucccaacgggcccuccuccccuccuugcaccgagauuaauaaaaaaaaaaaaaaaaaaaaaaaaaaaaaaaaaaaaaaaaaaaaaaaaaaaaaaaaaaaaaaaaugcaucccccccccccccccccccccccccccccccaaaggcucuuuucagagccaccagaauu

SEQ ID NO: 14905 - RNA, 4174 nt, Artificial Sequence
  MERS-CoV/England 1__YP_007188579.1 spike protein mRNA human (variant)
aggagaaagcuuaccaugauccacagcguguuccugcucauguuucuucugacccccacagaguccuacgucgacguuggcccugauucugugaagucagccugcauugaaguagacauacagcaaacuuucuuugauaaaacguggccaagaccgaucgacgugaguaaggcugaugggauuaucuauccccagggaaggaccuacagcaacauuacaaucacuuaucaggguuuguucccuuaccagggcgaccauggggauauguaugucuacuccgcaggacacgccaccggcacaaccccacaaaaauuauuuguggcgaauuauucucaggacguuaagcaguucgcuaacgguuuugugguccggauaggggccgcagccaauucgacuggaacagugaucauuucacccagcaccagugcuacgauccgcaaaauuuacccugcauucaugcugggcuccucuguaggcaacuuuagcgaugggaagaugggacgauucuuuaaucauacucuaguucuccugccagacgguuguggcacccuucugcgugccuucuacugcaucuuggagcccagauccgggaaccacuguccugcuggaaauucauauacaaguuuugccacuuaccauaccccagcgacagauugcagcgacggcaacuauaauaggaacgcaucucucaauuccuucaaggaauacuucaaccugcggaauuguaccuuuauguauacguacaacauaacugaggaugaaauucuggagugguucgguaucacacagaccgcccaaggggugcaccucuuuucaagccgcuaugucgacuuauacggaggcaauauguuccaguuugcuacucugccgguguacgacacaauuaaauauuacaguaucaucccccacucuauuagauccauacagagcgauaggaaggccugggcagcuuucuauguguacaaacuucagccuuugaccuuucugcuagacuucucggucgauggcuauauccggcgcgccauugacugcggguuuaacgaucucucucaacugcauuguuccuacgagucauucgacguugaaaguggaguguauagcguauccucuuuugaggcgaagccaagcgguucaguggucgaacaggccgagggcguggagugcgauuucaguccccuucuguccgggacgccuccacagguuuacaacuuuaaacgauugguguucaccaauuguaacuacaaucucacaaagcuguuaagccuguucucugucaacgacuuuacuugcucacaaaucagucccgcagcuauagccagcaauuguuauuccucucucauucuugauuacuucucguauccgcugagcaugaaguccgacuugucagugaguucugcuggaccuaucagccaguuuaacuacaaacaguccuucucaaauccaaccugccuaauccuggccacaguaccccacaaccucacuaccauuacaaagccucugaaauauagcuacaucaauaagugcucuagauuucuuuccgaugacaggaccgaaguuccccagcuggugaacgcaaaucaauauaguccaugugucagcauugugcccucuacugucugggaggacggcgauuacuaccggaaacaguuguccccucucgaaggugggggcuggcugguggccucaggaaguacgguugcuaugacagagcaguuacagaugggcuucgggauaaccgugcaauauggaacugacaccaacagcguaugcccaaagcuggaauuugcgaaugauacaaaaaucgcaucgcagcuagguaacugugucgaguacucccucuauggcgugucugggcguggaguuuuccagaauugcaccgccgugggcguccgccagcaaagauuuguguacgacgcuuaucagaaccugguagguuacuauagcgaugacgggaacuacuacugucuuagggccugcgugucaguuccggucagugugauuuaugauaaggagacuaagacacaugcaacguuguucggcuccguggccugugaacacaucucuagcaccaugucccaguacucacggagcacucgaaguaugcugaaacgcagagacucuacauauggaccccuccagaccccugucggcugcguucuggggcuuguaaauuccagccuguuuguggaggauuguaaguugccacucggacaaucgcugugcgcuuuacccgacacaccuucaacucugaccccagccucuguggguaguguccccggcgaaaugaggcuagcauccaucgcguucaaccacccgauucagguggaucagcucaauagcucuuacuuuaaacugagcauaccuacgaacuucuccuucgggguuacccaagaguauauccagacaacuauucagaaggugaccgucgacuguaaacaguacgugugcaauggauuucaaaagugcgaacagcuuuugcgggaguauggccaguucuguucaaagaucaaccaggcucugcauggugccaaucuccgccaagaugacaguguuagaaaccuguuugcaagcgugaaaucuucccagucaaguccaauuauccccggguucggcggagacuuuaauuuaacacugcuugagccuguaagcauauccacuggcucugggucggccggaagcgcuaucgaagaucuucucuucgacaaggucaccauugccgaucccggcuacaugcaggguuacgacgauugcaugcagcaagggccagcaucagcuagggaccugaucugugcccaguauguggcgggauacaaagugcuaccuccccugauggaugucaacauggaggccgcuuauacguccagucuccugggcucuauugccgguguuggcuggacagcagggcuuagcuccuuugcugccaucccauucgcacagucaauauuuuaccguuugaauggagugggcauuacccaacagguacugucugaaaaccagaaguuaaucgcgaauaaauucaaccaggcccucggggcuaugcaaacuggauuuacaaccacuaaugaggccuuccacaaggugcaggacgcagucaacaacaaugcucaggcccugagcaaguuggcaagugaacuguccaacaccuucggcgccauuagcgcuucuaucggugauauaauccagcgguuggacccgccugagcaagaugcgcagauugaccgacucaucaaugggagacugacaacgcuaaacgccuuuguggcacagcagcugguuaggucagaguccgcugcccucagugcccaacuggcuaaagauaaggugaaugaaugcgucaaagcacagagcaagcgcucgggauucuguggccaggguacccauauugugucuuuuguugugaacgcccccaauggccuuuauuucaugcacgucggguacuauccauccaaccauaucgagguagugagcgcguacggauugugcgacgcugccaaucccacuaacuguauagcaccuguuaauggcuacuuuauuaaaacaaacaauacccggaucguggacgaauggucauauacagggaguucuuucuacgccccagagcccaucacuucccugaacaccaaguaugucgcuccucaggugacguaccaaaauauuagcacaaacuuaccgccaccccuccugggaaacucaaccggcaucgauuuucaggacgagcuugaugaguucuuuaagaauguaaguacuagcauuccuaacuucgguucccugacccagauaaauacaacucuacucgaccugaccuaugaaauguugucucugcaacagguggucaaagcauuaaacgaaagcuacaucgaucucaaggagcuggggaauuauacauacggaggcuacauuccagaagcccccagagacggucaggcguauguuaggaaagauggcgagugggugcuucuguccacguuuugaggacuaguuauaagacugacuagcccgaugggccucccaacgggcccuccuccccuccuugcaccgagauuaauaaaaaaaaaaaaaaaaaaaaaaaaaaaaaaaaaaaaaaaaaaaaaaaaaaaaaaaaaaaaaaaaugcaucccccccccccccccccccccccccccccccaaaggcucuuuucagagccaccagaauu

SEQ ID NO: 14906 - protein, 1255 aa, Artificial Sequence
  SARS-CoV__P59594.1 spike protein (1-1255)
MFIFLLFLTLTSGSDLDRCTTFDDVQAPNYTQHTSSMRGVYYPDEIFRSDTLYLTQDLFLPFYSNVTGFHTINHTFGNPVIPFKDGIYFAATEKSNVVRGWVFGSTMNNKSQSVIIINNSTNVVIRACNFELCDNPFFAVSKPMGTQTHTMIFDNAFNCTFEYISDAFSLDVSEKSGNFKHLREFVFKNKDGFLYVYKGYQPIDVVRDLPSGFNTLKPIFKLPLGINITNFRAILTAFSPAQDIWGTSAAAYFVGYLKPTTFMLKYDENGTITDAVDCSQNPLAELKCSVKSFEIDKGIYQTSNFRVVPSGDVVRFPNITNLCPFGEVFNATKFPSVYAWERKKISNCVADYSVLYNSTFFSTFKCYGVSATKLNDLCFSNVYADSFVVKGDDVRQIAPGQTGVIADYNYKLPDDFMGCVLAWNTRNIDATSTGNYNYKYRYLRHGKLRPFERDISNVPFSPDGKPCTPPALNCYWPLNDYGFYTTTGIGYQPYRVVVLSFELLNAPATVCGPKLSTDLIKNQCVNFNFNGLTGTGVLTPSSKRFQPFQQFGRDVSDFTDSVRDPKTSEILDISPCSFGGVSVITPGTNASSEVAVLYQDVNCTDVSTAIHADQLTPAWRIYSTGNNVFQTQAGCLIGAEHVDTSYECDIPIGAGICASYHTVSLLRSTSQKSIVAYTMSLGADSSIAYSNNTIAIPTNFSISITTEVMPVSMAKTSVDCNMYICGDSTECANLLLQYGSFCTQLNRALSGIAAEQDRNTREVFAQVKQMYKTPTLKYFGGFNFSQILPDPLKPTKRSFIEDLLFNKVTLADAGFMKQYGECLGDINARDLICAQKFNGLTVLPPLLTDDMIAAYTAALVSGTATAGWTFGAGAALQIPFAMQMAYRFNGIGVTQNVLYENQKQIANQFNKAISQIQESLTTTSTALGKLQDVVNQNAQALNTLVKQLSSNFGAISSVLNDILSRLDKVEAEVQIDRLITGRLQSLQTYVTQQLIRAAEIRASANLAATKMSECVLGQSKRVDFCGKGYHLMSFPQAAPHGVVFLHVTYVPSQERNFTTAPAICHEGKAYFPREGVFVFNGTSWFITQRNFFSPQIITTDNTFVSGNCDVVIGIINNTVYDPLQPELDSFKEELDKYFKNHTSPDVDLGDISGINASVVNIQKEIDRLNEVAKNLNESLIDLQELGKYEQYIKWPWYVWLGFIAGLIAIVMVTILLCCMTSCCSCLKGACSCGSCCKFDEDDSEPVLKGVKLHYT

SEQ ID NO: 14907 - protein, 1255 aa, Artificial Sequence
  SARS-CoV__P59594.1 spike protein (1-1255)(K968P_V969P)
MFIFLLFLTLTSGSDLDRCTTFDDVQAPNYTQHTSSMRGVYYPDEIFRSDTLYLTQDLFLPFYSNVTGFHTINHTFGNPVIPFKDGIYFAATEKSNVVRGWVFGSTMNNKSQSVIIINNSTNVVIRACNFELCDNPFFAVSKPMGTQTHTMIFDNAFNCTFEYISDAFSLDVSEKSGNFKHLREFVFKNKDGFLYVYKGYQPIDVVRDLPSGFNTLKPIFKLPLGINITNFRAILTAFSPAQDIWGTSAAAYFVGYLKPTTFMLKYDENGTITDAVDCSQNPLAELKCSVKSFEIDKGIYQTSNFRVVPSGDVVRFPNITNLCPFGEVFNATKFPSVYAWERKKISNCVADYSVLYNSTFFSTFKCYGVSATKLNDLCFSNVYADSFVVKGDDVRQIAPGQTGVIADYNYKLPDDFMGCVLAWNTRNIDATSTGNYNYKYRYLRHGKLRPFERDISNVPFSPDGKPCTPPALNCYWPLNDYGFYTTTGIGYQPYRVVVLSFELLNAPATVCGPKLSTDLIKNQCVNFNFNGLTGTGVLTPSSKRFQPFQQFGRDVSDFTDSVRDPKTSEILDISPCSFGGVSVITPGTNASSEVAVLYQDVNCTDVSTAIHADQLTPAWRIYSTGNNVFQTQAGCLIGAEHVDTSYECDIPIGAGICASYHTVSLLRSTSQKSIVAYTMSLGADSSIAYSNNTIAIPTNFSISITTEVMPVSMAKTSVDCNMYICGDSTECANLLLQYGSFCTQLNRALSGIAAEQDRNTREVFAQVKQMYKTPTLKYFGGFNFSQILPDPLKPTKRSFIEDLLFNKVTLADAGFMKQYGECLGDINARDLICAQKFNGLTVLPPLLTDDMIAAYTAALVSGTATAGWTFGAGAALQIPFAMQMAYRFNGIGVTQNVLYENQKQIANQFNKAISQIQESLTTTSTALGKLQDVVNQNAQALNTLVKQLSSNFGAISSVLNDILSRLDPPEAEVQIDRLITGRLQSLQTYVTQQLIRAAEIRASANLAATKMSECVLGQSKRVDFCGKGYHLMSFPQAAPHGVVFLHVTYVPSQERNFTTAPAICHEGKAYFPREGVFVFNGTSWFITQRNFFSPQIITTDNTFVSGNCDVVIGIINNTVYDPLQPELDSFKEELDKYFKNHTSPDVDLGDISGINASVVNIQKEIDRLNEVAKNLNESLIDLQELGKYEQYIKWPWYVWLGFIAGLIAIVMVTILLCCMTSCCSCLKGACSCGSCCKFDEDDSEPVLKGVKLHYT

SEQ ID NO: 14908 - protein, 526 aa, Artificial Sequence
  SARS-CoV__P59594.1 spike protein (1-17_747-1255)
MFIFLLFLTLTSGSDLDRALSGIAAEQDRNTREVFAQVKQMYKTPTLKYFGGFNFSQILPDPLKPTKRSFIEDLLFNKVTLADAGFMKQYGECLGDINARDLICAQKFNGLTVLPPLLTDDMIAAYTAALVSGTATAGWTFGAGAALQIPFAMQMAYRFNGIGVTQNVLYENQKQIANQFNKAISQIQESLTTTSTALGKLQDVVNQNAQALNTLVKQLSSNFGAISSVLNDILSRLDKVEAEVQIDRLITGRLQSLQTYVTQQLIRAAEIRASANLAATKMSECVLGQSKRVDFCGKGYHLMSFPQAAPHGVVFLHVTYVPSQERNFTTAPAICHEGKAYFPREGVFVFNGTSWFITQRNFFSPQIITTDNTFVSGNCDVVIGIINNTVYDPLQPELDSFKEELDKYFKNHTSPDVDLGDISGINASVVNIQKEIDRLNEVAKNLNESLIDLQELGKYEQYIKWPWYVWLGFIAGLIAIVMVTILLCCMTSCCSCLKGACSCGSCCKFDEDDSEPVLKGVKLHYT

SEQ ID NO: 14909 - protein, 1255 aa, Artificial Sequence
  SARS-CoV/Tor2__NP_828851.1 spike protein (1-1255)
MFIFLLFLTLTSGSDLDRCTTFDDVQAPNYTQHTSSMRGVYYPDEIFRSDTLYLTQDLFLPFYSNVTGFHTINHTFGNPVIPFKDGIYFAATEKSNVVRGWVFGSTMNNKSQSVIIINNSTNVVIRACNFELCDNPFFAVSKPMGTQTHTMIFDNAFNCTFEYISDAFSLDVSEKSGNFKHLREFVFKNKDGFLYVYKGYQPIDVVRDLPSGFNTLKPIFKLPLGINITNFRAILTAFSPAQDIWGTSAAAYFVGYLKPTTFMLKYDENGTITDAVDCSQNPLAELKCSVKSFEIDKGIYQTSNFRVVPSGDVVRFPNITNLCPFGEVFNATKFPSVYAWERKKISNCVADYSVLYNSTFFSTFKCYGVSATKLNDLCFSNVYADSFVVKGDDVRQIAPGQTGVIADYNYKLPDDFMGCVLAWNTRNIDATSTGNYNYKYRYLRHGKLRPFERDISNVPFSPDGKPCTPPALNCYWPLNDYGFYTTTGIGYQPYRVVVLSFELLNAPATVCGPKLSTDLIKNQCVNFNFNGLTGTGVLTPSSKRFQPFQQFGRDVSDFTDSVRDPKTSEILDISPCAFGGVSVITPGTNASSEVAVLYQDVNCTDVSTAIHADQLTPAWRIYSTGNNVFQTQAGCLIGAEHVDTSYECDIPIGAGICASYHTVSLLRSTSQKSIVAYTMSLGADSSIAYSNNTIAIPTNFSISITTEVMPVSMAKTSVDCNMYICGDSTECANLLLQYGSFCTQLNRALSGIAAEQDRNTREVFAQVKQMYKTPTLKYFGGFNFSQILPDPLKPTKRSFIEDLLFNKVTLADAGFMKQYGECLGDINARDLICAQKFNGLTVLPPLLTDDMIAAYTAALVSGTATAGWTFGAGAALQIPFAMQMAYRFNGIGVTQNVLYENQKQIANQFNKAISQIQESLTTTSTALGKLQDVVNQNAQALNTLVKQLSSNFGAISSVLNDILSRLDKVEAEVQIDRLITGRLQSLQTYVTQQLIRAAEIRASANLAATKMSECVLGQSKRVDFCGKGYHLMSFPQAAPHGVVFLHVTYVPSQERNFTTAPAICHEGKAYFPREGVFVFNGTSWFITQRNFFSPQIITTDNTFVSGNCDVVIGIINNTVYDPLQPELDSFKEELDKYFKNHTSPDVDLGDISGINASVVNIQKEIDRLNEVAKNLNESLIDLQELGKYEQYIKWPWYVWLGFIAGLIAIVMVTILLCCMTSCCSCLKGACSCGSCCKFDEDDSEPVLKGVKLHYT

SEQ ID NO: 14910 - protein, 1255 aa, Artificial Sequence
  SARS-CoV/Tor2__NP_828851.1 spike protein (1-1255)(K968P_V969P)
MFIFLLFLTLTSGSDLDRCTTFDDVQAPNYTQHTSSMRGVYYPDEIFRSDTLYLTQDLFLPFYSNVTGFHTINHTFGNPVIPFKDGIYFAATEKSNVVRGWVFGSTMNNKSQSVIIINNSTNVVIRACNFELCDNPFFAVSKPMGTQTHTMIFDNAFNCTFEYISDAFSLDVSEKSGNFKHLREFVFKNKDGFLYVYKGYQPIDVVRDLPSGFNTLKPIFKLPLGINITNFRAILTAFSPAQDIWGTSAAAYFVGYLKPTTFMLKYDENGTITDAVDCSQNPLAELKCSVKSFEIDKGIYQTSNFRVVPSGDVVRFPNITNLCPFGEVFNATKFPSVYAWERKKISNCVADYSVLYNSTFFSTFKCYGVSATKLNDLCFSNVYADSFVVKGDDVRQIAPGQTGVIADYNYKLPDDFMGCVLAWNTRNIDATSTGNYNYKYRYLRHGKLRPFERDISNVPFSPDGKPCTPPALNCYWPLNDYGFYTTTGIGYQPYRVVVLSFELLNAPATVCGPKLSTDLIKNQCVNFNFNGLTGTGVLTPSSKRFQPFQQFGRDVSDFTDSVRDPKTSEILDISPCAFGGVSVITPGTNASSEVAVLYQDVNCTDVSTAIHADQLTPAWRIYSTGNNVFQTQAGCLIGAEHVDTSYECDIPIGAGICASYHTVSLLRSTSQKSIVAYTMSLGADSSIAYSNNTIAIPTNFSISITTEVMPVSMAKTSVDCNMYICGDSTECANLLLQYGSFCTQLNRALSGIAAEQDRNTREVFAQVKQMYKTPTLKYFGGFNFSQILPDPLKPTKRSFIEDLLFNKVTLADAGFMKQYGECLGDINARDLICAQKFNGLTVLPPLLTDDMIAAYTAALVSGTATAGWTFGAGAALQIPFAMQMAYRFNGIGVTQNVLYENQKQIANQFNKAISQIQESLTTTSTALGKLQDVVNQNAQALNTLVKQLSSNFGAISSVLNDILSRLDPPEAEVQIDRLITGRLQSLQTYVTQQLIRAAEIRASANLAATKMSECVLGQSKRVDFCGKGYHLMSFPQAAPHGVVFLHVTYVPSQERNFTTAPAICHEGKAYFPREGVFVFNGTSWFITQRNFFSPQIITTDNTFVSGNCDVVIGIINNTVYDPLQPELDSFKEELDKYFKNHTSPDVDLGDISGINASVVNIQKEIDRLNEVAKNLNESLIDLQELGKYEQYIKWPWYVWLGFIAGLIAIVMVTILLCCMTSCCSCLKGACSCGSCCKFDEDDSEPVLKGVKLHYT

SEQ ID NO: 14911 - protein, 1190 aa, Artificial Sequence
  SARS-CoV/Tor2__NP_828851.1 spike protein (variant)
MFIFLLFLTLTSGSDLDRCTTFDDVQAPNYTQHTSSMRGVYYPDEIFRSDTLYLTQDLFLPFYSNVTGFHTINHTFGNPVIPFKDGIYFAATEKSNVVRGWVFGSTMNNKSQSVIIINNSTNVVIRACNFELCDNPFFAVSKPMGTQTHTMIFDNAFNCTFEYISDAFSLDVSEKSGNFKHLREFVFKNKDGFLYVYKGYQPIDVVRDLPSGFNTLKPIFKLPLGINITNFRAILTAFSPAQDIWGTSAAAYFVGYLKPTTFMLKYDENGTITDAVDCSQNPLAELKCSVKSFEIDKGIYQTSNFRVVPSGDVVRFPNITNLCPFGEVFNATKFPSVYAWERKKISNCVADYSVLYNSTFFSTFKCYGVSATKLNDLCFSNVYADSFVVKGDDVRQIAPGQTGVIADYNYKLPDDFMGCVLAWNTRNIDATSTGNYNYKYRYLRHGKLRPFERDISNVPFSPDGKPCTPPALNCYWPLNDYGFYTTTGIGYQPYRVVVLSFELLNAPATVCGPKLSTDLIKNQCVNFNFNGLTGTGVLTPSSKRFQPFQQFGRDVSDFTDSVRDPKTSEILDISPCAFGGVSVITPGTNASSEVAVLYQDVNCTDVSTAIHADQLTPAWRIYSTGNNVFQTQAGCLIGAEHVDTSYECDIPIGAGICASYHTVSLLRSTSQKSIVAYTMSLGADSSIAYSNNTIAIPTNFSISITTEVMPVSMAKTSVDCNMYICGDSTECANLLLQYGSFCTQLNRALSGIAAEQDRNTREVFAQVKQMYKTPTLKYFGGFNFSQILPDPLKPTKRSFIEDLLFNKVTLADAGFMKQYGECLGDINARDLICAQKFNGLTVLPPLLTDDMIAAYTAALVSGTATAGWTFGAGAALQIPFAMQMAYRFNGIGVTQNVLYENQKQIANQFNKAISQIQESLTTTSTALGKLQDVVNQNAQALNTLVKQLSSNFGAISSVLNDILSRLDPPEAEVQIDRLITGRLQSLQTYVTQQLIRAAEIRASANLAATKMSECVLGQSKRVDFCGKGYHLMSFPQAAPHGVVFLHVTYVPSQERNFTTAPAICHEGKAYFPREGVFVFNGTSWFITQRNFFSPQIITTDNTFVSGNCDVVIGIINNTVYDPLQPELDSFKEELDKYFKNHTSPDVDLGDISGINASVVNIQKEIDRLNEVAKNLNESLIDLQELGKYEQ

SEQ ID NO: 14912 - protein, 1217 aa, Artificial Sequence
  SARS-CoV/Tor2__NP_828851.1 spike protein (variant)
MFIFLLFLTLTSGSDLDRCTTFDDVQAPNYTQHTSSMRGVYYPDEIFRSDTLYLTQDLFLPFYSNVTGFHTINHTFGNPVIPFKDGIYFAATEKSNVVRGWVFGSTMNNKSQSVIIINNSTNVVIRACNFELCDNPFFAVSKPMGTQTHTMIFDNAFNCTFEYISDAFSLDVSEKSGNFKHLREFVFKNKDGFLYVYKGYQPIDVVRDLPSGFNTLKPIFKLPLGINITNFRAILTAFSPAQDIWGTSAAAYFVGYLKPTTFMLKYDENGTITDAVDCSQNPLAELKCSVKSFEIDKGIYQTSNFRVVPSGDVVRFPNITNLCPFGEVFNATKFPSVYAWERKKISNCVADYSVLYNSTFFSTFKCYGVSATKLNDLCFSNVYADSFVVKGDDVRQIAPGQTGVIADYNYKLPDDFMGCVLAWNTRNIDATSTGNYNYKYRYLRHGKLRPFERDISNVPFSPDGKPCTPPALNCYWPLNDYGFYTTTGIGYQPYRVVVLSFELLNAPATVCGPKLSTDLIKNQCVNFNFNGLTGTGVLTPSSKRFQPFQQFGRDVSDFTDSVRDPKTSEILDISPCAFGGVSVITPGTNASSEVAVLYQDVNCTDVSTAIHADQLTPAWRIYSTGNNVFQTQAGCLIGAEHVDTSYECDIPIGAGICASYHTVSLLRSTSQKSIVAYTMSLGADSSIAYSNNTIAIPTNFSISITTEVMPVSMAKTSVDCNMYICGDSTECANLLLQYGSFCTQLNRALSGIAAEQDRNTREVFAQVKQMYKTPTLKYFGGFNFSQILPDPLKPTKRSFIEDLLFNKVTLADAGFMKQYGECLGDINARDLICAQKFNGLTVLPPLLTDDMIAAYTAALVSGTATAGWTFGAGAALQIPFAMQMAYRFNGIGVTQNVLYENQKQIANQFNKAISQIQESLTTTSTALGKLQDVVNQNAQALNTLVKQLSSNFGAISSVLNDILSRLDPPEAEVQIDRLITGRLQSLQTYVTQQLIRAAEIRASANLAATKMSECVLGQSKRVDFCGKGYHLMSFPQAAPHGVVFLHVTYVPSQERNFTTAPAICHEGKAYFPREGVFVFNGTSWFITQRNFFSPQIITTDNTFVSGNCDVVIGIINNTVYDPLQPELDSFKEELDKYFKNHTSPDVDLGDISGINASVVNIQKEIDRLNEVAKNLNESLIDLQELGKYEQGGYIPEAPRDGQAYVRKDGEWVLLSTF

SEQ ID NO: 14913 - protein, 1353 aa, Artificial Sequence
  HCoV/OC43__P36334.1 spike protein (1-1353)
MFLILLISLPTAFAVIGDLKCTSDNINDKDTGPPPISTDTVDVTNGLGTYYVLDRVYLNTTLFLNGYYPTSGSTYRNMALKGSVLLSRLWFKPPFLSDFINGIFAKVKNTKVIKDRVMYSEFPAITIGSTFVNTSYSVVVQPRTINSTQDGDNKLQGLLEVSVCQYNMCEYPQTICHPNLGNHRKELWHLDTGVVSCLYKRNFTYDVNADYLYFHFYQEGGTFYAYFTDTGVVTKFLFNVYLGMALSHYYVMPLTCNSKLTLEYWVTPLTSRQYLLAFNQDGIIFNAEDCMSDFMSEIKCKTQSIAPPTGVYELNGYTVQPIADVYRRKPNLPNCNIEAWLNDKSVPSPLNWERKTFSNCNFNMSSLMSFIQADSFTCNNIDAAKIYGMCFSSITIDKFAIPNGRKVDLQLGNLGYLQSFNYRIDTTATSCQLYYNLPAANVSVSRFNPSTWNKRFGFIEDSVFKPRPAGVLTNHDVVYAQHCFKAPKNFCPCKLNGSCVGSGPGKNNGIGTCPAGTNYLTCDNLCTPDPITFTGTYKCPQTKSLVGIGEHCSGLAVKSDYCGGNSCTCRPQAFLGWSADSCLQGDKCNIFANFILHDVNSGLTCSTDLQKANTDIILGVCVNYDLYGILGQGIFVEVNATYYNSWQNLLYDSNGNLYGFRDYIINRTFMIRSCYSGRVSAAFHANSSEPALLFRNIKCNYVFNNSLTRQLQPINYFDSYLGCVVNAYNSTAISVQTCDLTVGSGYCVDYSKNRRSRGAITTGYRFTNFEPFTVNSVNDSLEPVGGLYEIQIPSEFTIGNMVEFIQTSSPKVTIDCAAFVCGDYAACKSQLVEYGSFCDNINAILTEVNELLDTTQLQVANSLMNGVTLSTKLKDGVNFNVDDINFSPVLGCLGSECSKASSRSAIEDLLFDKVKLSDVGFVEAYNNCTGGAEIRDLICVQSYKGIKVLPPLLSENQISGYTLAATSASLFPPWTAAAGVPFYLNVQYRINGLGVTMDVLSQNQKLIANAFNNALYAIQEGFDATNSALVKIQAVVNANAEALNNLLQQLSNRFGAISASLQEILSRLDALEAEAQIDRLINGRLTALNAYVSQQLSDSTLVKFSAAQAMEKVNECVKSQSSRINFCGNGNHIISLVQNAPYGLYFIHFSYVPTKYVTARVSPGLCIAGDRGIAPKSGYFVNVNNTWMYTGSGYYYPEPITENNVVVMSTCAVNYTKAPYVMLNTSIPNLPDFKEELDQWFKNQTSVAPDLSLDYINVTFLDLQVEMNRLQEAIKVLNQSYINLKDIGTYEYYVKWPWYVWLLICLAGVAMLVLLFFICCCTGCGTSCFKKCGGCCDDYTGYQELVIKTSHDD

SEQ ID NO: 14914 - protein, 1353 aa, Artificial Sequence
  HCoV/OC43__P36334.1 spike protein (1-1353)(A1070P_L1071P)
MFLILLISLPTAFAVIGDLKCTSDNINDKDTGPPPISTDTVDVTNGLGTYYVLDRVYLNTTLFLNGYYPTSGSTYRNMALKGSVLLSRLWFKPPFLSDFINGIFAKVKNTKVIKDRVMYSEFPAITIGSTFVNTSYSVVVQPRTINSTQDGDNKLQGLLEVSVCQYNMCEYPQTICHPNLGNHRKELWHLDTGVVSCLYKRNFTYDVNADYLYFHFYQEGGTFYAYFTDTGVVTKFLFNVYLGMALSHYYVMPLTCNSKLTLEYWVTPLTSRQYLLAFNQDGIIFNAEDCMSDFMSEIKCKTQSIAPPTGVYELNGYTVQPIADVYRRKPNLPNCNIEAWLNDKSVPSPLNWERKTFSNCNFNMSSLMSFIQADSFTCNNIDAAKIYGMCFSSITIDKFAIPNGRKVDLQLGNLGYLQSFNYRIDTTATSCQLYYNLPAANVSVSRFNPSTWNKRFGFIEDSVFKPRPAGVLTNHDVVYAQHCFKAPKNFCPCKLNGSCVGSGPGKNNGIGTCPAGTNYLTCDNLCTPDPITFTGTYKCPQTKSLVGIGEHCSGLAVKSDYCGGNSCTCRPQAFLGWSADSCLQGDKCNIFANFILHDVNSGLTCSTDLQKANTDIILGVCVNYDLYGILGQGIFVEVNATYYNSWQNLLYDSNGNLYGFRDYIINRTFMIRSCYSGRVSAAFHANSSEPALLFRNIKCNYVFNNSLTRQLQPINYFDSYLGCVVNAYNSTAISVQTCDLTVGSGYCVDYSKNRRSRGAITTGYRFTNFEPFTVNSVNDSLEPVGGLYEIQIPSEFTIGNMVEFIQTSSPKVTIDCAAFVCGDYAACKSQLVEYGSFCDNINAILTEVNELLDTTQLQVANSLMNGVTLSTKLKDGVNFNVDDINFSPVLGCLGSECSKASSRSAIEDLLFDKVKLSDVGFVEAYNNCTGGAEIRDLICVQSYKGIKVLPPLLSENQISGYTLAATSASLFPPWTAAAGVPFYLNVQYRINGLGVTMDVLSQNQKLIANAFNNALYAIQEGFDATNSALVKIQAVVNANAEALNNLLQQLSNRFGAISASLQEILSRLDPPEAEAQIDRLINGRLTALNAYVSQQLSDSTLVKFSAAQAMEKVNECVKSQSSRINFCGNGNHIISLVQNAPYGLYFIHFSYVPTKYVTARVSPGLCIAGDRGIAPKSGYFVNVNNTWMYTGSGYYYPEPITENNVVVMSTCAVNYTKAPYVMLNTSIPNLPDFKEELDQWFKNQTSVAPDLSLDYINVTFLDLQVEMNRLQEAIKVLNQSYINLKDIGTYEYYVKWPWYVWLLICLAGVAMLVLLFFICCCTGCGTSCFKKCGGCCDDYTGYQELVIKTSHDD

SEQ ID NO: 14915 - protein, 1362 aa, Artificial Sequence
  HCoV/OC43/1783A_10__AIL49484.1 spike protein (1-1362)
MFLILLISLPTAFAVIGDLKCPLDSRTGSLNNIDTGPPSISTATVDVTNGLGTYYVLDRVYLNTTLFLNGYYPTSGSTYRNMALKGTDKLSTLWFKPPFLSDFINGIFAKVKNTKVFKDGVMYSEFPAITIGSTFVNTSYSVVVQPRTINSTQDGVNKLQGLLEVSVCQYNMCEYPHTICHPKLGNHFKELWHMDTGVVSCLYKRNFTYDVNATYLYFHFYQEGGTFYAYFTDTGVVTKFLFNVYLGMALSHYYVMPLTCISRRDIGFTLEYWVTPLTSRQYLLAFNQDGIIFNAVDCMSDFMSEIKCKTQSIAPPTGVYELNGYTVQPIADVYRRKPDLPNCNIEAWLNDKSVPSPLNWERKTFSNCNFNMSSLMSFIQADSFTCNNIDAAKIYGMCFSSITIDKFAIPNGRKVDLQLGNLGYLQSFNYRIDTTATSCQLYYNLPAANVSVSRFNPSTWNKRFGFIENSVFKPQPAGVLTNHDVVYAQHCFKAPKNFCPCKLNSSLCVGSGPGKNNGIGTCPAGTNYLTCHNLCNPDPITFTGPYKCPQTKSLVGIGEHCSGLAVKSDYCGGNPCTCQPQAFLGWSADSCLQGDKCNIFANLILHDVNSGLTCSTDLQKANTDIKLGVCVNYDLYGISGQGIFVEVNATYYNSWQNLLYDSNGNLYGFRDYITNRTFMIRSCYSGRVSAAFHANSSEPALLFRNIKCNYVFNNSLIRQLQPINYFDSYLGCVVNAYNSTAISVQTCDLTVGSGYCVDYSKNRRSRRAITTGYRFTNFEPFTVNSVNDSLEPVGGLYEIQIPSEFTIGNMEEFIQTSSPKVTIDCAAFVCGDYAACKSQLVEYGSFCDNINAILTEVNELLDTTQLQVANSLMNGVTLSTKLKDGVNFNVDDINFSSVLGCLGSECSKASSRSAIEDLLFDKVKLSDVGFVAAYNNCTGGAEIRDLICVQSYKGIKVLPPLLSENQISGYTLAATSASLFPPWTAAAGVPFYLNVQYRINGLGVTMDVLSQNQKLIANAFNNALDAIQEGFDATNSALVKIQAVVNANAEALNNLLQQLSNRFGAISSSLQEILSRLDALEAEAQIDRLINGRLTALNAYVSQQLSDSTLVKFSAAQAMEKVNECVKSQSSRINFCGNGNHIISLVQNAPYGLYFIHFSYVPTKYVTAKVSPGLCIAGDRGIAPKSGYFVNVNNTWMYTGSGYYYPEPITENNVVVMSTCAVNYTKAPYVMLNTSTPNLPDFREELDQWFKNQTSVAPDLSLDYINVTFLDLQVEMNRLQEAIKVLNQSYINLKDIGTYEYYVKWPWYVWLLIGLAGVAMLVLLFFICCCTGCGTSCFKKCGGCCDDYTGYQELVIKTSHDD

SEQ ID NO: 14916 - protein, 1362 aa, Artificial Sequence
  HCoV/OC43/1783A_10__AIL49484.1 spike protein (1-1362)(A1079P_L1080P)
MFLILLISLPTAFAVIGDLKCPLDSRTGSLNNIDTGPPSISTATVDVTNGLGTYYVLDRVYLNTTLFLNGYYPTSGSTYRNMALKGTDKLSTLWFKPPFLSDFINGIFAKVKNTKVFKDGVMYSEFPAITIGSTFVNTSYSVVVQPRTINSTQDGVNKLQGLLEVSVCQYNMCEYPHTICHPKLGNHFKELWHMDTGVVSCLYKRNFTYDVNATYLYFHFYQEGGTFYAYFTDTGVVTKFLFNVYLGMALSHYYVMPLTCISRRDIGFTLEYWVTPLTSRQYLLAFNQDGIIFNAVDCMSDFMSEIKCKTQSIAPPTGVYELNGYTVQPIADVYRRKPDLPNCNIEAWLNDKSVPSPLNWERKTFSNCNFNMSSLMSFIQADSFTCNNIDAAKIYGMCFSSITIDKFAIPNGRKVDLQLGNLGYLQSFNYRIDTTATSCQLYYNLPAANVSVSRFNPSTWNKRFGFIENSVFKPQPAGVLTNHDVVYAQHCFKAPKNFCPCKLNSSLCVGSGPGKNNGIGTCPAGTNYLTCHNLCNPDPITFTGPYKCPQTKSLVGIGEHCSGLAVKSDYCGGNPCTCQPQAFLGWSADSCLQGDKCNIFANLILHDVNSGLTCSTDLQKANTDIKLGVCVNYDLYGISGQGIFVEVNATYYNSWQNLLYDSNGNLYGFRDYITNRTFMIRSCYSGRVSAAFHANSSEPALLFRNIKCNYVFNNSLIRQLQPINYFDSYLGCVVNAYNSTAISVQTCDLTVGSGYCVDYSKNRRSRRAITTGYRFTNFEPFTVNSVNDSLEPVGGLYEIQIPSEFTIGNMEEFIQTSSPKVTIDCAAFVCGDYAACKSQLVEYGSFCDNINAILTEVNELLDTTQLQVANSLMNGVTLSTKLKDGVNFNVDDINFSSVLGCLGSECSKASSRSAIEDLLFDKVKLSDVGFVAAYNNCTGGAEIRDLICVQSYKGIKVLPPLLSENQISGYTLAATSASLFPPWTAAAGVPFYLNVQYRINGLGVTMDVLSQNQKLIANAFNNALDAIQEGFDATNSALVKIQAVVNANAEALNNLLQQLSNRFGAISSSLQEILSRLDPPEAEAQIDRLINGRLTALNAYVSQQLSDSTLVKFSAAQAMEKVNECVKSQSSRINFCGNGNHIISLVQNAPYGLYFIHFSYVPTKYVTAKVSPGLCIAGDRGIAPKSGYFVNVNNTWMYTGSGYYYPEPITENNVVVMSTCAVNYTKAPYVMLNTSTPNLPDFREELDQWFKNQTSVAPDLSLDYINVTFLDLQVEMNRLQEAIKVLNQSYINLKDIGTYEYYVKWPWYVWLLIGLAGVAMLVLLFFICCCTGCGTSCFKKCGGCCDDYTGYQELVIKTSHDD

SEQ ID NO: 14917 - protein, 1287 aa, Artificial Sequence
  HCoV/OC43/1783A_10__AIL49484.1 spike protein (variant)
MFLILLISLPTAFAVIGDLKCPLDSRTGSLNNIDTGPPSISTATVDVTNGLGTYYVLDRVYLNTTLFLNGYYPTSGSTYRNMALKGTDKLSTLWFKPPFLSDFINGIFAKVKNTKVFKDGVMYSEFPAITIGSTFVNTSYSVVVQPRTINSTQDGVNKLQGLLEVSVCQYNMCEYPHTICHPKLGNHFKELWHMDTGVVSCLYKRNFTYDVNATYLYFHFYQEGGTFYAYFTDTGVVTKFLFNVYLGMALSHYYVMPLTCISRRDIGFTLEYWVTPLTSRQYLLAFNQDGIIFNAVDCMSDFMSEIKCKTQSIAPPTGVYELNGYTVQPIADVYRRKPDLPNCNIEAWLNDKSVPSPLNWERKTFSNCNFNMSSLMSFIQADSFTCNNIDAAKIYGMCFSSITIDKFAIPNGRKVDLQLGNLGYLQSFNYRIDTTATSCQLYYNLPAANVSVSRFNPSTWNKRFGFIENSVFKPQPAGVLTNHDVVYAQHCFKAPKNFCPCKLNSSLCVGSGPGKNNGIGTCPAGTNYLTCHNLCNPDPITFTGPYKCPQTKSLVGIGEHCSGLAVKSDYCGGNPCTCQPQAFLGWSADSCLQGDKCNIFANLILHDVNSGLTCSTDLQKANTDIKLGVCVNYDLYGISGQGIFVEVNATYYNSWQNLLYDSNGNLYGFRDYITNRTFMIRSCYSGRVSAAFHANSSEPALLFRNIKCNYVFNNSLIRQLQPINYFDSYLGCVVNAYNSTAISVQTCDLTVGSGYCVDYSKNGGSGSAITTGYRFTNFEPFTVNSVNDSLEPVGGLYEIQIPSEFTIGNMEEFIQTSSPKVTIDCAAFVCGDYAACKSQLVEYGSFCDNINAILTEVNELLDTTQLQVANSLMNGVTLSTKLKDGVNFNVDDINFSSVLGCLGSECSKASSRSAIEDLLFDKVKLSDVGFVAAYNNCTGGAEIRDLICVQSYKGIKVLPPLLSENQISGYTLAATSASLFPPWTAAAGVPFYLNVQYRINGLGVTMDVLSQNQKLIANAFNNALDAIQEGFDATNSALVKIQAVVNANAEALNNLLQQLSNRFGAISSSLQEILSRLDPPEAEAQIDRLINGRLTALNAYVSQQLSDSTLVKFSAAQAMEKVNECVKSQSSRINFCGNGNHIISLVQNAPYGLYFIHFSYVPTKYVTAKVSPGLCIAGDRGIAPKSGYFVNVNNTWMYTGSGYYYPEPITENNVVVMSTCAVNYTKAPYVMLNTSTPNLPDFREELDQWFKNQTSVAPDLSLDYINVTFLDLQVEMNRLQEAIKVLN

SEQ ID NO: 14918 - protein, 1314 aa, Artificial Sequence
  HCoV/OC43/1783A_10__AIL49484.1 spike protein (variant)
MFLILLISLPTAFAVIGDLKCPLDSRTGSLNNIDTGPPSISTATVDVTNGLGTYYVLDRVYLNTTLFLNGYYPTSGSTYRNMALKGTDKLSTLWFKPPFLSDFINGIFAKVKNTKVFKDGVMYSEFPAITIGSTFVNTSYSVVVQPRTINSTQDGVNKLQGLLEVSVCQYNMCEYPHTICHPKLGNHFKELWHMDTGVVSCLYKRNFTYDVNATYLYFHFYQEGGTFYAYFTDTGVVTKFLFNVYLGMALSHYYVMPLTCISRRDIGFTLEYWVTPLTSRQYLLAFNQDGIIFNAVDCMSDFMSEIKCKTQSIAPPTGVYELNGYTVQPIADVYRRKPDLPNCNIEAWLNDKSVPSPLNWERKTFSNCNFNMSSLMSFIQADSFTCNNIDAAKIYGMCFSSITIDKFAIPNGRKVDLQLGNLGYLQSFNYRIDTTATSCQLYYNLPAANVSVSRFNPSTWNKRFGFIENSVFKPQPAGVLTNHDVVYAQHCFKAPKNFCPCKLNSSLCVGSGPGKNNGIGTCPAGTNYLTCHNLCNPDPITFTGPYKCPQTKSLVGIGEHCSGLAVKSDYCGGNPCTCQPQAFLGWSADSCLQGDKCNIFANLILHDVNSGLTCSTDLQKANTDIKLGVCVNYDLYGISGQGIFVEVNATYYNSWQNLLYDSNGNLYGFRDYITNRTFMIRSCYSGRVSAAFHANSSEPALLFRNIKCNYVFNNSLIRQLQPINYFDSYLGCVVNAYNSTAISVQTCDLTVGSGYCVDYSKNGGSGSAITTGYRFTNFEPFTVNSVNDSLEPVGGLYEIQIPSEFTIGNMEEFIQTSSPKVTIDCAAFVCGDYAACKSQLVEYGSFCDNINAILTEVNELLDTTQLQVANSLMNGVTLSTKLKDGVNFNVDDINFSSVLGCLGSECSKASSRSAIEDLLFDKVKLSDVGFVAAYNNCTGGAEIRDLICVQSYKGIKVLPPLLSENQISGYTLAATSASLFPPWTAAAGVPFYLNVQYRINGLGVTMDVLSQNQKLIANAFNNALDAIQEGFDATNSALVKIQAVVNANAEALNNLLQQLSNRFGAISSSLQEILSRLDPPEAEAQIDRLINGRLTALNAYVSQQLSDSTLVKFSAAQAMEKVNECVKSQSSRINFCGNGNHIISLVQNAPYGLYFIHFSYVPTKYVTAKVSPGLCIAGDRGIAPKSGYFVNVNNTWMYTGSGYYYPEPITENNVVVMSTCAVNYTKAPYVMLNTSTPNLPDFREELDQWFKNQTSVAPDLSLDYINVTFLDLQVEMNRLQEAIKVLNGGYIPEAPRDGQAYVRKDGEWVLLSTF

SEQ ID NO: 14919 - protein, 1351 aa, Artificial Sequence
  HCoV/HKU1/N5__Q0ZME7.1 spike protein (1-1351)
MFLIIFILPTTLAVIGDFNCTNSFINDYNKTIPRISEDVVDVSLGLGTYYVLNRVYLNTTLLFTGYFPKSGANFRDLALKGSIYLSTLWYKPPFLSDFNNGIFSKVKNTKLYVNNTLYSEFSTIVIGSVFVNTSYTIVVQPHNGILEITACQYTMCEYPHTVCKSKGSIRNESWHIDSSEPLCLFKKNFTYNVSADWLYFHFYQERGVFYAYYADVGMPTTFLFSLYLGTILSHYYVMPLTCNAISSNTDNETLEYWVTPLSRRQYLLNFDEHGVITNAVDCSSSFLSEIQCKTQSFAPNTGVYDLSGFTVKPVATVYRRIPNLPDCDIDNWLNNVSVPSPLNWERRIFSNCNFNLSTLLRLVHVDSFSCNNLDKSKIFGSCFNSITVDKFAIPNRRRDDLQLGSSGFLQSSNYKIDISSSSCQLYYSLPLVNVTINNFNPSSWNRRYGFGSFNLSSYDVVYSDHCFSVNSDFCPCADPSVVNSCAKSKPPSAICPAGTKYRHCDLDTTLYVKNWCRCSCLPDPISTYSPNTCPQKKVVVGIGEHCPGLGINEEKCGTQLNHSSCFCSPDAFLGWSFDSCISNNRCNIFSNFIFNGINSGTTCSNDLLYSNTEISTGVCVNYDLYGITGQGIFKEVSAAYYNNWQNLLYDSNGNIIGFKDFLTNKTYTILPCYSGRVSAAFYQNSSSPALLYRNLKCSYVLNNISFISQPFYFDSYLGCVLNAVNLTSYSVSSCDLRMGSGFCIDYALPSSRRKRRGISSPYRFVTFEPFNVSFVNDSVETVGGLFEIQIPTNFTIAGHEEFIQTSSPKVTIDCSAFVCSNYAACHDLLSEYGTFCDNINSILNEVNDLLDITQLQVANALMQGVTLSSNLNTNLHSDVDNIDFKSLLGCLGSQCGSSSRSLLEDLLFNKVKLSDVGFVEAYNNCTGGSEIRDLLCVQSFNGIKVLPPILSETQISGYTTAATVAAMFPPWSAAAGVPFSLNVQYRINGLGVTMDVLNKNQKLIANAFNKALLSIQNGFTATNSALAKIQSVVNANAQALNSLLQQLFNKFGAISSSLQEILSRLDNLEAQVQIDRLINGRLTALNAYVSQQLSDITLIKAGASRAIEKVNECVKSQSPRINFCGNGNHILSLVQNAPYGLLFIHFSYKPTSFKTVLVSPGLCLSGDRGIAPKQGYFIKQNDSWMFTGSSYYYPEPISDKNVVFMNSCSVNFTKAPFIYLNNSIPNLSDFEAELSLWFKNHTSIAPNLTFNSHINATFLDLYYEMNVIQESIKSLNSSFINLKEIGTYEMYVKWPWYIWLLIVILFIIFLMILFFICCCTGCGSACFSKCHNCCDEYGGHNDFVIKASHDD

SEQ ID NO: 14920 - protein, 1351 aa, Artificial Sequence
  HCoV/HKU1/N5__Q0ZME7.1 spike protein (1-1351)(N1067P_L1068P)
MFLIIFILPTTLAVIGDFNCTNSFINDYNKTIPRISEDVVDVSLGLGTYYVLNRVYLNTTLLFTGYFPKSGANFRDLALKGSIYLSTLWYKPPFLSDFNNGIFSKVKNTKLYVNNTLYSEFSTIVIGSVFVNTSYTIVVQPHNGILEITACQYTMCEYPHTVCKSKGSIRNESWHIDSSEPLCLFKKNFTYNVSADWLYFHFYQERGVFYAYYADVGMPTTFLFSLYLGTILSHYYVMPLTCNAISSNTDNETLEYWVTPLSRRQYLLNFDEHGVITNAVDCSSSFLSEIQCKTQSFAPNTGVYDLSGFTVKPVATVYRRIPNLPDCDIDNWLNNVSVPSPLNWERRIFSNCNFNLSTLLRLVHVDSFSCNNLDKSKIFGSCFNSITVDKFAIPNRRRDDLQLGSSGFLQSSNYKIDISSSSCQLYYSLPLVNVTINNFNPSSWNRRYGFGSFNLSSYDVVYSDHCFSVNSDFCPCADPSVVNSCAKSKPPSAICPAGTKYRHCDLDTTLYVKNWCRCSCLPDPISTYSPNTCPQKKVVVGIGEHCPGLGINEEKCGTQLNHSSCFCSPDAFLGWSFDSCISNNRCNIFSNFIFNGINSGTTCSNDLLYSNTEISTGVCVNYDLYGITGQGIFKEVSAAYYNNWQNLLYDSNGNIIGFKDFLTNKTYTILPCYSGRVSAAFYQNSSSPALLYRNLKCSYVLNNISFISQPFYFDSYLGCVLNAVNLTSYSVSSCDLRMGSGFCIDYALPSSRRKRRGISSPYRFVTFEPFNVSFVNDSVETVGGLFEIQIPTNFTIAGHEEFIQTSSPKVTIDCSAFVCSNYAACHDLLSEYGTFCDNINSILNEVNDLLDITQLQVANALMQGVTLSSNLNTNLHSDVDNIDFKSLLGCLGSQCGSSSRSLLEDLLFNKVKLSDVGFVEAYNNCTGGSEIRDLLCVQSFNGIKVLPPILSETQISGYTTAATVAAMFPPWSAAAGVPFSLNVQYRINGLGVTMDVLNKNQKLIANAFNKALLSIQNGFTATNSALAKIQSVVNANAQALNSLLQQLFNKFGAISSSLQEILSRLDPPEAQVQIDRLINGRLTALNAYVSQQLSDITLIKAGASRAIEKVNECVKSQSPRINFCGNGNHILSLVQNAPYGLLFIHFSYKPTSFKTVLVSPGLCLSGDRGIAPKQGYFIKQNDSWMFTGSSYYYPEPISDKNVVFMNSCSVNFTKAPFIYLNNSIPNLSDFEAELSLWFKNHTSIAPNLTFNSHINATFLDLYYEMNVIQESIKSLNSSFINLKEIGTYEMYVKWPWYIWLLIVILFIIFLMILFFICCCTGCGSACFSKCHNCCDEYGGHNDFVIKASHDD

SEQ ID NO: 14921 - protein, 1276 aa, Artificial Sequence
  HCoV/HKU1/N5__Q0ZME7.1 spike protein (variant)
MFLIIFILPTTLAVIGDFNCTNSFINDYNKTIPRISEDVVDVSLGLGTYYVLNRVYLNTTLLFTGYFPKSGANFRDLALKGSIYLSTLWYKPPFLSDFNNGIFSKVKNTKLYVNNTLYSEFSTIVIGSVFVNTSYTIVVQPHNGILEITACQYTMCEYPHTVCKSKGSIRNESWHIDSSEPLCLFKKNFTYNVSADWLYFHFYQERGVFYAYYADVGMPTTFLFSLYLGTILSHYYVMPLTCNAISSNTDNETLEYWVTPLSRRQYLLNFDEHGVITNAVDCSSSFLSEIQCKTQSFAPNTGVYDLSGFTVKPVATVYRRIPNLPDCDIDNWLNNVSVPSPLNWERRIFSNCNFNLSTLLRLVHVDSFSCNNLDKSKIFGSCFNSITVDKFAIPNRRRDDLQLGSSGFLQSSNYKIDISSSSCQLYYSLPLVNVTINNFNPSSWNRRYGFGSFNLSSYDVVYSDHCFSVNSDFCPCADPSVVNSCAKSKPPSAICPAGTKYRHCDLDTTLYVKNWCRCSCLPDPISTYSPNTCPQKKVVVGIGEHCPGLGINEEKCGTQLNHSSCFCSPDAFLGWSFDSCISNNRCNIFSNFIFNGINSGTTCSNDLLYSNTEISTGVCVNYDLYGITGQGIFKEVSAAYYNNWQNLLYDSNGNIIGFKDFLTNKTYTILPCYSGRVSAAFYQNSSSPALLYRNLKCSYVLNNISFISQPFYFDSYLGCVLNAVNLTSYSVSSCDLRMGSGFCIDYALPSSGGSGSGISSPYRFVTFEPFNVSFVNDSVETVGGLFEIQIPTNFTIAGHEEFIQTSSPKVTIDCSAFVCSNYAACHDLLSEYGTFCDNINSILNEVNDLLDITQLQVANALMQGVTLSSNLNTNLHSDVDNIDFKSLLGCLGSQCGSSSRSLLEDLLFNKVKLSDVGFVEAYNNCTGGSEIRDLLCVQSFNGIKVLPPILSETQISGYTTAATVAAMFPPWSAAAGVPFSLNVQYRINGLGVTMDVLNKNQKLIANAFNKALLSIQNGFTATNSALAKIQSVVNANAQALNSLLQQLFNKFGAISSSLQEILSRLDPPEAQVQIDRLINGRLTALNAYVSQQLSDITLIKAGASRAIEKVNECVKSQSPRINFCGNGNHILSLVQNAPYGLLFIHFSYKPTSFKTVLVSPGLCLSGDRGIAPKQGYFIKQNDSWMFTGSSYYYPEPISDKNVVFMNSCSVNFTKAPFIYLNNSIPNLSDFEAELSLWFKNHTSIAPNLTFNSHINATFLDLYYEMNVIQESIKSLN

SEQ ID NO: 14922 - protein, 1303 aa, Artificial Sequence
  HCoV/HKU1/N5__Q0ZME7.1 spike protein (variant)
MFLIIFILPTTLAVIGDFNCTNSFINDYNKTIPRISEDVVDVSLGLGTYYVLNRVYLNTTLLFTGYFPKSGANFRDLALKGSIYLSTLWYKPPFLSDFNNGIFSKVKNTKLYVNNTLYSEFSTIVIGSVFVNTSYTIVVQPHNGILEITACQYTMCEYPHTVCKSKGSIRNESWHIDSSEPLCLFKKNFTYNVSADWLYFHFYQERGVFYAYYADVGMPTTFLFSLYLGTILSHYYVMPLTCNAISSNTDNETLEYWVTPLSRRQYLLNFDEHGVITNAVDCSSSFLSEIQCKTQSFAPNTGVYDLSGFTVKPVATVYRRIPNLPDCDIDNWLNNVSVPSPLNWERRIFSNCNFNLSTLLRLVHVDSFSCNNLDKSKIFGSCFNSITVDKFAIPNRRRDDLQLGSSGFLQSSNYKIDISSSSCQLYYSLPLVNVTINNFNPSSWNRRYGFGSFNLSSYDVVYSDHCFSVNSDFCPCADPSVVNSCAKSKPPSAICPAGTKYRHCDLDTTLYVKNWCRCSCLPDPISTYSPNTCPQKKVVVGIGEHCPGLGINEEKCGTQLNHSSCFCSPDAFLGWSFDSCISNNRCNIFSNFIFNGINSGTTCSNDLLYSNTEISTGVCVNYDLYGITGQGIFKEVSAAYYNNWQNLLYDSNGNIIGFKDFLTNKTYTILPCYSGRVSAAFYQNSSSPALLYRNLKCSYVLNNISFISQPFYFDSYLGCVLNAVNLTSYSVSSCDLRMGSGFCIDYALPSSGGSGSGISSPYRFVTFEPFNVSFVNDSVETVGGLFEIQIPTNFTIAGHEEFIQTSSPKVTIDCSAFVCSNYAACHDLLSEYGTFCDNINSILNEVNDLLDITQLQVANALMQGVTLSSNLNTNLHSDVDNIDFKSLLGCLGSQCGSSSRSLLEDLLFNKVKLSDVGFVEAYNNCTGGSEIRDLLCVQSFNGIKVLPPILSETQISGYTTAATVAAMFPPWSAAAGVPFSLNVQYRINGLGVTMDVLNKNQKLIANAFNKALLSIQNGFTATNSALAKIQSVVNANAQALNSLLQQLFNKFGAISSSLQEILSRLDPPEAQVQIDRLINGRLTALNAYVSQQLSDITLIKAGASRAIEKVNECVKSQSPRINFCGNGNHILSLVQNAPYGLLFIHFSYKPTSFKTVLVSPGLCLSGDRGIAPKQGYFIKQNDSWMFTGSSYYYPEPISDKNVVFMNSCSVNFTKAPFIYLNNSIPNLSDFEAELSLWFKNHTSIAPNLTFNSHINATFLDLYYEMNVIQESIKSLNGGYIPEAPRDGQAYVRKDGEWVLLSTF

SEQ ID NO: 14923 - protein, 1171 aa, Artificial Sequence
  HCoV/229E/BN1/GER/2015__AOG74783.1 spike protein (1-1171)
MFVLLVAYALLHIAGCQTTNGTNTSHSVCNGCVGHSENVFAVESGGYIPSNFAFNNWFLLTNTSSVVDGVVRSFQPLLLNCLWSVSGSQFTTGFVYFNGTGRGACKGFYSNASSDVIRYNINFEENLRRGTILFKTSYGAVVFYCTNNTLVSGDAHIPSGTVLGNFYCFVNTTIGNETTSAFVGALPKTVREFVISRTGHFYINGYRYFSLGDVEAVNFNVTNAATTVCTVALASYADVLVNVSQTAIANIIYCNSVINRLRCDQLSFDVPDGFYSTSPIQPVELPVSIVSLPVYHKHTFIVLYVNFEHRRGPGKCYNCRPAVINITLANFNETKGPLCVDTSHFTTQFVDNVKLARWSASINTGNCPFSFGKVNNFVKFGSVCFSLKDIPGGCAMPIMANLVNSKSHNIGSLYVSWSDGDVITGVPKPVEGVSSFMNVTLNKCTKYNIYDVSGVGVIRISNDTFLNGITYTSTSGNLLGFKDVTNGTIYSITPCNPPDQLVVYQQAVVGAMLSENFTSYGFSNVVEMPKFFYASNGTYNCTDAVLTYSSFGVCADGSIIAVQPRNVSYDSVSAIVTANLSIPFNWTTSVQVEYLQITSTPIVVDCSTYVCNGNVRCVELLKQYTSACKTIEDALRNSAMLESADVSEMLTFDKKAFTLANVSSFGDYNLSSVIPSLPRSGSRVAGRSAIEDILFSKLVTSGLGTVDADYKKCTKGLSIADLACAQYYNGIMVLPGVADAERMAMYTGSLIGGIALGGLTSAASIPFSLAIQSRLNYVALQTDVLQENQRILAASFNKAMTNIVDAFTGVNDAITQTSQALQTVATALNKIQDVVNQQGNSLNHLTSQLRQNFQAISSSIQAIYDRLDIIQADQQVDRLITGRLAALNVFVSHTLTKYTEVRASRQLAQQKVNECVKSQSKRYGFCGNGTHIFSLVNAAPEGLVFLHTVLLPTQYKDVEAWSGLCVDGINGYVLRQPNLALYKEGNYYRITSRIMFEPRIPTIADFVQIENCNVTFVNISRSELQTIVPEYIDVNKTLQELSYKLPNYTVPDLVVEQYNQTILNLTSEISTLENKSAELNYTVQKLQTLIDNINSTLVDLKWLNRVETYIKWPWWVWLCISVVLIFVVSMLLLCCCSTGCCGFFSCFASSIRGCCESTKLPYYDVEKIHIQ

SEQ ID NO: 14924 - protein, 1171 aa, Artificial Sequence
  HCoV/229E/BN1/GER/2015__AOG74783.1 spike protein (1-1171)(I869P_I870P)
MFVLLVAYALLHIAGCQTTNGTNTSHSVCNGCVGHSENVFAVESGGYIPSNFAFNNWFLLTNTSSVVDGVVRSFQPLLLNCLWSVSGSQFTTGFVYFNGTGRGACKGFYSNASSDVIRYNINFEENLRRGTILFKTSYGAVVFYCTNNTLVSGDAHIPSGTVLGNFYCFVNTTIGNETTSAFVGALPKTVREFVISRTGHFYINGYRYFSLGDVEAVNFNVTNAATTVCTVALASYADVLVNVSQTAIANIIYCNSVINRLRCDQLSFDVPDGFYSTSPIQPVELPVSIVSLPVYHKHTFIVLYVNFEHRRGPGKCYNCRPAVINITLANFNETKGPLCVDTSHFTTQFVDNVKLARWSASINTGNCPFSFGKVNNFVKFGSVCFSLKDIPGGCAMPIMANLVNSKSHNIGSLYVSWSDGDVITGVPKPVEGVSSFMNVTLNKCTKYNIYDVSGVGVIRISNDTFLNGITYTSTSGNLLGFKDVTNGTIYSITPCNPPDQLVVYQQAVVGAMLSENFTSYGFSNVVEMPKFFYASNGTYNCTDAVLTYSSFGVCADGSIIAVQPRNVSYDSVSAIVTANLSIPFNWTTSVQVEYLQITSTPIVVDCSTYVCNGNVRCVELLKQYTSACKTIEDALRNSAMLESADVSEMLTFDKKAFTLANVSSFGDYNLSSVIPSLPRSGSRVAGRSAIEDILFSKLVTSGLGTVDADYKKCTKGLSIADLACAQYYNGIMVLPGVADAERMAMYTGSLIGGIALGGLTSAASIPFSLAIQSRLNYVALQTDVLQENQRILAASFNKAMTNIVDAFTGVNDAITQTSQALQTVATALNKIQDVVNQQGNSLNHLTSQLRQNFQAISSSIQAIYDRLDPPQADQQVDRLITGRLAALNVFVSHTLTKYTEVRASRQLAQQKVNECVKSQSKRYGFCGNGTHIFSLVNAAPEGLVFLHTVLLPTQYKDVEAWSGLCVDGINGYVLRQPNLALYKEGNYYRITSRIMFEPRIPTIADFVQIENCNVTFVNISRSELQTIVPEYIDVNKTLQELSYKLPNYTVPDLVVEQYNQTILNLTSEISTLENKSAELNYTVQKLQTLIDNINSTLVDLKWLNRVETYIKWPWWVWLCISVVLIFVVSMLLLCCCSTGCCGFFSCFASSIRGCCESTKLPYYDVEKIHIQ

SEQ ID NO: 14925 - protein, 1108 aa, Artificial Sequence
  HCoV/229E/BN1/GER/2015__AOG74783.1 spike protein (variant)
MFVLLVAYALLHIAGCQTTNGTNTSHSVCNGCVGHSENVFAVESGGYIPSNFAFNNWFLLTNTSSVVDGVVRSFQPLLLNCLWSVSGSQFTTGFVYFNGTGRGACKGFYSNASSDVIRYNINFEENLRRGTILFKTSYGAVVFYCTNNTLVSGDAHIPSGTVLGNFYCFVNTTIGNETTSAFVGALPKTVREFVISRTGHFYINGYRYFSLGDVEAVNFNVTNAATTVCTVALASYADVLVNVSQTAIANIIYCNSVINRLRCDQLSFDVPDGFYSTSPIQPVELPVSIVSLPVYHKHTFIVLYVNFEHRRGPGKCYNCRPAVINITLANFNETKGPLCVDTSHFTTQFVDNVKLARWSASINTGNCPFSFGKVNNFVKFGSVCFSLKDIPGGCAMPIMANLVNSKSHNIGSLYVSWSDGDVITGVPKPVEGVSSFMNVTLNKCTKYNIYDVSGVGVIRISNDTFLNGITYTSTSGNLLGFKDVTNGTIYSITPCNPPDQLVVYQQAVVGAMLSENFTSYGFSNVVEMPKFFYASNGTYNCTDAVLTYSSFGVCADGSIIAVQPRNVSYDSVSAIVTANLSIPFNWTTSVQVEYLQITSTPIVVDCSTYVCNGNVRCVELLKQYTSACKTIEDALRNSAMLESADVSEMLTFDKKAFTLANVSSFGDYNLSSVIPSLPRSGSRVAGRSAIEDILFSKLVTSGLGTVDADYKKCTKGLSIADLACAQYYNGIMVLPGVADAERMAMYTGSLIGGIALGGLTSAASIPFSLAIQSRLNYVALQTDVLQENQRILAASFNKAMTNIVDAFTGVNDAITQTSQALQTVATALNKIQDVVNQQGNSLNHLTSQLRQNFQAISSSIQAIYDRLDPPQADQQVDRLITGRLAALNVFVSHTLTKYTEVRASRQLAQQKVNECVKSQSKRYGFCGNGTHIFSLVNAAPEGLVFLHTVLLPTQYKDVEAWSGLCVDGINGYVLRQPNLALYKEGNYYRITSRIMFEPRIPTIADFVQIENCNVTFVNISRSELQTIVPEYIDVNKTLQELSYKLPNYTVPDLVVEQYNQTILNLTSEISTLENKSAELNYTVQKLQTLIDNINSTLVDLKWLNRVET

SEQ ID NO: 14926 - protein, 1135 aa, Artificial Sequence
  HCoV/229E/BN1/GER/2015__AOG74783.1 spike protein (variant)
MFVLLVAYALLHIAGCQTTNGTNTSHSVCNGCVGHSENVFAVESGGYIPSNFAFNNWFLLTNTSSVVDGVVRSFQPLLLNCLWSVSGSQFTTGFVYFNGTGRGACKGFYSNASSDVIRYNINFEENLRRGTILFKTSYGAVVFYCTNNTLVSGDAHIPSGTVLGNFYCFVNTTIGNETTSAFVGALPKTVREFVISRTGHFYINGYRYFSLGDVEAVNFNVTNAATTVCTVALASYADVLVNVSQTAIANIIYCNSVINRLRCDQLSFDVPDGFYSTSPIQPVELPVSIVSLPVYHKHTFIVLYVNFEHRRGPGKCYNCRPAVINITLANFNETKGPLCVDTSHFTTQFVDNVKLARWSASINTGNCPFSFGKVNNFVKFGSVCFSLKDIPGGCAMPIMANLVNSKSHNIGSLYVSWSDGDVITGVPKPVEGVSSFMNVTLNKCTKYNIYDVSGVGVIRISNDTFLNGITYTSTSGNLLGFKDVTNGTIYSITPCNPPDQLVVYQQAVVGAMLSENFTSYGFSNVVEMPKFFYASNGTYNCTDAVLTYSSFGVCADGSIIAVQPRNVSYDSVSAIVTANLSIPFNWTTSVQVEYLQITSTPIVVDCSTYVCNGNVRCVELLKQYTSACKTIEDALRNSAMLESADVSEMLTFDKKAFTLANVSSFGDYNLSSVIPSLPRSGSRVAGRSAIEDILFSKLVTSGLGTVDADYKKCTKGLSIADLACAQYYNGIMVLPGVADAERMAMYTGSLIGGIALGGLTSAASIPFSLAIQSRLNYVALQTDVLQENQRILAASFNKAMTNIVDAFTGVNDAITQTSQALQTVATALNKIQDVVNQQGNSLNHLTSQLRQNFQAISSSIQAIYDRLDPPQADQQVDRLITGRLAALNVFVSHTLTKYTEVRASRQLAQQKVNECVKSQSKRYGFCGNGTHIFSLVNAAPEGLVFLHTVLLPTQYKDVEAWSGLCVDGINGYVLRQPNLALYKEGNYYRITSRIMFEPRIPTIADFVQIENCNVTFVNISRSELQTIVPEYIDVNKTLQELSYKLPNYTVPDLVVEQYNQTILNLTSEISTLENKSAELNYTVQKLQTLIDNINSTLVDLKWLNRVETGGYIPEAPRDGQAYVRKDGEWVLLSTF

SEQ ID NO: 14927 - protein, 1356 aa, Artificial Sequence
  HCoV/NL63/RPTEC/2004__AFV53148.1 spike protein (1-1356)
MKLFLILLVLPLASCFFTCNSNANLSMLQLGVPDNSSTIVTGLLPTHWFCANQSTSVYSANGFFYIDVGNHRSAFALHTGYYDANQYYIYVTNEIGLNASVTLKICKFSRNTTFDFLSNASSSFDCIVNLLFTEQLGAPLGITISGETVRLHLYNVTRTFYVPAAYKLTKLSVKCYFNYSCVFSVVNATVTVNVTTHNGRVVNYTVCDDCNGYTDNIFSVQQDGRIPNGFPFNNWFLLTNGSTLVDGVSRLYQPLRLTCLWPVPGLKSSTGFVYFNATGSDVNCNGYQHNSVVDVMRYNLNFSANSLDNLKSGVIVFKTLQYDVLFYCSNSSSGVLDTTIPFGPSSQPYYCFINSTINTTHVSTFVGILPPTVREIVVARTGQFYINGFKYFDLGFIEAVNFNVTTASATDFWTVAFATFVDVLVNVSATNIQNLLYCDSPFEKLQCEHLQFGLQDGFYSANFLDDNVLPETYVALPIYYQHTDINFTATASFGGSCYVCKPHQVNISLNGNTSVCVRTSHFSIRYIYNRVKSGSPGDSSWHIYLKSGTCPFSFSKLNNFQKFKTICFSTVEVPGSCNFPLEATWHYTSYTIVGALYVTWSEGNSITGVPYPVSGIREFSNLVLNNCTKYNIYDYVGTGIIRSSNQSLAGGITYVSNSGNLLGFKNVSTGNIFIVTPCNQPDQVAVYQQSIIGAMTAVNESRYGLQNLLQLPNFYYVSNGGNNCTTAVMTYSNFGICADGSLIPVRPRNSSDNGISAIITANLSIPSNWTTSVQVEYLQITSTPIVVDCATYVCNGNPRCKNLLKQYTSACKTIEDALRLSAHLETNDVSSMLTFDSNAFSLANVTSFGDYNLSSVLPQRNIRSSRIAGRSALEDLLFSKVVTSGLGTVDVDYKSCTKGLSIADLACAQYYNGIMVLPGVADAERMAMYTGSLIGGMVLGGLTSAAAIPFSLALQARLNYVALQTDVLQENQKILAASFNKAINNIVASFSSVNDAITQTAEAIHTVTIALNKIQDVVNQQGSALNHLTSQLRHNFQAISNSIQAIYDRLDSIQADQQVDRLITGRLAALNAFVSQVLNKYTEVRGSRRLAQQKINECVKSQSNRYGFCGNGTHIFSIVNSAPDGLLFLHTVLLPTDYKNVKAWSGICVDGIYGYVLRQPNLVLYSDNGVFRVTSRIMFQPRLPVLSDFVQIYNCNVTFVNISRVELHTVIPDYVDVNKTLQEFAQNLPKYVKPNFDLTPFNLTYLNLSSELKQLEAKTASLFQTTVELQGLIDQINSTYVDLKLLNRFENYIKWPWWVWLIISVVFVVLLSLLVFCCLSTGCCGCCNCLTSSMRGCCDCGSTKLPYYEFEKVHVQ

SEQ ID NO: 14928 - protein, 1356 aa, Artificial Sequence
  HCoV/NL63/RPTEC/2004__AFV53148.1 spike protein (1-1356)(S1052P_I1053P)
MKLFLILLVLPLASCFFTCNSNANLSMLQLGVPDNSSTIVTGLLPTHWFCANQSTSVYSANGFFYIDVGNHRSAFALHTGYYDANQYYIYVTNEIGLNASVTLKICKFSRNTTFDFLSNASSSFDCIVNLLFTEQLGAPLGITISGETVRLHLYNVTRTFYVPAAYKLTKLSVKCYFNYSCVFSVVNATVTVNVTTHNGRVVNYTVCDDCNGYTDNIFSVQQDGRIPNGFPFNNWFLLTNGSTLVDGVSRLYQPLRLTCLWPVPGLKSSTGFVYFNATGSDVNCNGYQHNSVVDVMRYNLNFSANSLDNLKSGVIVFKTLQYDVLFYCSNSSSGVLDTTIPFGPSSQPYYCFINSTINTTHVSTFVGILPPTVREIVVARTGQFYINGFKYFDLGFIEAVNFNVTTASATDFWTVAFATFVDVLVNVSATNIQNLLYCDSPFEKLQCEHLQFGLQDGFYSANFLDDNVLPETYVALPIYYQHTDINFTATASFGGSCYVCKPHQVNISLNGNTSVCVRTSHFSIRYIYNRVKSGSPGDSSWHIYLKSGTCPFSFSKLNNFQKFKTICFSTVEVPGSCNFPLEATWHYTSYTIVGALYVTWSEGNSITGVPYPVSGIREFSNLVLNNCTKYNIYDYVGTGIIRSSNQSLAGGITYVSNSGNLLGFKNVSTGNIFIVTPCNQPDQVAVYQQSIIGAMTAVNESRYGLQNLLQLPNFYYVSNGGNNCTTAVMTYSNFGICADGSLIPVRPRNSSDNGISAIITANLSIPSNWTTSVQVEYLQITSTPIVVDCATYVCNGNPRCKNLLKQYTSACKTIEDALRLSAHLETNDVSSMLTFDSNAFSLANVTSFGDYNLSSVLPQRNIRSSRIAGRSALEDLLFSKVVTSGLGTVDVDYKSCTKGLSIADLACAQYYNGIMVLPGVADAERMAMYTGSLIGGMVLGGLTSAAAIPFSLALQARLNYVALQTDVLQENQKILAASFNKAINNIVASFSSVNDAITQTAEAIHTVTIALNKIQDVVNQQGSALNHLTSQLRHNFQAISNSIQAIYDRLDPPQADQQVDRLITGRLAALNAFVSQVLNKYTEVRGSRRLAQQKINECVKSQSNRYGFCGNGTHIFSIVNSAPDGLLFLHTVLLPTDYKNVKAWSGICVDGIYGYVLRQPNLVLYSDNGVFRVTSRIMFQPRLPVLSDFVQIYNCNVTFVNISRVELHTVIPDYVDVNKTLQEFAQNLPKYVKPNFDLTPFNLTYLNLSSELKQLEAKTASLFQTTVELQGLIDQINSTYVDLKLLNRFENYIKWPWWVWLIISVVFVVLLSLLVFCCLSTGCCGCCNCLTSSMRGCCDCGSTKLPYYEFEKVHVQ

SEQ ID NO: 14929 - protein, 1291 aa, Artificial Sequence
  HCoV/NL63/RPTEC/2004__AFV53148.1 spike protein (variant)
MKLFLILLVLPLASCFFTCNSNANLSMLQLGVPDNSSTIVTGLLPTHWFCANQSTSVYSANGFFYIDVGNHRSAFALHTGYYDANQYYIYVTNEIGLNASVTLKICKFSRNTTFDFLSNASSSFDCIVNLLFTEQLGAPLGITISGETVRLHLYNVTRTFYVPAAYKLTKLSVKCYFNYSCVFSVVNATVTVNVTTHNGRVVNYTVCDDCNGYTDNIFSVQQDGRIPNGFPFNNWFLLTNGSTLVDGVSRLYQPLRLTCLWPVPGLKSSTGFVYFNATGSDVNCNGYQHNSVVDVMRYNLNFSANSLDNLKSGVIVFKTLQYDVLFYCSNSSSGVLDTTIPFGPSSQPYYCFINSTINTTHVSTFVGILPPTVREIVVARTGQFYINGFKYFDLGFIEAVNFNVTTASATDFWTVAFATFVDVLVNVSATNIQNLLYCDSPFEKLQCEHLQFGLQDGFYSANFLDDNVLPETYVALPIYYQHTDINFTATASFGGSCYVCKPHQVNISLNGNTSVCVRTSHFSIRYIYNRVKSGSPGDSSWHIYLKSGTCPFSFSKLNNFQKFKTICFSTVEVPGSCNFPLEATWHYTSYTIVGALYVTWSEGNSITGVPYPVSGIREFSNLVLNNCTKYNIYDYVGTGIIRSSNQSLAGGITYVSNSGNLLGFKNVSTGNIFIVTPCNQPDQVAVYQQSIIGAMTAVNESRYGLQNLLQLPNFYYVSNGGNNCTTAVMTYSNFGICADGSLIPVRPRNSSDNGISAIITANLSIPSNWTTSVQVEYLQITSTPIVVDCATYVCNGNPRCKNLLKQYTSACKTIEDALRLSAHLETNDVSSMLTFDSNAFSLANVTSFGDYNLSSVLPQRNIRSSRIAGRSALEDLLFSKVVTSGLGTVDVDYKSCTKGLSIADLACAQYYNGIMVLPGVADAERMAMYTGSLIGGMVLGGLTSAAAIPFSLALQARLNYVALQTDVLQENQKILAASFNKAINNIVASFSSVNDAITQTAEAIHTVTIALNKIQDVVNQQGSALNHLTSQLRHNFQAISNSIQAIYDRLDPPQADQQVDRLITGRLAALNAFVSQVLNKYTEVRGSRRLAQQKINECVKSQSNRYGFCGNGTHIFSIVNSAPDGLLFLHTVLLPTDYKNVKAWSGICVDGIYGYVLRQPNLVLYSDNGVFRVTSRIMFQPRLPVLSDFVQIYNCNVTFVNISRVELHTVIPDYVDVNKTLQEFAQNLPKYVKPNFDLTPFNLTYLNLSSELKQLEAKTASLFQTTVELQGLIDQINSTYVDLKLLNRFEN

SEQ ID NO: 14930 - protein, 1318 aa, Artificial Sequence
  HCoV/NL63/RPTEC/2004__AFV53148.1 spike protein (variant)
MKLFLILLVLPLASCFFTCNSNANLSMLQLGVPDNSSTIVTGLLPTHWFCANQSTSVYSANGFFYIDVGNHRSAFALHTGYYDANQYYIYVTNEIGLNASVTLKICKFSRNTTFDFLSNASSSFDCIVNLLFTEQLGAPLGITISGETVRLHLYNVTRTFYVPAAYKLTKLSVKCYFNYSCVFSVVNATVTVNVTTHNGRVVNYTVCDDCNGYTDNIFSVQQDGRIPNGFPFNNWFLLTNGSTLVDGVSRLYQPLRLTCLWPVPGLKSSTGFVYFNATGSDVNCNGYQHNSVVDVMRYNLNFSANSLDNLKSGVIVFKTLQYDVLFYCSNSSSGVLDTTIPFGPSSQPYYCFINSTINTTHVSTFVGILPPTVREIVVARTGQFYINGFKYFDLGFIEAVNFNVTTASATDFWTVAFATFVDVLVNVSATNIQNLLYCDSPFEKLQCEHLQFGLQDGFYSANFLDDNVLPETYVALPIYYQHTDINFTATASFGGSCYVCKPHQVNISLNGNTSVCVRTSHFSIRYIYNRVKSGSPGDSSWHIYLKSGTCPFSFSKLNNFQKFKTICFSTVEVPGSCNFPLEATWHYTSYTIVGALYVTWSEGNSITGVPYPVSGIREFSNLVLNNCTKYNIYDYVGTGIIRSSNQSLAGGITYVSNSGNLLGFKNVSTGNIFIVTPCNQPDQVAVYQQSIIGAMTAVNESRYGLQNLLQLPNFYYVSNGGNNCTTAVMTYSNFGICADGSLIPVRPRNSSDNGISAIITANLSIPSNWTTSVQVEYLQITSTPIVVDCATYVCNGNPRCKNLLKQYTSACKTIEDALRLSAHLETNDVSSMLTFDSNAFSLANVTSFGDYNLSSVLPQRNIRSSRIAGRSALEDLLFSKVVTSGLGTVDVDYKSCTKGLSIADLACAQYYNGIMVLPGVADAERMAMYTGSLIGGMVLGGLTSAAAIPFSLALQARLNYVALQTDVLQENQKILAASFNKAINNIVASFSSVNDAITQTAEAIHTVTIALNKIQDVVNQQGSALNHLTSQLRHNFQAISNSIQAIYDRLDPPQADQQVDRLITGRLAALNAFVSQVLNKYTEVRGSRRLAQQKINECVKSQSNRYGFCGNGTHIFSIVNSAPDGLLFLHTVLLPTDYKNVKAWSGICVDGIYGYVLRQPNLVLYSDNGVFRVTSRIMFQPRLPVLSDFVQIYNCNVTFVNISRVELHTVIPDYVDVNKTLQEFAQNLPKYVKPNFDLTPFNLTYLNLSSELKQLEAKTASLFQTTVELQGLIDQINSTYVDLKLLNRFENGGYIPEAPRDGQAYVRKDGEWVLLSTF

SEQ ID NO: 14931 - protein, 1256 aa, Artificial Sequence
  Bat SARS-like CoV/WIV1__AGZ48828.1 spike protein (1-1256)
MKLLVLVFATLVSSYTIEKCLDFDDRTPPANTQFLSSHRGVYYPDDIFRSNVLHLVQDHFLPFDSNVTRFITFGLNFDNPIIPFKDGIYFAATEKSNVIRGWVFGSTMNNKSQSVIIMNNSTNLVIRACNFELCDNPFFVVLKSNNTQIPSYIFNNAFNCTFEYVSKDFNLDLGEKPGNFKDLREFVFRNKDGFLHVYSGYQPISAASGLPTGFNALKPIFKLPLGINITNFRTLLTAFPPRPDYWGTSAAAYFVGYLKPTTFMLKYDENGTITDAVDCSQNPLAELKCSVKSFEIDKGIYQTSNFRVAPSKEVVRFPNITNLCPFGEVFNATTFPSVYAWERKRISNCVADYSVLYNSTSFSTFKCYGVSATKLNDLCFSNVYADSFVVKGDDVRQIAPGQTGVIADYNYKLPDDFTGCVLAWNTRNIDATQTGNYNYKYRSLRHGKLRPFERDISNVPFSPDGKPCTPPAFNCYWPLNDYGFYITNGIGYQPYRVVVLSFELLNAPATVCGPKLSTDLIKNQCVNFNFNGLTGTGVLTPSSKRFQPFQQFGRDVSDFTDSVRDPKTSEILDISPCSFGGVSVITPGTNTSSEVAVLYQDVNCTDVPVAIHADQLTPSWRVHSTGNNVFQTQAGCLIGAEHVDTSYECDIPIGAGICASYHTVSSLRSTSQKSIVAYTMSLGADSSIAYSNNTIAIPTNFSISITTEVMPVSMAKTSVDCNMYICGDSTECANLLLQYGSFCTQLNRALSGIAVEQDRNTREVFAQVKQMYKTPTLKDFGGFNFSQILPDPLKPTKRSFIEDLLFNKVTLADAGFMKQYGECLGDINARDLICAQKFNGLTVLPPLLTDDMIAAYTAALVSGTATAGWTFGAGAALQIPFAMQMAYRFNGIGVTQNVLYENQKQIANQFNKAISQIQESLTTTSTALGKLQDVVNQNAQALNTLVKQLSSNFGAISSVLNDILSRLDKVEAEVQIDRLITGRLQSLQTYVTQQLIRAAEIRASANLAATKMSECVLGQSKRVDFCGKGYHLMSFPQAAPHGVVFLHVTYVPSQERNFTTAPAICHEGKAYFPREGVFVFNGTSWFITQRNFFSPQIITTDNTFVSGSCDVVIGIINNTVYDPLQPELDSFKEELDKYFKNHTSPDVDLGDISGINASVVNIQKEIDRLNEVAKNLNESLIDLQELGKYEQYIKWPWYVWLGFIAGLIAIVMVTILLCCMTSCCSCLKGACSCGSCCKFDEDDSEPVLKGVKLHYT

SEQ ID NO: 14932 - protein, 1256 aa, Artificial Sequence
  Bat SARS-like CoV/WIV1__AGZ48828.1 spike protein (1-1256)(K969P_V970P)
MKLLVLVFATLVSSYTIEKCLDFDDRTPPANTQFLSSHRGVYYPDDIFRSNVLHLVQDHFLPFDSNVTRFITFGLNFDNPIIPFKDGIYFAATEKSNVIRGWVFGSTMNNKSQSVIIMNNSTNLVIRACNFELCDNPFFVVLKSNNTQIPSYIFNNAFNCTFEYVSKDFNLDLGEKPGNFKDLREFVFRNKDGFLHVYSGYQPISAASGLPTGFNALKPIFKLPLGINITNFRTLLTAFPPRPDYWGTSAAAYFVGYLKPTTFMLKYDENGTITDAVDCSQNPLAELKCSVKSFEIDKGIYQTSNFRVAPSKEVVRFPNITNLCPFGEVFNATTFPSVYAWERKRISNCVADYSVLYNSTSFSTFKCYGVSATKLNDLCFSNVYADSFVVKGDDVRQIAPGQTGVIADYNYKLPDDFTGCVLAWNTRNIDATQTGNYNYKYRSLRHGKLRPFERDISNVPFSPDGKPCTPPAFNCYWPLNDYGFYITNGIGYQPYRVVVLSFELLNAPATVCGPKLSTDLIKNQCVNFNFNGLTGTGVLTPSSKRFQPFQQFGRDVSDFTDSVRDPKTSEILDISPCSFGGVSVITPGTNTSSEVAVLYQDVNCTDVPVAIHADQLTPSWRVHSTGNNVFQTQAGCLIGAEHVDTSYECDIPIGAGICASYHTVSSLRSTSQKSIVAYTMSLGADSSIAYSNNTIAIPTNFSISITTEVMPVSMAKTSVDCNMYICGDSTECANLLLQYGSFCTQLNRALSGIAVEQDRNTREVFAQVKQMYKTPTLKDFGGFNFSQILPDPLKPTKRSFIEDLLFNKVTLADAGFMKQYGECLGDINARDLICAQKFNGLTVLPPLLTDDMIAAYTAALVSGTATAGWTFGAGAALQIPFAMQMAYRFNGIGVTQNVLYENQKQIANQFNKAISQIQESLTTTSTALGKLQDVVNQNAQALNTLVKQLSSNFGAISSVLNDILSRLDPPEAEVQIDRLITGRLQSLQTYVTQQLIRAAEIRASANLAATKMSECVLGQSKRVDFCGKGYHLMSFPQAAPHGVVFLHVTYVPSQERNFTTAPAICHEGKAYFPREGVFVFNGTSWFITQRNFFSPQIITTDNTFVSGSCDVVIGIINNTVYDPLQPELDSFKEELDKYFKNHTSPDVDLGDISGINASVVNIQKEIDRLNEVAKNLNESLIDLQELGKYEQYIKWPWYVWLGFIAGLIAIVMVTILLCCMTSCCSCLKGACSCGSCCKFDEDDSEPVLKGVKLHYT

SEQ ID NO: 14933 - protein, 1191 aa, Artificial Sequence
  Bat SARS-like CoV/WIV1__AGZ48828.1 spike protein (variant)
MKLLVLVFATLVSSYTIEKCLDFDDRTPPANTQFLSSHRGVYYPDDIFRSNVLHLVQDHFLPFDSNVTRFITFGLNFDNPIIPFKDGIYFAATEKSNVIRGWVFGSTMNNKSQSVIIMNNSTNLVIRACNFELCDNPFFVVLKSNNTQIPSYIFNNAFNCTFEYVSKDFNLDLGEKPGNFKDLREFVFRNKDGFLHVYSGYQPISAASGLPTGFNALKPIFKLPLGINITNFRTLLTAFPPRPDYWGTSAAAYFVGYLKPTTFMLKYDENGTITDAVDCSQNPLAELKCSVKSFEIDKGIYQTSNFRVAPSKEVVRFPNITNLCPFGEVFNATTFPSVYAWERKRISNCVADYSVLYNSTSFSTFKCYGVSATKLNDLCFSNVYADSFVVKGDDVRQIAPGQTGVIADYNYKLPDDFTGCVLAWNTRNIDATQTGNYNYKYRSLRHGKLRPFERDISNVPFSPDGKPCTPPAFNCYWPLNDYGFYITNGIGYQPYRVVVLSFELLNAPATVCGPKLSTDLIKNQCVNFNFNGLTGTGVLTPSSKRFQPFQQFGRDVSDFTDSVRDPKTSEILDISPCSFGGVSVITPGTNTSSEVAVLYQDVNCTDVPVAIHADQLTPSWRVHSTGNNVFQTQAGCLIGAEHVDTSYECDIPIGAGICASYHTVSSLRSTSQKSIVAYTMSLGADSSIAYSNNTIAIPTNFSISITTEVMPVSMAKTSVDCNMYICGDSTECANLLLQYGSFCTQLNRALSGIAVEQDRNTREVFAQVKQMYKTPTLKDFGGFNFSQILPDPLKPTKRSFIEDLLFNKVTLADAGFMKQYGECLGDINARDLICAQKFNGLTVLPPLLTDDMIAAYTAALVSGTATAGWTFGAGAALQIPFAMQMAYRFNGIGVTQNVLYENQKQIANQFNKAISQIQESLTTTSTALGKLQDVVNQNAQALNTLVKQLSSNFGAISSVLNDILSRLDPPEAEVQIDRLITGRLQSLQTYVTQQLIRAAEIRASANLAATKMSECVLGQSKRVDFCGKGYHLMSFPQAAPHGVVFLHVTYVPSQERNFTTAPAICHEGKAYFPREGVFVFNGTSWFITQRNFFSPQIITTDNTFVSGSCDVVIGIINNTVYDPLQPELDSFKEELDKYFKNHTSPDVDLGDISGINASVVNIQKEIDRLNEVAKNLNESLIDLQELGKYEQ

SEQ ID NO: 14934 - protein, 1218 aa, Artificial Sequence
  Bat SARS-like CoV/WIV1__AGZ48828.1 spike protein (variant)
MKLLVLVFATLVSSYTIEKCLDFDDRTPPANTQFLSSHRGVYYPDDIFRSNVLHLVQDHFLPFDSNVTRFITFGLNFDNPIIPFKDGIYFAATEKSNVIRGWVFGSTMNNKSQSVIIMNNSTNLVIRACNFELCDNPFFVVLKSNNTQIPSYIFNNAFNCTFEYVSKDFNLDLGEKPGNFKDLREFVFRNKDGFLHVYSGYQPISAASGLPTGFNALKPIFKLPLGINITNFRTLLTAFPPRPDYWGTSAAAYFVGYLKPTTFMLKYDENGTITDAVDCSQNPLAELKCSVKSFEIDKGIYQTSNFRVAPSKEVVRFPNITNLCPFGEVFNATTFPSVYAWERKRISNCVADYSVLYNSTSFSTFKCYGVSATKLNDLCFSNVYADSFVVKGDDVRQIAPGQTGVIADYNYKLPDDFTGCVLAWNTRNIDATQTGNYNYKYRSLRHGKLRPFERDISNVPFSPDGKPCTPPAFNCYWPLNDYGFYITNGIGYQPYRVVVLSFELLNAPATVCGPKLSTDLIKNQCVNFNFNGLTGTGVLTPSSKRFQPFQQFGRDVSDFTDSVRDPKTSEILDISPCSFGGVSVITPGTNTSSEVAVLYQDVNCTDVPVAIHADQLTPSWRVHSTGNNVFQTQAGCLIGAEHVDTSYECDIPIGAGICASYHTVSSLRSTSQKSIVAYTMSLGADSSIAYSNNTIAIPTNFSISITTEVMPVSMAKTSVDCNMYICGDSTECANLLLQYGSFCTQLNRALSGIAVEQDRNTREVFAQVKQMYKTPTLKDFGGFNFSQILPDPLKPTKRSFIEDLLFNKVTLADAGFMKQYGECLGDINARDLICAQKFNGLTVLPPLLTDDMIAAYTAALVSGTATAGWTFGAGAALQIPFAMQMAYRFNGIGVTQNVLYENQKQIANQFNKAISQIQESLTTTSTALGKLQDVVNQNAQALNTLVKQLSSNFGAISSVLNDILSRLDPPEAEVQIDRLITGRLQSLQTYVTQQLIRAAEIRASANLAATKMSECVLGQSKRVDFCGKGYHLMSFPQAAPHGVVFLHVTYVPSQERNFTTAPAICHEGKAYFPREGVFVFNGTSWFITQRNFFSPQIITTDNTFVSGSCDVVIGIINNTVYDPLQPELDSFKEELDKYFKNHTSPDVDLGDISGINASVVNIQKEIDRLNEVAKNLNESLIDLQELGKYEQGGYIPEAPRDGQAYVRKDGEWVLLSTF

SEQ ID NO: 14935 - protein, 1274 aa, Artificial Sequence
  BatCoV/HKU9-1 BF_005I__YP_001039971.1 spike protein (1-1274)
MLLILVLGVSLAAASRPECFNPRFTLTPLNHTLNYTSIKAKVSNVLLPDPYIAYSGQTLRQNLFMADMSNTILYPVTPPANGANGGFIYNTSIIPVSAGLFVNTWMYRQPASSRAYCQEPFGVAFGDTFENDRIAILIMAPDNLGSWSAVAPRNQTNIYLLVCSNATLCINPGFNRWGPAGSFIAPDALVDHSNSCFVNNTFSVNISTSRISLAFLFKDGDLLIYHSGWLPTSNFEHGFSRGSHPMTYFMSLPVGGNLPRAQFFQSIVRSNAIDKGDGMCTNFDVNLHVAHLINRDLLVSYFNNGSVANAADCADSAAEELYCVTGSFDPPTGVYPLSRYRAQVAGFVRVTQRGSYCTPPYSVLQDPPQPVVWRRYMLYDCVFDFTVVVDSLPTHQLQCYGVSPRRLASMCYGSVTLDVMRINETHLNNLFNRVPDTFSLYNYALPDNFYGCLHAFYLNSTAPYAVANRFPIKPGGRQSNSAFIDTVINAAHYSPFSYVYGLAVITLKPAAGSKLVCPVANDTVVITDRCVQYNLYGYTGTGVLSKNTSLVIPDGKVFTASSTGTIIGVSINSTTYSIMPCVTVPVSVGYHPNFERALLFNGLSCSQRSRAVTEPVSVLWSASATAQDAFDTPSGCVVNVELRNTTIVNTCAMPIGNSLCFINGSIATANADSLPRLQLVNYDPLYDNSTATPMTPVYWVKVPTNFTLSATEEYIQTTAPKITIDCARYLCGDSSRCLNVLLHYGTFCNDINKALSRVSTILDSALLSLVKELSINTRDEVTTFSFDGDYNFTGLMGCLGPNCGATTYRSAFSDLLYDKVRITDPGFMQSYQKCIDSQWGGSIRDLLCTQTYNGIAVLPPIVSPAMQALYTSLLVGAVASSGYTFGITSAGVIPFATQLQFRLNGIGVTTQVLVENQKLIASSFNNALVNIQKGFTETSIALSKMQDVINQHAAQLHTLVVQLGNSFGAISSSINEIFSRLEGLAANAEVDRLINGRMMVLNTYVTQLLIQASEAKAQNALAAQKISECVKAQSLRNDFCGNGTHVLSIPQLAPNGVLFIHYAYTPTEYAFVQTSAGLCHNGTGYAPRQGMFVLPNNTNMWHFTTMQFYNPVNISASNTQVLTSCSVNYTSVNYTVLEPSVPGDYDFQKEFDKFYKNLSTIFNNTFNPNDFNFSTVDVTAQIKSLHDVVNQLNQSFIDLKKLNVYEKTIKWPWYVWLAMIAGIVGLVLAVIMLMCMTNCCSCFKGMCDCRRCCGSYDSYDDVYPAVRVNKKRTV

SEQ ID NO: 14936 - protein, 1274 aa, Artificial Sequence
  BatCoV/HKU9-1 BF_005I__YP_001039971.1 spike protein (1-1274)(G983P_L984P)
MLLILVLGVSLAAASRPECFNPRFTLTPLNHTLNYTSIKAKVSNVLLPDPYIAYSGQTLRQNLFMADMSNTILYPVTPPANGANGGFIYNTSIIPVSAGLFVNTWMYRQPASSRAYCQEPFGVAFGDTFENDRIAILIMAPDNLGSWSAVAPRNQTNIYLLVCSNATLCINPGFNRWGPAGSFIAPDALVDHSNSCFVNNTFSVNISTSRISLAFLFKDGDLLIYHSGWLPTSNFEHGFSRGSHPMTYFMSLPVGGNLPRAQFFQSIVRSNAIDKGDGMCTNFDVNLHVAHLINRDLLVSYFNNGSVANAADCADSAAEELYCVTGSFDPPTGVYPLSRYRAQVAGFVRVTQRGSYCTPPYSVLQDPPQPVVWRRYMLYDCVFDFTVVVDSLPTHQLQCYGVSPRRLASMCYGSVTLDVMRINETHLNNLFNRVPDTFSLYNYALPDNFYGCLHAFYLNSTAPYAVANRFPIKPGGRQSNSAFIDTVINAAHYSPFSYVYGLAVITLKPAAGSKLVCPVANDTVVITDRCVQYNLYGYTGTGVLSKNTSLVIPDGKVFTASSTGTIIGVSINSTTYSIMPCVTVPVSVGYHPNFERALLFNGLSCSQRSRAVTEPVSVLWSASATAQDAFDTPSGCVVNVELRNTTIVNTCAMPIGNSLCFINGSIATANADSLPRLQLVNYDPLYDNSTATPMTPVYWVKVPTNFTLSATEEYIQTTAPKITIDCARYLCGDSSRCLNVLLHYGTFCNDINKALSRVSTILDSALLSLVKELSINTRDEVTTFSFDGDYNFTGLMGCLGPNCGATTYRSAFSDLLYDKVRITDPGFMQSYQKCIDSQWGGSIRDLLCTQTYNGIAVLPPIVSPAMQALYTSLLVGAVASSGYTFGITSAGVIPFATQLQFRLNGIGVTTQVLVENQKLIASSFNNALVNIQKGFTETSIALSKMQDVINQHAAQLHTLVVQLGNSFGAISSSINEIFSRLEPPAANAEVDRLINGRMMVLNTYVTQLLIQASEAKAQNALAAQKISECVKAQSLRNDFCGNGTHVLSIPQLAPNGVLFIHYAYTPTEYAFVQTSAGLCHNGTGYAPRQGMFVLPNNTNMWHFTTMQFYNPVNISASNTQVLTSCSVNYTSVNYTVLEPSVPGDYDFQKEFDKFYKNLSTIFNNTFNPNDFNFSTVDVTAQIKSLHDVVNQLNQSFIDLKKLNVYEKTIKWPWYVWLAMIAGIVGLVLAVIMLMCMTNCCSCFKGMCDCRRCCGSYDSYDDVYPAVRVNKKRTV

SEQ ID NO: 14937 - protein, 1207 aa, Artificial Sequence
  BatCoV/HKU9-1 BF_005I__YP_001039971.1 spike protein (variant)
MLLILVLGVSLAAASRPECFNPRFTLTPLNHTLNYTSIKAKVSNVLLPDPYIAYSGQTLRQNLFMADMSNTILYPVTPPANGANGGFIYNTSIIPVSAGLFVNTWMYRQPASSRAYCQEPFGVAFGDTFENDRIAILIMAPDNLGSWSAVAPRNQTNIYLLVCSNATLCINPGFNRWGPAGSFIAPDALVDHSNSCFVNNTFSVNISTSRISLAFLFKDGDLLIYHSGWLPTSNFEHGFSRGSHPMTYFMSLPVGGNLPRAQFFQSIVRSNAIDKGDGMCTNFDVNLHVAHLINRDLLVSYFNNGSVANAADCADSAAEELYCVTGSFDPPTGVYPLSRYRAQVAGFVRVTQRGSYCTPPYSVLQDPPQPVVWRRYMLYDCVFDFTVVVDSLPTHQLQCYGVSPRRLASMCYGSVTLDVMRINETHLNNLFNRVPDTFSLYNYALPDNFYGCLHAFYLNSTAPYAVANRFPIKPGGRQSNSAFIDTVINAAHYSPFSYVYGLAVITLKPAAGSKLVCPVANDTVVITDRCVQYNLYGYTGTGVLSKNTSLVIPDGKVFTASSTGTIIGVSINSTTYSIMPCVTVPVSVGYHPNFERALLFNGLSCSQRSRAVTEPVSVLWSASATAQDAFDTPSGCVVNVELRNTTIVNTCAMPIGNSLCFINGSIATANADSLPRLQLVNYDPLYDNSTATPMTPVYWVKVPTNFTLSATEEYIQTTAPKITIDCARYLCGDSSRCLNVLLHYGTFCNDINKALSRVSTILDSALLSLVKELSINTRDEVTTFSFDGDYNFTGLMGCLGPNCGATTYRSAFSDLLYDKVRITDPGFMQSYQKCIDSQWGGSIRDLLCTQTYNGIAVLPPIVSPAMQALYTSLLVGAVASSGYTFGITSAGVIPFATQLQFRLNGIGVTTQVLVENQKLIASSFNNALVNIQKGFTETSIALSKMQDVINQHAAQLHTLVVQLGNSFGAISSSINEIFSRLEPPAANAEVDRLINGRMMVLNTYVTQLLIQASEAKAQNALAAQKISECVKAQSLRNDFCGNGTHVLSIPQLAPNGVLFIHYAYTPTEYAFVQTSAGLCHNGTGYAPRQGMFVLPNNTNMWHFTTMQFYNPVNISASNTQVLTSCSVNYTSVNYTVLEPSVPGDYDFQKEFDKFYKNLSTIFNNTFNPNDFNFSTVDVTAQIKSLHDVVNQLNQSFIDLKKLNVYEK

SEQ ID NO: 14938 - protein, 1234 aa, Artificial Sequence
  BatCoV/HKU9-1 BF_005I__YP_001039971.1 spike protein (variant)
MLLILVLGVSLAAASRPECFNPRFTLTPLNHTLNYTSIKAKVSNVLLPDPYIAYSGQTLRQNLFMADMSNTILYPVTPPANGANGGFIYNTSIIPVSAGLFVNTWMYRQPASSRAYCQEPFGVAFGDTFENDRIAILIMAPDNLGSWSAVAPRNQTNIYLLVCSNATLCINPGFNRWGPAGSFIAPDALVDHSNSCFVNNTFSVNISTSRISLAFLFKDGDLLIYHSGWLPTSNFEHGFSRGSHPMTYFMSLPVGGNLPRAQFFQSIVRSNAIDKGDGMCTNFDVNLHVAHLINRDLLVSYFNNGSVANAADCADSAAEELYCVTGSFDPPTGVYPLSRYRAQVAGFVRVTQRGSYCTPPYSVLQDPPQPVVWRRYMLYDCVFDFTVVVDSLPTHQLQCYGVSPRRLASMCYGSVTLDVMRINETHLNNLFNRVPDTFSLYNYALPDNFYGCLHAFYLNSTAPYAVANRFPIKPGGRQSNSAFIDTVINAAHYSPFSYVYGLAVITLKPAAGSKLVCPVANDTVVITDRCVQYNLYGYTGTGVLSKNTSLVIPDGKVFTASSTGTIIGVSINSTTYSIMPCVTVPVSVGYHPNFERALLFNGLSCSQRSRAVTEPVSVLWSASATAQDAFDTPSGCVVNVELRNTTIVNTCAMPIGNSLCFINGSIATANADSLPRLQLVNYDPLYDNSTATPMTPVYWVKVPTNFTLSATEEYIQTTAPKITIDCARYLCGDSSRCLNVLLHYGTFCNDINKALSRVSTILDSALLSLVKELSINTRDEVTTFSFDGDYNFTGLMGCLGPNCGATTYRSAFSDLLYDKVRITDPGFMQSYQKCIDSQWGGSIRDLLCTQTYNGIAVLPPIVSPAMQALYTSLLVGAVASSGYTFGITSAGVIPFATQLQFRLNGIGVTTQVLVENQKLIASSFNNALVNIQKGFTETSIALSKMQDVINQHAAQLHTLVVQLGNSFGAISSSINEIFSRLEPPAANAEVDRLINGRMMVLNTYVTQLLIQASEAKAQNALAAQKISECVKAQSLRNDFCGNGTHVLSIPQLAPNGVLFIHYAYTPTEYAFVQTSAGLCHNGTGYAPRQGMFVLPNNTNMWHFTTMQFYNPVNISASNTQVLTSCSVNYTSVNYTVLEPSVPGDYDFQKEFDKFYKNLSTIFNNTFNPNDFNFSTVDVTAQIKSLHDVVNQLNQSFIDLKKLNVYEKGGYIPEAPRDGQAYVRKDGEWVLLSTF

SEQ ID NO: 14939 - protein, 1160 aa, Artificial Sequence
  PDCoV/Swine/Thailand/S5011/2015__AMN91621.1 spike protein (1-1160)
MQRALLIMTLLCLARAKFADDLLDLLTFPGAHRFLHKPTRNDSILYSRANNNFDVGVLPGYPTKNVNLFSPLTNSTLPINGLHRSYQPLMLNCLTKITNQTLSMYLQPSEIQTYSCGGAMVKYQTHDAVRIILDLIATDRISVEVVGQAGENYVFVCSDQFNYTTALHNSTFFSLNSQLYCFTNNTYLGILPPDLTDFTVYRTGQFYANGYLLGTLPITVNYVRLYRGQLSANSAHFALANLTDTLITLTNTTISQITYCDKSVVDSIACQRSSHQVEDGFYSDPKSAVRARQRTIVTLPKLPELEVVQLNISAHMDFGEARLDSVTINGNTSYCVTKPYFRLETNFLCRGCTMNLRTDTCSFDLSAVNNGMSFSQFCLSTESGACEMKIIVTYVWNYLLRQRLYVTAVEGQTHTGTTSVHATDTSSVITDVCTDYTIYGVSGTGIIKPSDLLLHNGIAFTSPTGELYAFKNITTGKTLQVLPCETPSQLIVINNTVVGAITSSNSTENNRFTTTIVTPTFFYSTNATTLNCTKPVLSYGPISVCSDGAIAGTSTLQNTRPSIVSLYDGEIEIPSAFSLSVQTEYLQVQAEQVIVDCPQYVCNGNSRCLQLLAQYTSACSNIEVALHSSAQLDSREIISMFKTSTQSLQLANITNFKGDYNFSSILTSRVGGRSAIEDLLFNKVVTSGLGTVDQDYKSCSRNMAIADLVCSQYYNGIMVLPGVVDAEKMAMYTGSLTGAMVFGGLTAAAAIPFATAVQARLNYVALQTNVLQENQKILAESFNQAVGNISLALSSVNDAIQQTSEALNTVAIAIKKIQTVVNQQGEALSHLTAQLSNNFQAISTSIQDIYNRLEEVEANQQVDRLINGRLAALNAYVTQLLNQMSQIRQSRLLAQQKINECVKSQSPRYGFCGNGTHIFSLTQTAPNGIFFMHAVLVPNKFTRVNASAGICVDNTRGYSLQPQLILYQFNNSWRVTPRNMYEPRLPRQADFIQLTDCSVTFYNTTAANLPNIIPDVIDVNQTVSDIIDNLPTATPPQWDVGIYNNTILNLTVEINDLQERSKNLSQIADRLQNYIDNLNNTLVDLEWLNRVETYLKWPWYIWLAIALALIAFVTILITIFLCTGCCGGCFGCCGGCFGLFSKKKRYTDDQPTPSFKFKEW

SEQ ID NO: 14940 - protein, 1160 aa, Artificial Sequence
  PDCoV/Swine/Thailand/S5011/2015__AMN91621.1 spike protein (1-1160)(E855P_V856P)
MQRALLIMTLLCLARAKFADDLLDLLTFPGAHRFLHKPTRNDSILYSRANNNFDVGVLPGYPTKNVNLFSPLTNSTLPINGLHRSYQPLMLNCLTKITNQTLSMYLQPSEIQTYSCGGAMVKYQTHDAVRIILDLIATDRISVEVVGQAGENYVFVCSDQFNYTTALHNSTFFSLNSQLYCFTNNTYLGILPPDLTDFTVYRTGQFYANGYLLGTLPITVNYVRLYRGQLSANSAHFALANLTDTLITLTNTTISQITYCDKSVVDSIACQRSSHQVEDGFYSDPKSAVRARQRTIVTLPKLPELEVVQLNISAHMDFGEARLDSVTINGNTSYCVTKPYFRLETNFLCRGCTMNLRTDTCSFDLSAVNNGMSFSQFCLSTESGACEMKIIVTYVWNYLLRQRLYVTAVEGQTHTGTTSVHATDTSSVITDVCTDYTIYGVSGTGIIKPSDLLLHNGIAFTSPTGELYAFKNITTGKTLQVLPCETPSQLIVINNTVVGAITSSNSTENNRFTTTIVTPTFFYSTNATTLNCTKPVLSYGPISVCSDGAIAGTSTLQNTRPSIVSLYDGEIEIPSAFSLSVQTEYLQVQAEQVIVDCPQYVCNGNSRCLQLLAQYTSACSNIEVALHSSAQLDSREIISMFKTSTQSLQLANITNFKGDYNFSSILTSRVGGRSAIEDLLFNKVVTSGLGTVDQDYKSCSRNMAIADLVCSQYYNGIMVLPGVVDAEKMAMYTGSLTGAMVFGGLTAAAAIPFATAVQARLNYVALQTNVLQENQKILAESFNQAVGNISLALSSVNDAIQQTSEALNTVAIAIKKIQTVVNQQGEALSHLTAQLSNNFQAISTSIQDIYNRLEPPEANQQVDRLINGRLAALNAYVTQLLNQMSQIRQSRLLAQQKINECVKSQSPRYGFCGNGTHIFSLTQTAPNGIFFMHAVLVPNKFTRVNASAGICVDNTRGYSLQPQLILYQFNNSWRVTPRNMYEPRLPRQADFIQLTDCSVTFYNTTAANLPNIIPDVIDVNQTVSDIIDNLPTATPPQWDVGIYNNTILNLTVEINDLQERSKNLSQIADRLQNYIDNLNNTLVDLEWLNRVETYLKWPWYIWLAIALALIAFVTILITIFLCTGCCGGCFGCCGGCFGLFSKKKRYTDDQPTPSFKFKEW

SEQ ID NO: 14941 - protein, 1093 aa, Artificial Sequence
  PDCoV/Swine/Thailand/S5011/2015__AMN91621.1 spike protein (variant)
MQRALLIMTLLCLARAKFADDLLDLLTFPGAHRFLHKPTRNDSILYSRANNNFDVGVLPGYPTKNVNLFSPLTNSTLPINGLHRSYQPLMLNCLTKITNQTLSMYLQPSEIQTYSCGGAMVKYQTHDAVRIILDLIATDRISVEVVGQAGENYVFVCSDQFNYTTALHNSTFFSLNSQLYCFTNNTYLGILPPDLTDFTVYRTGQFYANGYLLGTLPITVNYVRLYRGQLSANSAHFALANLTDTLITLTNTTISQITYCDKSVVDSIACQRSSHQVEDGFYSDPKSAVRARQRTIVTLPKLPELEVVQLNISAHMDFGEARLDSVTINGNTSYCVTKPYFRLETNFLCRGCTMNLRTDTCSFDLSAVNNGMSFSQFCLSTESGACEMKIIVTYVWNYLLRQRLYVTAVEGQTHTGTTSVHATDTSSVITDVCTDYTIYGVSGTGIIKPSDLLLHNGIAFTSPTGELYAFKNITTGKTLQVLPCETPSQLIVINNTVVGAITSSNSTENNRFTTTIVTPTFFYSTNATTLNCTKPVLSYGPISVCSDGAIAGTSTLQNTRPSIVSLYDGEIEIPSAFSLSVQTEYLQVQAEQVIVDCPQYVCNGNSRCLQLLAQYTSACSNIEVALHSSAQLDSREIISMFKTSTQSLQLANITNFKGDYNFSSILTSRVGGRSAIEDLLFNKVVTSGLGTVDQDYKSCSRNMAIADLVCSQYYNGIMVLPGVVDAEKMAMYTGSLTGAMVFGGLTAAAAIPFATAVQARLNYVALQTNVLQENQKILAESFNQAVGNISLALSSVNDAIQQTSEALNTVAIAIKKIQTVVNQQGEALSHLTAQLSNNFQAISTSIQDIYNRLEPPEANQQVDRLINGRLAALNAYVTQLLNQMSQIRQSRLLAQQKINECVKSQSPRYGFCGNGTHIFSLTQTAPNGIFFMHAVLVPNKFTRVNASAGICVDNTRGYSLQPQLILYQFNNSWRVTPRNMYEPRLPRQADFIQLTDCSVTFYNTTAANLPNIIPDVIDVNQTVSDIIDNLPTATPPQWDVGIYNNTILNLTVEINDLQERSKNLSQIADRLQNYIDNLNNTLVDLEWLNRVET

SEQ ID NO: 14942 - protein, 1120 aa, Artificial Sequence
  PDCoV/Swine/Thailand/S5011/2015__AMN91621.1 spike protein (variant)
MQRALLIMTLLCLARAKFADDLLDLLTFPGAHRFLHKPTRNDSILYSRANNNFDVGVLPGYPTKNVNLFSPLTNSTLPINGLHRSYQPLMLNCLTKITNQTLSMYLQPSEIQTYSCGGAMVKYQTHDAVRIILDLIATDRISVEVVGQAGENYVFVCSDQFNYTTALHNSTFFSLNSQLYCFTNNTYLGILPPDLTDFTVYRTGQFYANGYLLGTLPITVNYVRLYRGQLSANSAHFALANLTDTLITLTNTTISQITYCDKSVVDSIACQRSSHQVEDGFYSDPKSAVRARQRTIVTLPKLPELEVVQLNISAHMDFGEARLDSVTINGNTSYCVTKPYFRLETNFLCRGCTMNLRTDTCSFDLSAVNNGMSFSQFCLSTESGACEMKIIVTYVWNYLLRQRLYVTAVEGQTHTGTTSVHATDTSSVITDVCTDYTIYGVSGTGIIKPSDLLLHNGIAFTSPTGELYAFKNITTGKTLQVLPCETPSQLIVINNTVVGAITSSNSTENNRFTTTIVTPTFFYSTNATTLNCTKPVLSYGPISVCSDGAIAGTSTLQNTRPSIVSLYDGEIEIPSAFSLSVQTEYLQVQAEQVIVDCPQYVCNGNSRCLQLLAQYTSACSNIEVALHSSAQLDSREIISMFKTSTQSLQLANITNFKGDYNFSSILTSRVGGRSAIEDLLFNKVVTSGLGTVDQDYKSCSRNMAIADLVCSQYYNGIMVLPGVVDAEKMAMYTGSLTGAMVFGGLTAAAAIPFATAVQARLNYVALQTNVLQENQKILAESFNQAVGNISLALSSVNDAIQQTSEALNTVAIAIKKIQTVVNQQGEALSHLTAQLSNNFQAISTSIQDIYNRLEPPEANQQVDRLINGRLAALNAYVTQLLNQMSQIRQSRLLAQQKINECVKSQSPRYGFCGNGTHIFSLTQTAPNGIFFMHAVLVPNKFTRVNASAGICVDNTRGYSLQPQLILYQFNNSWRVTPRNMYEPRLPRQADFIQLTDCSVTFYNTTAANLPNIIPDVIDVNQTVSDIIDNLPTATPPQWDVGIYNNTILNLTVEINDLQERSKNLSQIADRLQNYIDNLNNTLVDLEWLNRVETGGYIPEAPRDGQAYVRKDGEWVLLSTF

SEQ ID NO: 14943 - protein, 1386 aa, Artificial Sequence
  PEDV/NPL-PEDv/2013/P10__AHZ94887.1 spike protein (1-1386)
MKSLTYFWLFLPVLSTLSLPQDVTRCSANTNFRRFFSKFNVQAPAVVVLGGYLPIGENQGVNSTWYCAGQHPTASGVHGIFVSHIRGGHGFEIGISQEPFDPSGYQLYLHKATNGNTNATARLRICQFPSIKTLGPTANNDVTTGRNCLFNKAIPAHMSEHSVVGITWDNDRVTVFSDKIYYFYFKNDWSRVATKCYNSGGCAMQYVYEPTYYMLNVTSAGEDGISYQPCTANCIGYAANVFATEPNGHIPEGFSFNNWFLLSNDSTLVHGKVVSNQPLLVNCLLAIPKIYGLGQFFSFNQTIDGVCNGAAVQRAPEALRFNINDISVILAEGSIVLHTALGTNFSFVCSNSSNPHLATFAIPLGATQVPYYCFFKVDTYNSTVYKFLAVLPPTVREIVITKYGDVYVNGFGYLHLGLLDAVTINFTGHGTDDDVSGFWTIASTNFVDALIEVQGTAIQRILYCDDPVSQLKCSQVAFDLDDGFYTISSRNLLSHEQPISFVTLPSFNDHSFVNITVSASFGGHSGANLIASDTTINGFSSFCVDTRQFTISLFYNVTNSYGYVSKSQDSNCPFTLQSVNDYLSFSKFCVSTSLLASACTIDLFGYPEFGSGVKFTSLYFQFTKGELITGTPKPLEGVTDVSFMTLDVCTKYTIYGFKGEGIITLTNSSFLAGVYYTSDSGQLLAFKNVTSGAVYSVTPCSFSEQAAYVDDDIVGVISSLSSSTFNSTRELPGFFYHSNDGSNCTEPVLVYSNIGVCKSGSIGYVPSQSGQVKIAPTVTGNISIPTNFSMSIRTEYLQLYNTPVSVDCATYVCNGNSRCKQLLTQYTAACKTIESALQLSARLESVEVNSMLTISDEALQLATISSFNGDGYNFTNVLGVSVYDPASRRVVQKRSFIEDLLFNKVVTNGLGTVDEDYKRCSNGRSVADLVCAQYYSGVMVLPGVVDAEKLHMYSASLIGGMVLGGFTSAAALPFSYAVQARLNYLALQTDVLQRNQQLLAESFNSAIGNITSAFESVKEAISQTSKGLNTVAHALTKVQEVVNSQGAALTQLTVQLQHNFQAISSSIDDIYSRLDILSADAQVDRLITGRLSALNAFVAQTLTKYTEVQASRKLAQQKVNECVKSQSQRYGFCGGDGEHIFSLVQAAPQGLLFLHTVLVPSDFVDVIAIAGLCVNDEIALTLREPGLVLFTHELQNHTATEYFVSSRRMFEPRKPTVSDFVQIESCVVTYVNLTRDQLPDVIPDYIDVNKTLYEILASLPNRTGPSLPLDVFNATYLNLTGEIADLEQRSESLRNTTEELQSLIYNINNTLVDLEWLNRVETYIKWPWWVWLIIFIVLIFVVSLLVFCCISTGCCGCCGCCCACFSGCCRGPRLQPYEVFEKVHVQ

SEQ ID NO: 14944 - protein, 1386 aa, Artificial Sequence
  PEDV/NPL-PEDv/2013/P10__AHZ94887.1 spike protein (1-1386)(I1076P_L1077P)
MKSLTYFWLFLPVLSTLSLPQDVTRCSANTNFRRFFSKFNVQAPAVVVLGGYLPIGENQGVNSTWYCAGQHPTASGVHGIFVSHIRGGHGFEIGISQEPFDPSGYQLYLHKATNGNTNATARLRICQFPSIKTLGPTANNDVTTGRNCLFNKAIPAHMSEHSVVGITWDNDRVTVFSDKIYYFYFKNDWSRVATKCYNSGGCAMQYVYEPTYYMLNVTSAGEDGISYQPCTANCIGYAANVFATEPNGHIPEGFSFNNWFLLSNDSTLVHGKVVSNQPLLVNCLLAIPKIYGLGQFFSFNQTIDGVCNGAAVQRAPEALRFNINDISVILAEGSIVLHTALGTNFSFVCSNSSNPHLATFAIPLGATQVPYYCFFKVDTYNSTVYKFLAVLPPTVREIVITKYGDVYVNGFGYLHLGLLDAVTINFTGHGTDDDVSGFWTIASTNFVDALIEVQGTAIQRILYCDDPVSQLKCSQVAFDLDDGFYTISSRNLLSHEQPISFVTLPSFNDHSFVNITVSASFGGHSGANLIASDTTINGFSSFCVDTRQFTISLFYNVTNSYGYVSKSQDSNCPFTLQSVNDYLSFSKFCVSTSLLASACTIDLFGYPEFGSGVKFTSLYFQFTKGELITGTPKPLEGVTDVSFMTLDVCTKYTIYGFKGEGIITLTNSSFLAGVYYTSDSGQLLAFKNVTSGAVYSVTPCSFSEQAAYVDDDIVGVISSLSSSTFNSTRELPGFFYHSNDGSNCTEPVLVYSNIGVCKSGSIGYVPSQSGQVKIAPTVTGNISIPTNFSMSIRTEYLQLYNTPVSVDCATYVCNGNSRCKQLLTQYTAACKTIESALQLSARLESVEVNSMLTISDEALQLATISSFNGDGYNFTNVLGVSVYDPASRRVVQKRSFIEDLLFNKVVTNGLGTVDEDYKRCSNGRSVADLVCAQYYSGVMVLPGVVDAEKLHMYSASLIGGMVLGGFTSAAALPFSYAVQARLNYLALQTDVLQRNQQLLAESFNSAIGNITSAFESVKEAISQTSKGLNTVAHALTKVQEVVNSQGAALTQLTVQLQHNFQAISSSIDDIYSRLDPPSADAQVDRLITGRLSALNAFVAQTLTKYTEVQASRKLAQQKVNECVKSQSQRYGFCGGDGEHIFSLVQAAPQGLLFLHTVLVPSDFVDVIAIAGLCVNDEIALTLREPGLVLFTHELQNHTATEYFVSSRRMFEPRKPTVSDFVQIESCVVTYVNLTRDQLPDVIPDYIDVNKTLYEILASLPNRTGPSLPLDVFNATYLNLTGEIADLEQRSESLRNTTEELQSLIYNINNTLVDLEWLNRVETYIKWPWWVWLIIFIVLIFVVSLLVFCCISTGCCGCCGCCCACFSGCCRGPRLQPYEVFEKVHVQ

SEQ ID NO: 14945 - protein, 1322 aa, Artificial Sequence
  PEDV/NPL-PEDv/2013/P10__AHZ94887.1 spike protein (variant)
MKSLTYFWLFLPVLSTLSLPQDVTRCSANTNFRRFFSKFNVQAPAVVVLGGYLPIGENQGVNSTWYCAGQHPTASGVHGIFVSHIRGGHGFEIGISQEPFDPSGYQLYLHKATNGNTNATARLRICQFPSIKTLGPTANNDVTTGRNCLFNKAIPAHMSEHSVVGITWDNDRVTVFSDKIYYFYFKNDWSRVATKCYNSGGCAMQYVYEPTYYMLNVTSAGEDGISYQPCTANCIGYAANVFATEPNGHIPEGFSFNNWFLLSNDSTLVHGKVVSNQPLLVNCLLAIPKIYGLGQFFSFNQTIDGVCNGAAVQRAPEALRFNINDISVILAEGSIVLHTALGTNFSFVCSNSSNPHLATFAIPLGATQVPYYCFFKVDTYNSTVYKFLAVLPPTVREIVITKYGDVYVNGFGYLHLGLLDAVTINFTGHGTDDDVSGFWTIASTNFVDALIEVQGTAIQRILYCDDPVSQLKCSQVAFDLDDGFYTISSRNLLSHEQPISFVTLPSFNDHSFVNITVSASFGGHSGANLIASDTTINGFSSFCVDTRQFTISLFYNVTNSYGYVSKSQDSNCPFTLQSVNDYLSFSKFCVSTSLLASACTIDLFGYPEFGSGVKFTSLYFQFTKGELITGTPKPLEGVTDVSFMTLDVCTKYTIYGFKGEGIITLTNSSFLAGVYYTSDSGQLLAFKNVTSGAVYSVTPCSFSEQAAYVDDDIVGVISSLSSSTFNSTRELPGFFYHSNDGSNCTEPVLVYSNIGVCKSGSIGYVPSQSGQVKIAPTVTGNISIPTNFSMSIRTEYLQLYNTPVSVDCATYVCNGNSRCKQLLTQYTAACKTIESALQLSARLESVEVNSMLTISDEALQLATISSFNGDGYNFTNVLGVSVYDPASRRVVQKRSFIEDLLFNKVVTNGLGTVDEDYKRCSNGRSVADLVCAQYYSGVMVLPGVVDAEKLHMYSASLIGGMVLGGFTSAAALPFSYAVQARLNYLALQTDVLQRNQQLLAESFNSAIGNITSAFESVKEAISQTSKGLNTVAHALTKVQEVVNSQGAALTQLTVQLQHNFQAISSSIDDIYSRLDPPSADAQVDRLITGRLSALNAFVAQTLTKYTEVQASRKLAQQKVNECVKSQSQRYGFCGGDGEHIFSLVQAAPQGLLFLHTVLVPSDFVDVIAIAGLCVNDEIALTLREPGLVLFTHELQNHTATEYFVSSRRMFEPRKPTVSDFVQIESCVVTYVNLTRDQLPDVIPDYIDVNKTLYEILASLPNRTGPSLPLDVFNATYLNLTGEIADLEQRSESLRNTTEELQSLIYNINNTLVDLEWLNRVET

SEQ ID NO: 14946 - protein, 1349 aa, Artificial Sequence
  PEDV/NPL-PEDv/2013/P10__AHZ94887.1 spike protein (variant)
MKSLTYFWLFLPVLSTLSLPQDVTRCSANTNFRRFFSKFNVQAPAVVVLGGYLPIGENQGVNSTWYCAGQHPTASGVHGIFVSHIRGGHGFEIGISQEPFDPSGYQLYLHKATNGNTNATARLRICQFPSIKTLGPTANNDVTTGRNCLFNKAIPAHMSEHSVVGITWDNDRVTVFSDKIYYFYFKNDWSRVATKCYNSGGCAMQYVYEPTYYMLNVTSAGEDGISYQPCTANCIGYAANVFATEPNGHIPEGFSFNNWFLLSNDSTLVHGKVVSNQPLLVNCLLAIPKIYGLGQFFSFNQTIDGVCNGAAVQRAPEALRFNINDISVILAEGSIVLHTALGTNFSFVCSNSSNPHLATFAIPLGATQVPYYCFFKVDTYNSTVYKFLAVLPPTVREIVITKYGDVYVNGFGYLHLGLLDAVTINFTGHGTDDDVSGFWTIASTNFVDALIEVQGTAIQRILYCDDPVSQLKCSQVAFDLDDGFYTISSRNLLSHEQPISFVTLPSFNDHSFVNITVSASFGGHSGANLIASDTTINGFSSFCVDTRQFTISLFYNVTNSYGYVSKSQDSNCPFTLQSVNDYLSFSKFCVSTSLLASACTIDLFGYPEFGSGVKFTSLYFQFTKGELITGTPKPLEGVTDVSFMTLDVCTKYTIYGFKGEGIITLTNSSFLAGVYYTSDSGQLLAFKNVTSGAVYSVTPCSFSEQAAYVDDDIVGVISSLSSSTFNSTRELPGFFYHSNDGSNCTEPVLVYSNIGVCKSGSIGYVPSQSGQVKIAPTVTGNISIPTNFSMSIRTEYLQLYNTPVSVDCATYVCNGNSRCKQLLTQYTAACKTIESALQLSARLESVEVNSMLTISDEALQLATISSFNGDGYNFTNVLGVSVYDPASRRVVQKRSFIEDLLFNKVVTNGLGTVDEDYKRCSNGRSVADLVCAQYYSGVMVLPGVVDAEKLHMYSASLIGGMVLGGFTSAAALPFSYAVQARLNYLALQTDVLQRNQQLLAESFNSAIGNITSAFESVKEAISQTSKGLNTVAHALTKVQEVVNSQGAALTQLTVQLQHNFQAISSSIDDIYSRLDPPSADAQVDRLITGRLSALNAFVAQTLTKYTEVQASRKLAQQKVNECVKSQSQRYGFCGGDGEHIFSLVQAAPQGLLFLHTVLVPSDFVDVIAIAGLCVNDEIALTLREPGLVLFTHELQNHTATEYFVSSRRMFEPRKPTVSDFVQIESCVVTYVNLTRDQLPDVIPDYIDVNKTLYEILASLPNRTGPSLPLDVFNATYLNLTGEIADLEQRSESLRNTTEELQSLIYNINNTLVDLEWLNRVETGGYIPEAPRDGQAYVRKDGEWVLLSTF

SEQ ID NO: 14947 - protein, 1361 aa, Artificial Sequence
  MHV/S__BAK18575.1 spike protein (1-1361)
MLSVFILFLPSCLGYIGDFRCINLVNTDTSNASAPSVSTEVVDVSKGIGTYYVLDRVYLNATLLLTGYYPVDGSNYRNLALTGTNTLSLNWYKPPFLSEFNDGIFAKVKNLKASLPKDSTSYFPTIVIGSNFVTTSYTVVLEPYNGIIMASICQYTICLLPYTDCKPNTGGNKLIGFWHIDLKSPVCILKRNFTFNVNADWLYFHFYQQGGTFYAYYADAGSATTFLFSSYIGDVLTQYFVLPFVCTPTTTGVFSPQYWVTPLVKRQYLFNFNQKGTITSAVDCASSYTSEIKCKTQSMNPNTGVYDLSGYTVQPVGLVYRRVRNLPDCRIEDWLAAKTVPSPLNWERKTFQNCNFNLSSLLRLVQAGSLSCSNIDAAKVYGMCFGSMSIDKFAIPNSRRVDLQLGNSGFLQSFNYKIDTRATSCQLYYSLAQSNVTVNNHNPSSWNRRYGFNDVATFGRGKHDVAYAEACFTVGASYCPCANPSIVSPCTTGKPKFANCPTGTTNRECNVLALGSNLFKCDCTCNPSPLTTYDLRCLQGRSMLGVGDHCEGLGVLEDKCGGSNTCNCSADAFVGWAKDSCLSNGRCHIFSNLMLNGINSGTTCSTDLQLPNTEVVTGICVKYDLYGITGQGVFKEVKADYYNSWQNLLYDVNGNLNGFRDIVTNKTYLTRSCYSGRVSAAYHQDAPEPALLYRNLKCDYVFNNNIFREETPLNYFDSYLGCVVNADNSTEQAVDACDLRMGSGLCVNYSTAHRARTSVSTGYKLTTFEPFTVSIVNDSVESVGGLYEMQIPTNFTIASHQEFIQTRAPKVTIDCAAFVCGDYTTCRQQLVEYGSFCDNINAILGEVNNLIDTMQLQVASALIQGVTLSSRLADGISGQIDDINFSPLLGCLGSQCSEGTMAAQGRSTVEDLLFDKVKLSDVGFVEAYNNCTGGQEVRDLLCVQSFNGIKVLPPVLSENQVSGYTAGATASSMFPPWSAAAGVPFSLSVQYRINGLGVTMNVLSENQKMIASAFNNAIGAIQEGFDATNSALAKIQSVVNANAEALNNLLNQLSNRFGAISASLQEILSRLDALEAQAQIDRLINGRLTALNAYVSKQLSDMTLIKVSAAQAIEKVNECVKSQSPRINFCGNGNHILSLVQNAPYGLYFLHFSYVPTSFTTANVSPGLCISGDRGLAPKAGYFVQDDGEWKFTGSNYYYPEPITDKNSVVMSSCAVNYTKAPEVFLNTSISNLPDFKEELDKWFKNQTSVAPDLSLDFEKLNVTFLDLSDEMNRIQEAIKKLNESYINLKEIGTYEMYVKWPWYVWLLIGLAGVAVCVLLFFICCCTGCGSCCFKKCGNCCDEYGGHQDSIVIHNISSHED

SEQ ID NO: 14948 - protein, 1361 aa, Artificial Sequence
  MHV/S__BAK18575.1 spike protein (1-1361)(A1073P_L1074P)
MLSVFILFLPSCLGYIGDFRCINLVNTDTSNASAPSVSTEVVDVSKGIGTYYVLDRVYLNATLLLTGYYPVDGSNYRNLALTGTNTLSLNWYKPPFLSEFNDGIFAKVKNLKASLPKDSTSYFPTIVIGSNFVTTSYTVVLEPYNGIIMASICQYTICLLPYTDCKPNTGGNKLIGFWHIDLKSPVCILKRNFTFNVNADWLYFHFYQQGGTFYAYYADAGSATTFLFSSYIGDVLTQYFVLPFVCTPTTTGVFSPQYWVTPLVKRQYLFNFNQKGTITSAVDCASSYTSEIKCKTQSMNPNTGVYDLSGYTVQPVGLVYRRVRNLPDCRIEDWLAAKTVPSPLNWERKTFQNCNFNLSSLLRLVQAGSLSCSNIDAAKVYGMCFGSMSIDKFAIPNSRRVDLQLGNSGFLQSFNYKIDTRATSCQLYYSLAQSNVTVNNHNPSSWNRRYGFNDVATFGRGKHDVAYAEACFTVGASYCPCANPSIVSPCTTGKPKFANCPTGTTNRECNVLALGSNLFKCDCTCNPSPLTTYDLRCLQGRSMLGVGDHCEGLGVLEDKCGGSNTCNCSADAFVGWAKDSCLSNGRCHIFSNLMLNGINSGTTCSTDLQLPNTEVVTGICVKYDLYGITGQGVFKEVKADYYNSWQNLLYDVNGNLNGFRDIVTNKTYLTRSCYSGRVSAAYHQDAPEPALLYRNLKCDYVFNNNIFREETPLNYFDSYLGCVVNADNSTEQAVDACDLRMGSGLCVNYSTAHRARTSVSTGYKLTTFEPFTVSIVNDSVESVGGLYEMQIPTNFTIASHQEFIQTRAPKVTIDCAAFVCGDYTTCRQQLVEYGSFCDNINAILGEVNNLIDTMQLQVASALIQGVTLSSRLADGISGQIDDINFSPLLGCLGSQCSEGTMAAQGRSTVEDLLFDKVKLSDVGFVEAYNNCTGGQEVRDLLCVQSFNGIKVLPPVLSENQVSGYTAGATASSMFPPWSAAAGVPFSLSVQYRINGLGVTMNVLSENQKMIASAFNNAIGAIQEGFDATNSALAKIQSVVNANAEALNNLLNQLSNRFGAISASLQEILSRLDPPEAQAQIDRLINGRLTALNAYVSKQLSDMTLIKVSAAQAIEKVNECVKSQSPRINFCGNGNHILSLVQNAPYGLYFLHFSYVPTSFTTANVSPGLCISGDRGLAPKAGYFVQDDGEWKFTGSNYYYPEPITDKNSVVMSSCAVNYTKAPEVFLNTSISNLPDFKEELDKWFKNQTSVAPDLSLDFEKLNVTFLDLSDEMNRIQEAIKKLNESYINLKEIGTYEMYVKWPWYVWLLIGLAGVAVCVLLFFICCCTGCGSCCFKKCGNCCDEYGGHQDSIVIHNISSHED

SEQ ID NO: 14949 - protein, 1297 aa, Artificial Sequence
  MHV/S__BAK18575.1 spike protein (variant)
MLSVFILFLPSCLGYIGDFRCINLVNTDTSNASAPSVSTEVVDVSKGIGTYYVLDRVYLNATLLLTGYYPVDGSNYRNLALTGTNTLSLNWYKPPFLSEFNDGIFAKVKNLKASLPKDSTSYFPTIVIGSNFVTTSYTVVLEPYNGIIMASICQYTICLLPYTDCKPNTGGNKLIGFWHIDLKSPVCILKRNFTFNVNADWLYFHFYQQGGTFYAYYADAGSATTFLFSSYIGDVLTQYFVLPFVCTPTTTGVFSPQYWVTPLVKRQYLFNFNQKGTITSAVDCASSYTSEIKCKTQSMNPNTGVYDLSGYTVQPVGLVYRRVRNLPDCRIEDWLAAKTVPSPLNWERKTFQNCNFNLSSLLRLVQAGSLSCSNIDAAKVYGMCFGSMSIDKFAIPNSRRVDLQLGNSGFLQSFNYKIDTRATSCQLYYSLAQSNVTVNNHNPSSWNRRYGFNDVATFGRGKHDVAYAEACFTVGASYCPCANPSIVSPCTTGKPKFANCPTGTTNRECNVLALGSNLFKCDCTCNPSPLTTYDLRCLQGRSMLGVGDHCEGLGVLEDKCGGSNTCNCSADAFVGWAKDSCLSNGRCHIFSNLMLNGINSGTTCSTDLQLPNTEVVTGICVKYDLYGITGQGVFKEVKADYYNSWQNLLYDVNGNLNGFRDIVTNKTYLTRSCYSGRVSAAYHQDAPEPALLYRNLKCDYVFNNNIFREETPLNYFDSYLGCVVNADNSTEQAVDACDLRMGSGLCVNYSTAHRARTSVSTGYKLTTFEPFTVSIVNDSVESVGGLYEMQIPTNFTIASHQEFIQTRAPKVTIDCAAFVCGDYTTCRQQLVEYGSFCDNINAILGEVNNLIDTMQLQVASALIQGVTLSSRLADGISGQIDDINFSPLLGCLGSQCSEGTMAAQGRSTVEDLLFDKVKLSDVGFVEAYNNCTGGQEVRDLLCVQSFNGIKVLPPVLSENQVSGYTAGATASSMFPPWSAAAGVPFSLSVQYRINGLGVTMNVLSENQKMIASAFNNAIGAIQEGFDATNSALAKIQSVVNANAEALNNLLNQLSNRFGAISASLQEILSRLDPPEAQAQIDRLINGRLTALNAYVSKQLSDMTLIKVSAAQAIEKVNECVKSQSPRINFCGNGNHILSLVQNAPYGLYFLHFSYVPTSFTTANVSPGLCISGDRGLAPKAGYFVQDDGEWKFTGSNYYYPEPITDKNSVVMSSCAVNYTKAPEVFLNTSISNLPDFKEELDKWFKNQTSVAPDLSLDFEKLNVTFLDLSDEMNRIQEAIKKLNESYINLKEIGTYEM

SEQ ID NO: 14950 - protein, 1324 aa, Artificial Sequence
  MHV/S__BAK18575.1 spike protein (variant)
MLSVFILFLPSCLGYIGDFRCINLVNTDTSNASAPSVSTEVVDVSKGIGTYYVLDRVYLNATLLLTGYYPVDGSNYRNLALTGTNTLSLNWYKPPFLSEFNDGIFAKVKNLKASLPKDSTSYFPTIVIGSNFVTTSYTVVLEPYNGIIMASICQYTICLLPYTDCKPNTGGNKLIGFWHIDLKSPVCILKRNFTFNVNADWLYFHFYQQGGTFYAYYADAGSATTFLFSSYIGDVLTQYFVLPFVCTPTTTGVFSPQYWVTPLVKRQYLFNFNQKGTITSAVDCASSYTSEIKCKTQSMNPNTGVYDLSGYTVQPVGLVYRRVRNLPDCRIEDWLAAKTVPSPLNWERKTFQNCNFNLSSLLRLVQAGSLSCSNIDAAKVYGMCFGSMSIDKFAIPNSRRVDLQLGNSGFLQSFNYKIDTRATSCQLYYSLAQSNVTVNNHNPSSWNRRYGFNDVATFGRGKHDVAYAEACFTVGASYCPCANPSIVSPCTTGKPKFANCPTGTTNRECNVLALGSNLFKCDCTCNPSPLTTYDLRCLQGRSMLGVGDHCEGLGVLEDKCGGSNTCNCSADAFVGWAKDSCLSNGRCHIFSNLMLNGINSGTTCSTDLQLPNTEVVTGICVKYDLYGITGQGVFKEVKADYYNSWQNLLYDVNGNLNGFRDIVTNKTYLTRSCYSGRVSAAYHQDAPEPALLYRNLKCDYVFNNNIFREETPLNYFDSYLGCVVNADNSTEQAVDACDLRMGSGLCVNYSTAHRARTSVSTGYKLTTFEPFTVSIVNDSVESVGGLYEMQIPTNFTIASHQEFIQTRAPKVTIDCAAFVCGDYTTCRQQLVEYGSFCDNINAILGEVNNLIDTMQLQVASALIQGVTLSSRLADGISGQIDDINFSPLLGCLGSQCSEGTMAAQGRSTVEDLLFDKVKLSDVGFVEAYNNCTGGQEVRDLLCVQSFNGIKVLPPVLSENQVSGYTAGATASSMFPPWSAAAGVPFSLSVQYRINGLGVTMNVLSENQKMIASAFNNAIGAIQEGFDATNSALAKIQSVVNANAEALNNLLNQLSNRFGAISASLQEILSRLDPPEAQAQIDRLINGRLTALNAYVSKQLSDMTLIKVSAAQAIEKVNECVKSQSPRINFCGNGNHILSLVQNAPYGLYFLHFSYVPTSFTTANVSPGLCISGDRGLAPKAGYFVQDDGEWKFTGSNYYYPEPITDKNSVVMSSCAVNYTKAPEVFLNTSISNLPDFKEELDKWFKNQTSVAPDLSLDFEKLNVTFLDLSDEMNRIQEAIKKLNESYINLKEIGTYEMGGYIPEAPRDGQAYVRKDGEWVLLSTF

SEQ ID NO: 14951 - RNA, 3768 nt, Artificial Sequence
  SARS-CoV__P59594.1 spike protein CDS gc (1-1255)
auguucaucuuccugcuguuccugacccugaccagcggcuccgaccucgaccgcugcacgaccuucgacgacgugcaggcccccaacuacacccagcacaccagcuccaugcgcggggucuacuacccggacgagaucuuccggagcgacacgcuguaccugacccaggaccucuuccugcccuucuacuccaacgugaccggcuuccacaccaucaaccacacguucgggaaccccgugauccccuucaaggacggcaucuacuucgccgcgaccgagaaguccaacgucgugcggggguggguguucggcagcaccaugaacaacaagagccaguccgucaucaucaucaacaacagcaccaacguggugauccgcgccugcaacuucgagcugugcgacaacccguucuucgccgucuccaagcccaugggcacgcagacccacaccaugaucuucgacaacgccuucaacugcaccuucgaguacaucagcgacgccuucucccucgacgugagcgagaaguccgggaacuucaagcaccuccgggaguucguguucaagaacaaggacggcuuccuguacgucuacaagggguaccagcccaucgacguggugcgcgaccuccccagcggcuucaacacgcugaagccgaucuucaagcugccccucgggaucaacaucaccaacuuccgggcgauccugaccgccuucucccccgcccaggacaucuggggcaccagcgccgcggccuacuucgucggcuaccugaagcccacgaccuucaugcucaaguacgacgagaacgggaccaucaccgacgccguggacugcucccagaacccgcuggccgagcugaagugcagcgucaagagcuucgagaucgacaagggcaucuaccagacguccaacuuccgcguggugcccagcggggacgugguccgguuccccaacaucaccaaccucugccccuucggcgagguguucaacgccaccaaguucccguccguguacgcgugggagcgcaagaagaucagcaacugcgucgccgacuacuccgugcuguacaacagcaccuucuucuccacguucaagugcuacggcgucagcgccaccaagcugaacgaccucugcuucuccaacguguacgccgacagcuucguggucaagggggacgacgugcggcagaucgcccccggccagaccggggugaucgcggacuacaacuacaagcugcccgacgacuucaugggcugcguccuggccuggaacacccgcaacaucgacgccacguccaccgggaacuacaacuacaaguaccgguaccuccgccacggcaagcugcggcccuucgagcgcgacaucagcaacgugccguucucccccgacggcaagcccugcacgcccccggcccugaacugcuacuggccccucaacgacuacggguucuacaccaccaccggcaucggguaccagcccuaccggguggucgugcugagcuucgagcugcucaacgcccccgcgaccgugugcggcccgaagcuguccaccgaccugaucaagaaccagugcgucaacuucaacuucaacgggcucaccggcacgggcgugcugacccccagcuccaagcgcuuccagcccuuccagcaguucgggcgggacgugagcgacuucaccgacuccguccgcgacccgaagaccagcgagauccuggacaucagccccugcuccuucggcggggugagcgugaucacgcccggcaccaacgccuccagcgaggucgccgugcucuaccaggacgugaacugcaccgacgucuccaccgccauccacgccgaccagcugacgcccgcguggcggaucuacagcaccgggaacaacguguuccagacccaggccggcugccugaucggcgccgagcacguggacaccuccuacgagugcgacaucccgaucggggccggcaucugcgcgagcuaccacacggucucccuccugcgcagcaccucccagaaguccaucguggccuacaccaugagccugggggccgacagcuccaucgccuacagcaacaacaccaucgccauccccacgaacuucuccaucagcaucaccaccgaggugaugcccgucagcauggcgaagaccuccguggacugcaacauguacaucugcggcgacagcacggagugcgccaaccuccugcugcaguacggcuccuucugcacccagcugaaccgcgcccucagcgggaucgccgccgagcaggaccggaacacccgcgagguguucgcgcaggucaagcagauguacaagacccccacgcugaaguacuucggcggguucaacuucucccagauccugccggacccccucaagcccaccaagcggagcuucaucgaggaccugcuguucaacaaggugacccucgccgacgccggcuucaugaagcaguacggggagugccugggcgacaucaacgcccgcgaccugaucugcgcccagaaguucaacggccucaccgugcugcccccgcugcucacggacgacaugaucgcggccuacaccgccgcccuggucuccgggaccgcgaccgccggcuggacguucggggccggcgccgcccugcagauccccuucgcgaugcagauggccuaccgguucaacgggaucggcgugacccagaacgugcucuacgagaaccagaagcagaucgccaaccaguucaacaaggccaucagccagauccaggagucccugaccaccacgagcaccgcccugggcaagcuccaggacgucgugaaccagaacgcgcaggcccugaacacccuggugaagcagcucuccagcaacuucggggccaucuccagcguccugaacgacauccugucccgccucgacaagguggaggccgaggugcagaucgaccggcugaucaccggccgccugcagagccuccagaccuacgucacgcagcagcugauccgggccgcggagauccgcgccuccgccaaccuggccgcgaccaagaugagcgagugcgugcucgggcaguccaagcggguggacuucugcggcaagggguaccaccugaugagcuucccccaggccgcgccccacggcgucguguuccugcacgugaccuacgucccgagccaggagcgcaacuucaccacggcccccgccaucugccacgagggcaaggccuacuucccccgggaggggguguucguguucaacggcaccuccugguucaucacccagcgcaacuucuucagcccccagaucaucaccacggacaacaccuucgucuccgggaacugcgacguggucaucggcaucaucaacaacaccguguacgacccgcuccagcccgagcuggacagcuucaaggaggagcuggacaaguacuucaagaaccacaccucccccgacguggaccucggggacaucagcggcaucaacgccuccgucgugaacauccagaaggagaucgaccggcugaacgagguggccaagaaccugaacgagagccucaucgaccugcaggagcugggcaaguacgagcaguacaucaaguggcccugguacgucuggcucggguucaucgccggccugaucgccaucgugauggugacgauccugcucugcugcaugaccuccugcugcagcugccugaagggggcgugcuccugcggcagcugcugcaaguucgacgaggacgacuccgagccgguccugaagggcgugaagcuccacuacaccuga

SEQ ID NO: 14952 - RNA, 3768 nt, Artificial Sequence
  SARS-CoV__P59594.1 spike protein CDS gc (1-1255)(K968P_V969P)
auguucaucuuccugcuguuccugacccugaccagcggcuccgaccucgaccgcugcacgaccuucgacgacgugcaggcccccaacuacacccagcacaccagcuccaugcgcggggucuacuacccggacgagaucuuccggagcgacacgcuguaccugacccaggaccucuuccugcccuucuacuccaacgugaccggcuuccacaccaucaaccacacguucgggaaccccgugauccccuucaaggacggcaucuacuucgccgcgaccgagaaguccaacgucgugcggggguggguguucggcagcaccaugaacaacaagagccaguccgucaucaucaucaacaacagcaccaacguggugauccgcgccugcaacuucgagcugugcgacaacccguucuucgccgucuccaagcccaugggcacgcagacccacaccaugaucuucgacaacgccuucaacugcaccuucgaguacaucagcgacgccuucucccucgacgugagcgagaaguccgggaacuucaagcaccuccgggaguucguguucaagaacaaggacggcuuccuguacgucuacaagggguaccagcccaucgacguggugcgcgaccuccccagcggcuucaacacgcugaagccgaucuucaagcugccccucgggaucaacaucaccaacuuccgggcgauccugaccgccuucucccccgcccaggacaucuggggcaccagcgccgcggccuacuucgucggcuaccugaagcccacgaccuucaugcucaaguacgacgagaacgggaccaucaccgacgccguggacugcucccagaacccgcuggccgagcugaagugcagcgucaagagcuucgagaucgacaagggcaucuaccagacguccaacuuccgcguggugcccagcggggacgugguccgguuccccaacaucaccaaccucugccccuucggcgagguguucaacgccaccaaguucccguccguguacgcgugggagcgcaagaagaucagcaacugcgucgccgacuacuccgugcuguacaacagcaccuucuucuccacguucaagugcuacggcgucagcgccaccaagcugaacgaccucugcuucuccaacguguacgccgacagcuucguggucaagggggacgacgugcggcagaucgcccccggccagaccggggugaucgcggacuacaacuacaagcugcccgacgacuucaugggcugcguccuggccuggaacacccgcaacaucgacgccacguccaccgggaacuacaacuacaaguaccgguaccuccgccacggcaagcugcggcccuucgagcgcgacaucagcaacgugccguucucccccgacggcaagcccugcacgcccccggcccugaacugcuacuggccccucaacgacuacggguucuacaccaccaccggcaucggguaccagcccuaccggguggucgugcugagcuucgagcugcucaacgcccccgcgaccgugugcggcccgaagcuguccaccgaccugaucaagaaccagugcgucaacuucaacuucaacgggcucaccggcacgggcgugcugacccccagcuccaagcgcuuccagcccuuccagcaguucgggcgggacgugagcgacuucaccgacuccguccgcgacccgaagaccagcgagauccuggacaucagccccugcuccuucggcggggugagcgugaucacgcccggcaccaacgccuccagcgaggucgccgugcucuaccaggacgugaacugcaccgacgucuccaccgccauccacgccgaccagcugacgcccgcguggcggaucuacagcaccgggaacaacguguuccagacccaggccggcugccugaucggcgccgagcacguggacaccuccuacgagugcgacaucccgaucggggccggcaucugcgcgagcuaccacacggucucccuccugcgcagcaccucccagaaguccaucguggccuacaccaugagccugggggccgacagcuccaucgccuacagcaacaacaccaucgccauccccacgaacuucuccaucagcaucaccaccgaggugaugcccgucagcauggcgaagaccuccguggacugcaacauguacaucugcggcgacagcacggagugcgccaaccuccugcugcaguacggcuccuucugcacccagcugaaccgcgcccucagcgggaucgccgccgagcaggaccggaacacccgcgagguguucgcgcaggucaagcagauguacaagacccccacgcugaaguacuucggcggguucaacuucucccagauccugccggacccccucaagcccaccaagcggagcuucaucgaggaccugcuguucaacaaggugacccucgccgacgccggcuucaugaagcaguacggggagugccugggcgacaucaacgcccgcgaccugaucugcgcccagaaguucaacggccucaccgugcugcccccgcugcucacggacgacaugaucgcggccuacaccgccgcccuggucuccgggaccgcgaccgccggcuggacguucggggccggcgccgcccugcagauccccuucgcgaugcagauggccuaccgguucaacgggaucggcgugacccagaacgugcucuacgagaaccagaagcagaucgccaaccaguucaacaaggccaucagccagauccaggagucccugaccaccacgagcaccgcccugggcaagcuccaggacgucgugaaccagaacgcgcaggcccugaacacccuggugaagcagcucuccagcaacuucggggccaucuccagcguccugaacgacauccugucccgccucgacccgcccgaggccgaggugcagaucgaccggcugaucaccggccgccugcagagccuccagaccuacgugacgcagcagcugauccgggccgcggagauccgcgccuccgccaaccuggccgcgaccaagaugagcgagugcguccucgggcaguccaagcggguggacuucugcggcaagggguaccaccugaugagcuucccccaggccgcgccccacggcguggucuuccugcacgugaccuacgugcccagccaggagcgcaacuucaccacggcccccgccaucugccacgagggcaaggccuacuucccgcgggagggggucuucguguucaacggcaccuccugguucaucacccagcgcaacuucuucagcccccagaucaucaccacggacaacaccuucguguccgggaacugcgacgucgugaucggcaucaucaacaacaccgucuacgacccccuccagcccgagcuggacagcuucaaggaggagcuggacaaguacuucaagaaccacaccuccccggacguggaccucggggacaucagcggcaucaacgccuccguggucaacauccagaaggagaucgaccggcugaacgagguggccaagaaccugaacgagagccucaucgaccugcaggagcugggcaaguacgagcaguacaucaaguggcccugguacguguggcucggguucaucgccggccugaucgccaucgucauggugacgauccugcucugcugcaugaccuccugcugcagcugccugaagggggcgugcuccugcggcagcugcugcaaguucgacgaggacgacuccgagcccgugcugaagggcgucaagcuccacuacaccuga

SEQ ID NO: 14953 - RNA, 1581 nt, Artificial Sequence
  SARS-CoV__P59594.1 spike protein CDS gc (1-17_747-1255)
auguucaucuuccugcuguuccugacccugaccagcggcuccgaccucgaccgcgcccugagcgggaucgccgcggagcaggaccggaacacgcgcgagguguucgcccaggucaagcagauguacaagacccccacccugaaguacuucggcggguucaacuucucccagauccucccggacccccugaagcccaccaagcggagcuucaucgaggaccuccucuucaacaaggugacgcuggccgacgccggcuucaugaagcaguacggggagugccugggcgacaucaacgcccgcgaccucaucugcgcgcagaaguucaacggccugaccgugcugcccccgcuccugaccgacgacaugaucgccgccuacaccgccgcgcuggucuccgggacggccaccgccggcuggaccuucggggccggcgccgcgcuccagauccccuucgccaugcagauggccuaccgguucaacgggaucggcgugacccagaacgugcuguacgagaaccagaagcagaucgccaaccaguucaacaaggccaucagccagauccaggagucccugacgaccaccagcaccgcgcucggcaagcugcaggacgucgugaaccagaacgcccaggcccugaacacgcucgugaagcagcuguccagcaacuucggggccaucuccagcguccugaacgacauccucucccgccuggacaagguggaggccgaggugcagaucgaccggcugaucaccggccgccuccagagccugcagaccuacgucacccagcagcugauccgggcggccgagauccgcgccuccgccaaccucgccgcgacgaagaugagcgagugcgugcuggggcaguccaagcggguggacuucugcggcaagggcuaccaccugaugagcuucccccaggccgcgccccacggggucguguuccuccacgugaccuacgucccgucccaggagcgcaacuucaccaccgcccccgccaucugccacgagggcaaggccuacuucccccgggaggggguguucguguucaacggcacgagcugguucaucacccagcgcaacuucuucagcccccagaucaucaccaccgacaacacguucgucuccgggaacugcgacguggugaucggcaucaucaacaacaccgucuacgacccgcugcagcccgagcuggacagcuucaaggaggagcucgacaaguacuucaagaaccacaccucccccgacguggaccugggcgacaucagcgggaucaacgccuccgucgugaacauccagaaggagaucgaccggcugaacgagguggccaagaaccucaacgagagccugaucgaccugcaggagcucggcaaguacgagcaguacaucaaguggcccugguacgucuggcugggguucaucgccggccugaucgcgaucgugauggugaccauccugcucugcugcaugacguccugcugcagcugccugaagggggccugcuccugcggcagcugcugcaaguucgacgaggacgacuccgagccgguccugaagggcgugaagcuccacuacaccuga

SEQ ID NO: 14954 - RNA, 3768 nt, Artificial Sequence
  SARS-CoV/Tor2__NP_828851.1 spike protein CDS gc (1-1255)
auguucaucuuccugcuguuccugacccugaccagcggcuccgaccucgaccgcugcacgaccuucgacgacgugcaggcccccaacuacacccagcacaccagcuccaugcgcggggucuacuacccggacgagaucuuccggagcgacacgcuguaccugacccaggaccucuuccugcccuucuacuccaacgugaccggcuuccacaccaucaaccacacguucgggaaccccgugauccccuucaaggacggcaucuacuucgccgcgaccgagaaguccaacgucgugcggggguggguguucggcuccaccaugaacaacaagagccaguccgucaucaucaucaacaacagcaccaacguggugauccgcgccugcaacuucgagcugugcgacaacccguucuucgccgucuccaagcccaugggcacgcagacccacaccaugaucuucgacaacgccuucaacugcaccuucgaguacaucagcgacgccuucucccucgacgugagcgagaaguccgggaacuucaagcaccuccgggaguucguguucaagaacaaggacggcuuccuguacgucuacaagggguaccagcccaucgacguggugcgcgaccuccccagcggcuucaacacgcugaagccgaucuucaagcugccccucgggaucaacaucaccaacuuccgggcgauccugaccgccuucucccccgcccaggacaucuggggcaccagcgccgcggccuacuucgucggcuaccugaagcccacgaccuucaugcucaaguacgacgagaacgggaccaucaccgacgccguggacugcucccagaacccgcuggccgagcugaagugcagcgucaagagcuucgagaucgacaagggcaucuaccagacguccaacuuccgcguggugcccagcggggacgugguccgguuccccaacaucaccaaccucugccccuucggcgagguguucaacgccaccaaguucccguccguguacgcgugggagcgcaagaagaucagcaacugcgucgccgacuacuccgugcuguacaacagcaccuucuucuccacguucaagugcuacggcgucagcgccaccaagcugaacgaccucugcuucuccaacguguacgccgacagcuucguggucaagggggacgacgugcggcagaucgcccccggccagaccggggugaucgcggacuacaacuacaagcugcccgacgacuucaugggcugcguccuggccuggaacacccgcaacaucgacgccacguccaccgggaacuacaacuacaaguaccgguaccuccgccacggcaagcugcggcccuucgagcgcgacaucagcaacgugccguucucccccgacggcaagcccugcacgcccccggcccugaacugcuacuggccccucaacgacuacggguucuacaccaccaccggcaucggguaccagcccuaccggguggucgugcugagcuucgagcugcucaacgcccccgcgaccgugugcggcccgaagcuguccaccgaccugaucaagaaccagugcgucaacuucaacuucaacgggcucaccggcacgggcgugcugacccccagcuccaagcgcuuccagcccuuccagcaguucgggcgggacgugagcgacuucaccgacuccguccgcgacccgaagaccagcgagauccuggacaucagccccugcgccuucggcgggguguccgugaucacgcccggcaccaacgccagcuccgaggucgccgugcucuaccaggacgugaacugcaccgacgucagcaccgccauccacgcggaccagcugacgcccgccuggcggaucuacuccaccgggaacaacguguuccagacccaggccggcugccugaucggcgccgagcacguggacaccagcuacgagugcgacaucccgaucggggcgggcaucugcgccuccuaccacacggucagccuccugcgcuccaccagccagaaguccaucguggccuacaccaugagccugggggccgacuccagcaucgccuacuccaacaacaccaucgcgauccccacgaacuucagcaucuccaucaccaccgaggugaugcccgucagcauggccaagaccagcguggacugcaacauguacaucugcggcgacuccacggagugcgccaaccuccugcugcaguacggcagcuucugcacccagcugaaccgcgcccucuccgggaucgccgcggagcaggaccggaacacccgcgagguguucgcccaggucaagcagauguacaagacccccacgcugaaguacuucggcggguucaacuucagccagauccugccggacccccucaagcccaccaagcgguccuucaucgaggaccugcuguucaacaaggugacccucgccgacgccggcuucaugaagcaguacggggagugccugggcgacaucaacgcccgcgaccugaucugcgcgcagaaguucaacggccucaccgugcugcccccgcugcucacggacgacaugaucgccgccuacaccgccgcgcuggucagcgggaccgccaccgccggcuggacguucggggccggcgccgcgcugcagauccccuucgccaugcagauggccuaccgguucaacgggaucggcgugacccagaacgugcucuacgagaaccagaagcagaucgccaaccaguucaacaaggccaucucccagauccaggagagccugaccaccacguccaccgcgcugggcaagcuccaggacgucgugaaccagaacgcccaggcccugaacacccuggugaagcagcucagcuccaacuucggggccaucagcuccguccugaacgacauccugagccgccucgacaagguggaggccgaggugcagaucgaccggcugaucaccggccgccugcagucccuccagaccuacgucacgcagcagcugauccgggcggccgagauccgcgccagcgccaaccuggcggccaccaagauguccgagugcgugcucgggcagagcaagcggguggacuucugcggcaagggguaccaccugauguccuucccccaggccgcgccccacggcgucguguuccugcacgugaccuacgucccgagccaggagcgcaacuucaccacggcccccgccaucugccacgagggcaaggccuacuucccccgggaggggguguucguguucaacggcaccagcugguucaucacccagcgcaacuucuucagcccccagaucaucaccacggacaacaccuucgucagcgggaacugcgacguggucaucggcaucaucaacaacaccguguacgacccgcuccagcccgagcuggacuccuucaaggaggagcuggacaaguacuucaagaaccacaccagccccgacguggaccucggggacaucuccggcaucaacgccagcgucgugaacauccagaaggagaucgaccggcugaacgagguggccaagaaccugaacgagucccucaucgaccugcaggagcugggcaaguacgagcaguacaucaaguggcccugguacgucuggcucggguucaucgccggccugaucgcgaucgugauggugacgauccugcucugcugcaugaccagcugcugcuccugccugaagggggccugcagcugcggcuccugcugcaaguucgacgaggacgacagcgagccgguccugaagggcgugaagcuccacuacaccuga

SEQ ID NO: 14955 - RNA, 3768 nt, Artificial Sequence
  SARS-CoV/Tor2__NP_828851.1 spike protein CDS gc (1-1255)(K968P_V969P)
auguucaucuuccugcuguuccugacccugaccagcggcuccgaccucgaccgcugcacgaccuucgacgacgugcaggcccccaacuacacccagcacaccagcuccaugcgcggggucuacuacccggacgagaucuuccggagcgacacgcuguaccugacccaggaccucuuccugcccuucuacuccaacgugaccggcuuccacaccaucaaccacacguucgggaaccccgugauccccuucaaggacggcaucuacuucgccgcgaccgagaaguccaacgucgugcggggguggguguucggcuccaccaugaacaacaagagccaguccgucaucaucaucaacaacagcaccaacguggugauccgcgccugcaacuucgagcugugcgacaacccguucuucgccgucuccaagcccaugggcacgcagacccacaccaugaucuucgacaacgccuucaacugcaccuucgaguacaucagcgacgccuucucccucgacgugagcgagaaguccgggaacuucaagcaccuccgggaguucguguucaagaacaaggacggcuuccuguacgucuacaagggguaccagcccaucgacguggugcgcgaccuccccagcggcuucaacacgcugaagccgaucuucaagcugccccucgggaucaacaucaccaacuuccgggcgauccugaccgccuucucccccgcccaggacaucuggggcaccagcgccgcggccuacuucgucggcuaccugaagcccacgaccuucaugcucaaguacgacgagaacgggaccaucaccgacgccguggacugcucccagaacccgcuggccgagcugaagugcagcgucaagagcuucgagaucgacaagggcaucuaccagacguccaacuuccgcguggugcccagcggggacgugguccgguuccccaacaucaccaaccucugccccuucggcgagguguucaacgccaccaaguucccguccguguacgcgugggagcgcaagaagaucagcaacugcgucgccgacuacuccgugcuguacaacagcaccuucuucuccacguucaagugcuacggcgucagcgccaccaagcugaacgaccucugcuucuccaacguguacgccgacagcuucguggucaagggggacgacgugcggcagaucgcccccggccagaccggggugaucgcggacuacaacuacaagcugcccgacgacuucaugggcugcguccuggccuggaacacccgcaacaucgacgccacguccaccgggaacuacaacuacaaguaccgguaccuccgccacggcaagcugcggcccuucgagcgcgacaucagcaacgugccguucucccccgacggcaagcccugcacgcccccggcccugaacugcuacuggccccucaacgacuacggguucuacaccaccaccggcaucggguaccagcccuaccggguggucgugcugagcuucgagcugcucaacgcccccgcgaccgugugcggcccgaagcuguccaccgaccugaucaagaaccagugcgucaacuucaacuucaacgggcucaccggcacgggcgugcugacccccagcuccaagcgcuuccagcccuuccagcaguucgggcgggacgugagcgacuucaccgacuccguccgcgacccgaagaccagcgagauccuggacaucagccccugcgccuucggcgggguguccgugaucacgcccggcaccaacgccagcuccgaggucgccgugcucuaccaggacgugaacugcaccgacgucagcaccgccauccacgcggaccagcugacgcccgccuggcggaucuacuccaccgggaacaacguguuccagacccaggccggcugccugaucggcgccgagcacguggacaccagcuacgagugcgacaucccgaucggggcgggcaucugcgccuccuaccacacggucagccuccugcgcuccaccagccagaaguccaucguggccuacaccaugagccugggggccgacuccagcaucgccuacuccaacaacaccaucgcgauccccacgaacuucagcaucuccaucaccaccgaggugaugcccgucagcauggccaagaccagcguggacugcaacauguacaucugcggcgacuccacggagugcgccaaccuccugcugcaguacggcagcuucugcacccagcugaaccgcgcccucuccgggaucgccgcggagcaggaccggaacacccgcgagguguucgcccaggucaagcagauguacaagacccccacgcugaaguacuucggcggguucaacuucagccagauccugccggacccccucaagcccaccaagcgguccuucaucgaggaccugcuguucaacaaggugacccucgccgacgccggcuucaugaagcaguacggggagugccugggcgacaucaacgcccgcgaccugaucugcgcgcagaaguucaacggccucaccgugcugcccccgcugcucacggacgacaugaucgccgccuacaccgccgcgcuggucagcgggaccgccaccgccggcuggacguucggggccggcgccgcgcugcagauccccuucgccaugcagauggccuaccgguucaacgggaucggcgugacccagaacgugcucuacgagaaccagaagcagaucgccaaccaguucaacaaggccaucucccagauccaggagagccugaccaccacguccaccgcgcugggcaagcuccaggacgucgugaaccagaacgcccaggcccugaacacccuggugaagcagcucagcuccaacuucggggccaucagcuccguccugaacgacauccugagccgccucgacccgcccgaggccgaggugcagaucgaccggcugaucaccggccgccugcagucccuccagaccuacgugacgcagcagcugauccgggcggccgagauccgcgccagcgccaaccuggcggccaccaagauguccgagugcguccucgggcagagcaagcggguggacuucugcggcaagggguaccaccugauguccuucccccaggccgcgccccacggcguggucuuccugcacgugaccuacgugcccagccaggagcgcaacuucaccacggcccccgccaucugccacgagggcaaggccuacuucccgcgggagggggucuucguguucaacggcaccagcugguucaucacccagcgcaacuucuucagcccccagaucaucaccacggacaacaccuucgugagcgggaacugcgacgucgugaucggcaucaucaacaacaccgucuacgacccccuccagcccgagcuggacuccuucaaggaggagcuggacaaguacuucaagaaccacaccagcccggacguggaccucggggacaucuccggcaucaacgccagcguggucaacauccagaaggagaucgaccggcugaacgagguggccaagaaccugaacgagucccucaucgaccugcaggagcugggcaaguacgagcaguacaucaaguggcccugguacguguggcucggguucaucgccggccugaucgcgaucgucauggugacgauccugcucugcugcaugaccagcugcugcuccugccugaagggggccugcagcugcggcuccugcugcaaguucgacgaggacgacagcgagcccgugcugaagggcgucaagcuccacuacaccuga

SEQ ID NO: 14956 - RNA, 3573 nt, Artificial Sequence
  SARS-CoV/Tor2__NP_828851.1 spike protein CDS gc (variant)
auguucaucuuccugcuguuccugacccugaccagcggcuccgaccucgaccgcugcacgaccuucgacgacgugcaggcccccaacuacacccagcacaccagcuccaugcgcggggucuacuacccggacgagaucuuccggagcgacacgcuguaccugacccaggaccucuuccugcccuucuacuccaacgugaccggcuuccacaccaucaaccacacguucgggaaccccgugauccccuucaaggacggcaucuacuucgccgcgaccgagaaguccaacgucgugcggggguggguguucggcuccaccaugaacaacaagagccaguccgucaucaucaucaacaacagcaccaacguggugauccgcgccugcaacuucgagcugugcgacaacccguucuucgccgucuccaagcccaugggcacgcagacccacaccaugaucuucgacaacgccuucaacugcaccuucgaguacaucagcgacgccuucucccucgacgugagcgagaaguccgggaacuucaagcaccuccgggaguucguguucaagaacaaggacggcuuccuguacgucuacaagggguaccagcccaucgacguggugcgcgaccuccccagcggcuucaacacgcugaagccgaucuucaagcugccccucgggaucaacaucaccaacuuccgggcgauccugaccgccuucucccccgcccaggacaucuggggcaccagcgccgcggccuacuucgucggcuaccugaagcccacgaccuucaugcucaaguacgacgagaacgggaccaucaccgacgccguggacugcucccagaacccgcuggccgagcugaagugcagcgucaagagcuucgagaucgacaagggcaucuaccagacguccaacuuccgcguggugcccagcggggacgugguccgguuccccaacaucaccaaccucugccccuucggcgagguguucaacgccaccaaguucccguccguguacgcgugggagcgcaagaagaucagcaacugcgucgccgacuacuccgugcuguacaacagcaccuucuucuccacguucaagugcuacggcgucagcgccaccaagcugaacgaccucugcuucuccaacguguacgccgacagcuucguggucaagggggacgacgugcggcagaucgcccccggccagaccggggugaucgcggacuacaacuacaagcugcccgacgacuucaugggcugcguccuggccuggaacacccgcaacaucgacgccacguccaccgggaacuacaacuacaaguaccgguaccuccgccacggcaagcugcggcccuucgagcgcgacaucagcaacgugccguucucccccgacggcaagcccugcacgcccccggcccugaacugcuacuggccccucaacgacuacggguucuacaccaccaccggcaucggguaccagcccuaccggguggucgugcugagcuucgagcugcucaacgcccccgcgaccgugugcggcccgaagcuguccaccgaccugaucaagaaccagugcgucaacuucaacuucaacgggcucaccggcacgggcgugcugacccccagcuccaagcgcuuccagcccuuccagcaguucgggcgggacgugagcgacuucaccgacuccguccgcgacccgaagaccagcgagauccuggacaucagccccugcgccuucggcgggguguccgugaucacgcccggcaccaacgccagcuccgaggucgccgugcucuaccaggacgugaacugcaccgacgucagcaccgccauccacgcggaccagcugacgcccgccuggcggaucuacuccaccgggaacaacguguuccagacccaggccggcugccugaucggcgccgagcacguggacaccagcuacgagugcgacaucccgaucggggcgggcaucugcgccuccuaccacacggucagccuccugcgcuccaccagccagaaguccaucguggccuacaccaugagccugggggccgacuccagcaucgccuacuccaacaacaccaucgcgauccccacgaacuucagcaucuccaucaccaccgaggugaugcccgucagcauggccaagaccagcguggacugcaacauguacaucugcggcgacuccacggagugcgccaaccuccugcugcaguacggcagcuucugcacccagcugaaccgcgcccucuccgggaucgccgcggagcaggaccggaacacccgcgagguguucgcccaggucaagcagauguacaagacccccacgcugaaguacuucggcggguucaacuucagccagauccugccggacccccucaagcccaccaagcgguccuucaucgaggaccugcuguucaacaaggugacccucgccgacgccggcuucaugaagcaguacggggagugccugggcgacaucaacgcccgcgaccugaucugcgcgcagaaguucaacggccucaccgugcugcccccgcugcucacggacgacaugaucgccgccuacaccgccgcgcuggucagcgggaccgccaccgccggcuggacguucggggccggcgccgcgcugcagauccccuucgccaugcagauggccuaccgguucaacgggaucggcgugacccagaacgugcucuacgagaaccagaagcagaucgccaaccaguucaacaaggccaucucccagauccaggagagccugaccaccacguccaccgcgcugggcaagcuccaggacgucgugaaccagaacgcccaggcccugaacacccuggugaagcagcucagcuccaacuucggggccaucagcuccguccugaacgacauccugagccgccucgacccgcccgaggccgaggugcagaucgaccggcugaucaccggccgccugcagucccuccagaccuacgugacgcagcagcugauccgggcggccgagauccgcgccagcgccaaccuggcggccaccaagauguccgagugcguccucgggcagagcaagcggguggacuucugcggcaagggguaccaccugauguccuucccccaggccgcgccccacggcguggucuuccugcacgugaccuacgugcccagccaggagcgcaacuucaccacggcccccgccaucugccacgagggcaaggccuacuucccgcgggagggggucuucguguucaacggcaccagcugguucaucacccagcgcaacuucuucagcccccagaucaucaccacggacaacaccuucgugagcgggaacugcgacgucgugaucggcaucaucaacaacaccgucuacgacccccuccagcccgagcuggacuccuucaaggaggagcuggacaaguacuucaagaaccacaccagcccggacguggaccucggggacaucuccggcaucaacgccagcguggucaacauccagaaggagaucgaccggcugaacgagguggccaagaaccugaacgagucccucaucgaccugcaggagcugggcaaguacgagcaguga

SEQ ID NO: 14957 - RNA, 3654 nt, Artificial Sequence
  SARS-CoV/Tor2__NP_828851.1 spike protein CDS gc (variant)
auguucaucuuccugcuguuccugacccugaccagcggcuccgaccucgaccgcugcacgaccuucgacgacgugcaggcccccaacuacacccagcacaccagcuccaugcgcggggucuacuacccggacgagaucuuccggagcgacacgcuguaccugacccaggaccucuuccugcccuucuacuccaacgugaccggcuuccacaccaucaaccacacguucgggaaccccgugauccccuucaaggacggcaucuacuucgccgcgaccgagaaguccaacgucgugcggggguggguguucggcuccaccaugaacaacaagagccaguccgucaucaucaucaacaacagcaccaacguggugauccgcgccugcaacuucgagcugugcgacaacccguucuucgccgucuccaagcccaugggcacgcagacccacaccaugaucuucgacaacgccuucaacugcaccuucgaguacaucagcgacgccuucucccucgacgugagcgagaaguccgggaacuucaagcaccuccgggaguucguguucaagaacaaggacggcuuccuguacgucuacaagggguaccagcccaucgacguggugcgcgaccuccccagcggcuucaacacgcugaagccgaucuucaagcugccccucgggaucaacaucaccaacuuccgggcgauccugaccgccuucucccccgcccaggacaucuggggcaccagcgccgcggccuacuucgucggcuaccugaagcccacgaccuucaugcucaaguacgacgagaacgggaccaucaccgacgccguggacugcucccagaacccgcuggccgagcugaagugcagcgucaagagcuucgagaucgacaagggcaucuaccagacguccaacuuccgcguggugcccagcggggacgugguccgguuccccaacaucaccaaccucugccccuucggcgagguguucaacgccaccaaguucccguccguguacgcgugggagcgcaagaagaucagcaacugcgucgccgacuacuccgugcuguacaacagcaccuucuucuccacguucaagugcuacggcgucagcgccaccaagcugaacgaccucugcuucuccaacguguacgccgacagcuucguggucaagggggacgacgugcggcagaucgcccccggccagaccggggugaucgcggacuacaacuacaagcugcccgacgacuucaugggcugcguccuggccuggaacacccgcaacaucgacgccacguccaccgggaacuacaacuacaaguaccgguaccuccgccacggcaagcugcggcccuucgagcgcgacaucagcaacgugccguucucccccgacggcaagcccugcacgcccccggcccugaacugcuacuggccccucaacgacuacggguucuacaccaccaccggcaucggguaccagcccuaccggguggucgugcugagcuucgagcugcucaacgcccccgcgaccgugugcggcccgaagcuguccaccgaccugaucaagaaccagugcgucaacuucaacuucaacgggcucaccggcacgggcgugcugacccccagcuccaagcgcuuccagcccuuccagcaguucgggcgggacgugagcgacuucaccgacuccguccgcgacccgaagaccagcgagauccuggacaucagccccugcgccuucggcgggguguccgugaucacgcccggcaccaacgccagcuccgaggucgccgugcucuaccaggacgugaacugcaccgacgucagcaccgccauccacgcggaccagcugacgcccgccuggcggaucuacuccaccgggaacaacguguuccagacccaggccggcugccugaucggcgccgagcacguggacaccagcuacgagugcgacaucccgaucggggcgggcaucugcgccuccuaccacacggucagccuccugcgcuccaccagccagaaguccaucguggccuacaccaugagccugggggccgacuccagcaucgccuacuccaacaacaccaucgcgauccccacgaacuucagcaucuccaucaccaccgaggugaugcccgucagcauggccaagaccagcguggacugcaacauguacaucugcggcgacuccacggagugcgccaaccuccugcugcaguacggcagcuucugcacccagcugaaccgcgcccucuccgggaucgccgcggagcaggaccggaacacccgcgagguguucgcccaggucaagcagauguacaagacccccacgcugaaguacuucggcggguucaacuucagccagauccugccggacccccucaagcccaccaagcgguccuucaucgaggaccugcuguucaacaaggugacccucgccgacgccggcuucaugaagcaguacggggagugccugggcgacaucaacgcccgcgaccugaucugcgcgcagaaguucaacggccucaccgugcugcccccgcugcucacggacgacaugaucgccgccuacaccgccgcgcuggucagcgggaccgccaccgccggcuggacguucggggccggcgccgcgcugcagauccccuucgccaugcagauggccuaccgguucaacgggaucggcgugacccagaacgugcucuacgagaaccagaagcagaucgccaaccaguucaacaaggccaucucccagauccaggagagccugaccaccacguccaccgcgcugggcaagcuccaggacgucgugaaccagaacgcccaggcccugaacacccuggugaagcagcucagcuccaacuucggggccaucagcuccguccugaacgacauccugagccgccucgacccgcccgaggccgaggugcagaucgaccggcugaucaccggccgccugcagucccuccagaccuacgugacgcagcagcugauccgggcggccgagauccgcgccagcgccaaccuggcggccaccaagauguccgagugcguccucgggcagagcaagcggguggacuucugcggcaagggguaccaccugauguccuucccccaggccgcgccccacggcguggucuuccugcacgugaccuacgugcccagccaggagcgcaacuucaccacggcccccgccaucugccacgagggcaaggccuacuucccgcgggagggggucuucguguucaacggcaccagcugguucaucacccagcgcaacuucuucagcccccagaucaucaccacggacaacaccuucgugagcgggaacugcgacgucgugaucggcaucaucaacaacaccgucuacgacccccuccagcccgagcuggacuccuucaaggaggagcuggacaaguacuucaagaaccacaccagcccggacguggaccucggggacaucuccggcaucaacgccagcguggucaacauccagaaggagaucgaccggcugaacgagguggccaagaaccugaacgagucccucaucgaccugcaggagcugggcaaguacgagcagggcggguacauccccgaggcgccccgcgacgggcaggccuacgugcggaaggacggcgaguggguccuccugagcacguucuga

SEQ ID NO: 14958 - RNA, 4062 nt, Artificial Sequence
  HCoV/OC43__P36334.1 spike protein CDS gc (1-1353)
auguuccugauccuccugaucagccugcccaccgccuucgccgugaucggcgaccucaagugcaccuccgacaacaucaacgacaaggacacggggccgccgcccaucagcaccgacaccgucgacgugaccaacggccuggggacguacuacgugcuggaccgcgucuaccucaacaccacccuguuccugaacggcuacuaccccaccuccgggagcacguaccggaacauggcgcucaagggcuccgugcugcugagccgccucugguucaagccgcccuuccuguccgacuucaucaacggcaucuucgccaaggugaagaacaccaaggucaucaaggaccgggugauguacagcgaguuccccgccaucaccaucggguccaccuucgugaacacgagcuacuccgucguggugcagccccgcaccaucaacagcacccaggacggcgacaacaagcugcaggggcuccuggaggucuccgugugccaguacaacaugugcgaguacccccagaccaucugccaccccaaccugggcaaccaccggaaggagcucuggcaccuggacacggggguggucagcugccuguacaagcgcaacuucaccuacgacgugaacgccgacuaccucuacuuccacuucuaccaggagggcggcaccuucuacgccuacuucaccgacacggggguggucaccaaguuccuguucaacguguaccugggcauggcgcucucccacuacuacgugaugccccugaccugcaacagcaagcugacccucgaguacugggucacgccccugaccucccggcaguaccugcucgccuucaaccaggacgggaucaucuucaacgccgaggacugcaugagcgacuucauguccgagaucaagugcaagacccagagcaucgccccgcccaccggcguguacgagcugaacggcuacacggugcagcccaucgcggacgucuaccgccggaagcccaaccugccgaacugcaacaucgaggccuggcucaacgacaagagcgugcccagcccccugaacugggagcgcaagaccuucuccaacugcaacuucaacauguccagccugauguccuucauccaggccgacagcuucacgugcaacaacaucgacgccgccaagaucuacgggaugugcuucuccagcaucaccaucgacaaguucgcgauccccaacggccggaaggucgaccuccagcuggggaaccugggcuaccuccaguccuucaacuaccgcaucgacaccaccgccaccagcugccagcuguacuacaaccugccggccgccaacguguccgugagccgguucaaccccuccaccuggaacaagcgcuucggguucaucgaggacagcgucuucaagccccggcccgccggcgugcucacgaaccacgacguggucuacgcgcagcacugcuucaaggccccgaagaacuucugccccugcaagcugaacggcuccugcguggggagcggccccgggaagaacaacggcaucgggaccugccccgccggcaccaacuaccugaccugcgacaaccucugcaccccggaccccaucacguucaccggcaccuacaagugcccccagaccaagucccugguggggaucggcgagcacugcagcgggcuggccgucaaguccgacuacugcggcgggaacagcugcacgugccgcccgcaggccuuccugggcuggagcgcggacuccugccuccagggcgacaagugcaacaucuucgccaacuucauccugcacgacgugaacagcgggcugaccugcuccaccgaccuccagaaggccaacaccgacaucauccugggcgugugcgucaacuacgaccuguacgggauccucggccagggcaucuucguggaggugaacgccacguacuacaacagcuggcagaaccugcuguacgacuccaacgggaaccucuacggcuuccgggacuacaucaucaaccgcaccuucaugauccggagcugcuacuccgggcgcgucagcgccgcguuccacgccaacuccagcgagcccgcccugcuguuccggaacaucaagugcaacuacguguucaacaacucccucacccgccagcugcagcccaucaacuacuucgacagcuaccugggcugcguggucaacgccuacaacuccaccgcgaucagcgugcagacgugcgaccucaccgugggguccggcuacugcgucgacuacagcaagaaccgccggucccgcggcgccaucaccaccggguaccgguucacgaacuucgagcccuucaccgugaacagcgugaacgacagccuggagccggucggcgggcuguacgagauccagauccccuccgaguucaccaucggcaacaugguggaguucauccagaccagcucccccaaggugacgaucgacugcgccgccuucgucugcggggacuacgccgcgugcaagagccagcucguggaguacggcuccuucugcgacaacaucaacgccauccugaccgaggugaacgagcugcucgacaccacccagcugcaggucgccaacagccugaugaacggcgugacgcucuccaccaagcugaaggacggggugaacuucaacgucgacgacaucaacuucagccccgugcugggcugccucggguccgagugcagcaaggccuccagccgcuccgccaucgaggaccugcuguucgacaaggugaagcucagcgacgucggcuucguggaggcguacaacaacugcaccgggggcgccgagauccgggaccugaucugcgugcaguccuacaagggcaucaagguccugccgccccuccugagcgagaaccagaucuccggguacacccuggccgccacgagcgccucccucuucccgcccuggaccgcggccgccggcgugcccuucuaccugaacgugcaguaccgcaucaacgggcugggcgucaccauggacgugcucagccagaaccagaagcugaucgccaacgcguucaacaacgcccuguacgccauccaggagggguucgacgccaccaacagcgcccucgugaagauccaggcggucgugaacgccaacgccgaggcccugaacaaccugcuccagcagcuguccaaccgguucggcgccaucagcgcgucccugcaggagauccucagccgccuggacgcccuggaggccgaggcccagaucgaccggcucaucaacggccgccugacggcccugaacgcguacgugucccagcagcucagcgacuccacccuggucaaguucagcgccgcccaggccauggagaaggugaacgagugcgugaagucccagagcucccggaucaacuucugcgggaacggcaaccacaucaucagccugguccagaacgcgcccuacgggcucuacuucauccacuucuccuacgugcccaccaaguacgucaccgcccgcgugagccccggccugugcaucgccggcgaccgggggaucgccccgaaguccggcuacuucgugaacgucaacaacacguggauguacaccgggagcggcuacuacuaccccgagcccaucaccgagaacaacgugguggucauguccacgugcgccgugaacuacaccaaggcgcccuacgugaugcugaacaccagcaucccgaaccuccccgacuucaaggaggagcuggaccagugguucaagaaccagaccuccgucgcccccgaccugagccucgacuacaucaacgugaccuuccuggaccuccagguggagaugaaccgccugcaggaggccaucaagguccugaaccagagcuacaucaaccugaaggacaucgggaccuacgaguacuacgugaaguggcccugguacguguggcuccugaucugccuggccggcgucgccaugcucgugcugcuguucuucaucugcugcugcacgggcugcgggaccuccugcuucaagaagugcggcgggugcugcgacgacuacaccggcuaccaggagcucgugaucaagaccagccacgacgacuga

SEQ ID NO: 14959 - RNA, 4062 nt, Artificial Sequence
  HCoV/OC43__P36334.1 spike protein CDS gc (1-1353)(A1070P_L1071P)
auguuccugauccuccugaucagccugcccaccgccuucgccgugaucggcgaccucaagugcaccuccgacaacaucaacgacaaggacacggggccgccgcccaucagcaccgacaccgucgacgugaccaacggccuggggacguacuacgugcuggaccgcgucuaccucaacaccacccuguuccugaacggcuacuaccccaccuccgggagcacguaccggaacauggcgcucaagggcuccgugcugcugagccgccucugguucaagccgcccuuccuguccgacuucaucaacggcaucuucgccaaggugaagaacaccaaggucaucaaggaccgggugauguacagcgaguuccccgccaucaccaucggguccaccuucgugaacacgagcuacuccgucguggugcagccccgcaccaucaacagcacccaggacggcgacaacaagcugcaggggcuccuggaggucuccgugugccaguacaacaugugcgaguacccccagaccaucugccaccccaaccugggcaaccaccggaaggagcucuggcaccuggacacggggguggucagcugccuguacaagcgcaacuucaccuacgacgugaacgccgacuaccucuacuuccacuucuaccaggagggcggcaccuucuacgccuacuucaccgacacggggguggucaccaaguuccuguucaacguguaccugggcauggcgcucucccacuacuacgugaugccccugaccugcaacagcaagcugacccucgaguacugggucacgccccugaccucccggcaguaccugcucgccuucaaccaggacgggaucaucuucaacgccgaggacugcaugagcgacuucauguccgagaucaagugcaagacccagagcaucgccccgcccaccggcguguacgagcugaacggcuacacggugcagcccaucgcggacgucuaccgccggaagcccaaccugccgaacugcaacaucgaggccuggcucaacgacaagagcgugcccagcccccugaacugggagcgcaagaccuucuccaacugcaacuucaacauguccagccugauguccuucauccaggccgacagcuucacgugcaacaacaucgacgccgccaagaucuacgggaugugcuucuccagcaucaccaucgacaaguucgcgauccccaacggccggaaggucgaccuccagcuggggaaccugggcuaccuccaguccuucaacuaccgcaucgacaccaccgccaccagcugccagcuguacuacaaccugccggccgccaacguguccgugagccgguucaaccccuccaccuggaacaagcgcuucggguucaucgaggacagcgucuucaagccccggcccgccggcgugcucacgaaccacgacguggucuacgcgcagcacugcuucaaggccccgaagaacuucugccccugcaagcugaacggcuccugcguggggagcggccccgggaagaacaacggcaucgggaccugccccgccggcaccaacuaccugaccugcgacaaccucugcaccccggaccccaucacguucaccggcaccuacaagugcccccagaccaagucccugguggggaucggcgagcacugcagcgggcuggccgucaaguccgacuacugcggcgggaacagcugcacgugccgcccgcaggccuuccugggcuggagcgcggacuccugccuccagggcgacaagugcaacaucuucgccaacuucauccugcacgacgugaacagcgggcugaccugcuccaccgaccuccagaaggccaacaccgacaucauccugggcgugugcgucaacuacgaccuguacgggauccucggccagggcaucuucguggaggugaacgccacguacuacaacagcuggcagaaccugcuguacgacuccaacgggaaccucuacggcuuccgggacuacaucaucaaccgcaccuucaugauccggagcugcuacuccgggcgcgucagcgccgcguuccacgccaacuccagcgagcccgcccugcuguuccggaacaucaagugcaacuacguguucaacaacucccucacccgccagcugcagcccaucaacuacuucgacagcuaccugggcugcguggucaacgccuacaacuccaccgcgaucagcgugcagacgugcgaccucaccgugggguccggcuacugcgucgacuacagcaagaaccgccggucccgcggcgccaucaccaccggguaccgguucacgaacuucgagcccuucaccgugaacagcgugaacgacagccuggagccggucggcgggcuguacgagauccagauccccuccgaguucaccaucggcaacaugguggaguucauccagaccagcucccccaaggugacgaucgacugcgccgccuucgucugcggggacuacgccgcgugcaagagccagcucguggaguacggcuccuucugcgacaacaucaacgccauccugaccgaggugaacgagcugcucgacaccacccagcugcaggucgccaacagccugaugaacggcgugacgcucuccaccaagcugaaggacggggugaacuucaacgucgacgacaucaacuucagccccgugcugggcugccucggguccgagugcagcaaggccuccagccgcuccgccaucgaggaccugcuguucgacaaggugaagcucagcgacgucggcuucguggaggcguacaacaacugcaccgggggcgccgagauccgggaccugaucugcgugcaguccuacaagggcaucaagguccugccgccccuccugagcgagaaccagaucuccggguacacccuggccgccacgagcgccucccucuucccgcccuggaccgcggccgccggcgugcccuucuaccugaacgugcaguaccgcaucaacgggcugggcgucaccauggacgugcucagccagaaccagaagcugaucgccaacgcguucaacaacgcccuguacgccauccaggagggguucgacgccaccaacagcgcccucgugaagauccaggcggucgugaacgccaacgccgaggcccugaacaaccugcuccagcagcuguccaaccgguucggcgccaucagcgcgucccugcaggagauccucagccgccuggacccgcccgaggccgaggcccagaucgaccggcugaucaacggccgccucacggcccugaacgccuacgugucccagcagcugagcgacuccacccucgucaaguucagcgcggcccaggccauggagaaggugaacgagugcgugaagucccagagcucccggaucaacuucugcgggaacggcaaccacaucaucagccugguccagaacgcccccuacgggcuguacuucauccacuucuccuacgugcccaccaaguacgucaccgcgcgcgugagccccggccucugcaucgccggcgaccgggggaucgcccccaaguccggcuacuucgugaacgucaacaacacguggauguacaccgggagcggcuacuacuaccccgagccgaucaccgagaacaacgugguggucauguccacgugcgccgugaacuacaccaaggcccccuacgugaugcugaacaccagcauccccaaccugcccgacuucaaggaggagcucgaccagugguucaagaaccagaccuccgucgcgccggaccugagccuggacuacaucaacgugaccuuccucgaccuccagguggagaugaaccgccugcaggaggccaucaagguccugaaccagagcuacaucaaccugaaggacaucgggaccuacgaguacuacgugaaguggcccugguacguguggcugcucaucugccuggccggcgucgccaugcuggugcuccuguucuucaucugcugcugcacgggcugcgggaccuccugcuucaagaagugcggcgggugcugcgacgacuacaccggcuaccaggagcuggugaucaagaccagccacgacgacuga

SEQ ID NO: 14960 - RNA, 4089 nt, Artificial Sequence
  HCoV/OC43/1783A_10__AIL49484.1 spike protein CDS gc (1-1362)
auguuccugauccuccugaucagccugcccaccgccuucgccgugaucggcgaccucaagugcccgcuggacucccgcaccgggagccugaacaacaucgacacgggcccgcccuccaucagcaccgcgaccgucgacgugaccaacgggcucggcacguacuacgugcuggaccgggucuaccugaacaccacccucuuccugaacggguacuaccccaccuccggcagcacguaccgcaacauggcccugaagggcaccgacaagcucuccacccugugguucaagccgcccuuccugagcgacuucaucaacgggaucuucgccaaggugaagaacaccaagguguucaaggacggcgucauguacuccgaguuccccgccaucacgaucgggagcaccuucgugaacaccuccuacagcguggucgugcagccccggaccaucaacuccacgcaggacggcgugaacaagcuccaggggcugcuggaggucagcgugugccaguacaacaugugcgaguacccccacaccaucugccaccccaagcucggcaaccacuucaaggagcuguggcacauggacaccggcguggucuccugccuguacaagcgcaacuucaccuacgacgugaacgccacguaccucuacuuccacuucuaccaggagggcggcaccuucuacgcguacuucaccgacaccgggguggucacgaaguuccuguucaacguguaccugggcauggcccucagccacuacuacgugaugccccugaccugcaucucccggcgcgacaucggcuucacccuggaguacugggucacgccccucaccagccggcaguaccugcuggccuucaaccaggacgggaucaucuucaacgccguggacugcauguccgacuucaugagcgagaucaagugcaagacccagagcaucgcgccgcccaccggcguguacgagcucaacggguacaccguccagcccaucgccgacguguaccgccggaagcccgaccugccgaacugcaacaucgaggccuggcugaacgacaaguccguccccagcccccucaacugggagcgcaagacguucuccaacugcaacuucaacaugagcucccugaugagcuucauccaggccgacuccuucacgugcaacaacaucgacgccgcgaagaucuacggcaugugcuucagcuccaucaccaucgacaaguucgccauccccaacgggcggaagguggaccugcagcucggcaaccugggcuaccugcagagcuucaacuaccgcaucgacaccaccgccaccuccugccagcucuacuacaaccugccggccgccaacgugagcgucucccgguucaaccccagcaccuggaacaagcgcuucggguucaucgagaacuccguguucaagccccagcccgcgggcgugcugaccaaccacgacgucguguacgcccagcacugcuucaaggccccgaagaacuucugccccugcaagcucaacagcucccugugcguggggagcggccccgggaagaacaacggcaucgggaccugccccgccgggacgaacuaccugaccugccacaaccucugcaacccggaccccaucaccuucaccggccccuacaagugcccgcagacgaagucccuggucgggaucggcgagcacugcagcgggcuggccgucaagagcgacuacugcggcggcaaccccugcacgugccagccccaggcguuccuggggugguccgccgacagcugccuccagggcgacaagugcaacaucuucgccaaccugauccugcacgacgugaacuccgggcugaccugcagcaccgaccugcagaaggccaacaccgacaucaagcugggcgugugcgugaacuacgaccucuacggcaucuccgggcagggcaucuucguggaggucaacgccaccuacuacaacagcuggcagaaccugcuguacgacuccaacgggaaccucuacggcuuccgggacuacaucaccaaccgcaccuucaugauccggagcugcuacuccgggcgcgugagcgcggccuuccacgccaacuccagcgagcccgcccugcuguuccggaacaucaagugcaacuacguguucaacaacucccucauccgccagcugcagccgaucaacuacuucgacagcuaccugggcugcgucgugaacgcguacaacuccacggccaucagcgugcagaccugcgaccucaccgucggcuccggguacugcguggacuacagcaagaaccggcgcagccgccgggccaucaccacgggcuaccgcuucaccaacuucgagcccuucaccgugaacuccgucaacgacagccuggagcccgucgggggccuguacgagauccagauccccuccgaguucaccaucgggaacauggaggaguucauccagacgagcuccccgaaggugaccaucgacugcgccgccuucgugugcggcgacuacgcggccugcaagagccagcucguggaguacggcuccuucugcgacaacaucaacgccauccugaccgaggugaacgagcugcucgacaccacgcagcugcaggucgccaacagccugaugaacggggugacccucuccaccaagcugaaggacggcgugaacuucaacgucgacgacaucaacuucagcuccgugcuggggugccucggcagcgagugcuccaaggccagcucccggagcgcgaucgaggaccugcuguucgacaaggugaagcucuccgacgucggguucguggccgccuacaacaacugcaccggcggcgccgagauccgcgaccugaucugcgugcagagcuacaaggggaucaagguccugccgccccuccuguccgagaaccagaucagcggcuacacgcuggccgcgaccagcgccucccucuucccgcccuggaccgccgccgcgggggugcccuucuaccugaacgugcaguaccggaucaacggccugggggucaccauggacgugcucagccagaaccagaagcugaucgccaacgccuucaacaacgcccuggacgccauccaggagggcuucgacgcgacgaacuccgcccucgugaagauccaggccgucgugaacgccaacgccgaggcgcugaacaaccugcuccagcagcugagcaaccgcuucggcgccaucuccagcucccugcaggagauccucagccggcuggacgcccuggaggccgaggcccagaucgaccgccucaucaacgggcggcugaccgcgcugaacgccuacgugucccagcagcucagcgacuccacccuggucaaguucagcgccgcccaggcgauggagaaggugaacgagugcgugaagucccagagcucccgcaucaacuucugcggcaacgggaaccacaucaucagccugguccagaacgcccccuacggccucuacuucauccacuucuccuacgugcccaccaaguacgucacggccaaggugagccccggccugugcaucgccggggaccggggcaucgcccccaaguccggguacuucgugaacgucaacaacaccuggauguacaccggcagcggguacuacuaccccgagcccaucaccgagaacaacgugguggucaugagcacgugcgcggugaacuacaccaaggccccguacgugaugcugaacaccuccacccccaaccuccccgacuuccgcgaggagcuggaccagugguucaagaaccagaccagcgucgcccccgaccugucccucgacuacaucaacgugacguuccuggaccuccagguggagaugaaccggcuccaggaggccaucaagguccugaaccagagcuacaucaaccugaaggacaucggcaccuacgaguacuacgugaaguggccgugguacguguggcuccugaucggccuggccggggucgcgaugcucgugcugcuguucuucaucugcugcugcaccggcugcgggaccuccugcuucaagaagugcggcgggugcugcgacgacuacacgggcuaccaggagcucgugaucaagaccagccacgacgacuga

SEQ ID NO: 14961 - RNA, 4089 nt, Artificial Sequence
  HCoV/OC43/1783A_10__AIL49484.1 spike protein CDS gc (1-1362)(A1079P_L1080P)
auguuccugauccuccugaucagccugcccaccgccuucgccgugaucggcgaccucaagugcccgcuggacucccgcaccgggagccugaacaacaucgacacgggcccgcccuccaucagcaccgcgaccgucgacgugaccaacgggcucggcacguacuacgugcuggaccgggucuaccugaacaccacccucuuccugaacggguacuaccccaccuccggcagcacguaccgcaacauggcccugaagggcaccgacaagcucuccacccugugguucaagccgcccuuccugagcgacuucaucaacgggaucuucgccaaggugaagaacaccaagguguucaaggacggcgucauguacuccgaguuccccgccaucacgaucgggagcaccuucgugaacaccuccuacagcguggucgugcagccccggaccaucaacuccacgcaggacggcgugaacaagcuccaggggcugcuggaggucagcgugugccaguacaacaugugcgaguacccccacaccaucugccaccccaagcucggcaaccacuucaaggagcuguggcacauggacaccggcguggucuccugccuguacaagcgcaacuucaccuacgacgugaacgccacguaccucuacuuccacuucuaccaggagggcggcaccuucuacgcguacuucaccgacaccgggguggucacgaaguuccuguucaacguguaccugggcauggcccucagccacuacuacgugaugccccugaccugcaucucccggcgcgacaucggcuucacccuggaguacugggucacgccccucaccagccggcaguaccugcuggccuucaaccaggacgggaucaucuucaacgccguggacugcauguccgacuucaugagcgagaucaagugcaagacccagagcaucgcgccgcccaccggcguguacgagcucaacggguacaccguccagcccaucgccgacguguaccgccggaagcccgaccugccgaacugcaacaucgaggccuggcugaacgacaaguccguccccagcccccucaacugggagcgcaagacguucuccaacugcaacuucaacaugagcucccugaugagcuucauccaggccgacuccuucacgugcaacaacaucgacgccgcgaagaucuacggcaugugcuucagcuccaucaccaucgacaaguucgccauccccaacgggcggaagguggaccugcagcucggcaaccugggcuaccugcagagcuucaacuaccgcaucgacaccaccgccaccuccugccagcucuacuacaaccugccggccgccaacgugagcgucucccgguucaaccccagcaccuggaacaagcgcuucggguucaucgagaacuccguguucaagccccagcccgcgggcgugcugaccaaccacgacgucguguacgcccagcacugcuucaaggccccgaagaacuucugccccugcaagcucaacagcucccugugcguggggagcggccccgggaagaacaacggcaucgggaccugccccgccgggacgaacuaccugaccugccacaaccucugcaacccggaccccaucaccuucaccggccccuacaagugcccgcagacgaagucccuggucgggaucggcgagcacugcagcgggcuggccgucaagagcgacuacugcggcggcaaccccugcacgugccagccccaggcguuccuggggugguccgccgacagcugccuccagggcgacaagugcaacaucuucgccaaccugauccugcacgacgugaacuccgggcugaccugcagcaccgaccugcagaaggccaacaccgacaucaagcugggcgugugcgugaacuacgaccucuacggcaucuccgggcagggcaucuucguggaggucaacgccaccuacuacaacagcuggcagaaccugcuguacgacuccaacgggaaccucuacggcuuccgggacuacaucaccaaccgcaccuucaugauccggagcugcuacuccgggcgcgugagcgcggccuuccacgccaacuccagcgagcccgcccugcuguuccggaacaucaagugcaacuacguguucaacaacucccucauccgccagcugcagccgaucaacuacuucgacagcuaccugggcugcgucgugaacgcguacaacuccacggccaucagcgugcagaccugcgaccucaccgucggcuccggguacugcguggacuacagcaagaaccggcgcagccgccgggccaucaccacgggcuaccgcuucaccaacuucgagcccuucaccgugaacuccgucaacgacagccuggagcccgucgggggccuguacgagauccagauccccuccgaguucaccaucgggaacauggaggaguucauccagacgagcuccccgaaggugaccaucgacugcgccgccuucgugugcggcgacuacgcggccugcaagagccagcucguggaguacggcuccuucugcgacaacaucaacgccauccugaccgaggugaacgagcugcucgacaccacgcagcugcaggucgccaacagccugaugaacggggugacccucuccaccaagcugaaggacggcgugaacuucaacgucgacgacaucaacuucagcuccgugcuggggugccucggcagcgagugcuccaaggccagcucccggagcgcgaucgaggaccugcuguucgacaaggugaagcucuccgacgucggguucguggccgccuacaacaacugcaccggcggcgccgagauccgcgaccugaucugcgugcagagcuacaaggggaucaagguccugccgccccuccuguccgagaaccagaucagcggcuacacgcuggccgcgaccagcgccucccucuucccgcccuggaccgccgccgcgggggugcccuucuaccugaacgugcaguaccggaucaacggccugggggucaccauggacgugcucagccagaaccagaagcugaucgccaacgccuucaacaacgcccuggacgccauccaggagggcuucgacgcgacgaacuccgcccucgugaagauccaggccgucgugaacgccaacgccgaggcgcugaacaaccugcuccagcagcugagcaaccgcuucggcgccaucuccagcucccugcaggagauccucagccggcuggacccgcccgaggccgaggcccagaucgaccgccugaucaacgggcggcucaccgcccugaacgcguacgugucccagcagcugagcgacuccacccucgucaaguucagcgccgcccaggccauggagaaggugaacgagugcgugaagucccagagcucccgcaucaacuucugcggcaacgggaaccacaucaucagccugguccagaacgcgcccuacggccuguacuucauccacuucuccuacgugcccaccaaguacgucacggccaaggugagccccggccucugcaucgccggggaccggggcaucgcccccaaguccggguacuucgugaacgucaacaacaccuggauguacaccggcagcggguacuacuaccccgagcccaucaccgagaacaacgugguggucauguccacgugcgccgugaacuacaccaaggcgcccuacgugaugcugaacaccagcacccccaaccugccggacuuccgcgaggagcucgaccagugguucaagaaccagaccagcgucgcccccgaccugucccuggacuacaucaacgugacguuccucgaccuccagguggagaugaaccggcugcaggaggccaucaagguccucaaccagagcuacaucaaccugaaggacaucggcaccuacgaguacuacgugaaguggcccugguacguguggcugcucaucggccuggccggggucgccaugcuggugcuccuguucuucaucugcugcugcaccggcugcgggaccuccugcuucaagaagugcggcgggugcugcgacgacuacacgggcuaccaggagcuggugaucaagaccagccacgacgacuga

SEQ ID NO: 14962 - RNA, 3864 nt, Artificial Sequence
  HCoV/OC43/1783A_10__AIL49484.1 spike protein CDS gc (variant)
auguuccugauccuccugaucagccugcccaccgccuucgccgugaucggcgaccucaagugcccgcuggacucccgcaccgggagccugaacaacaucgacacgggcccgcccuccaucagcaccgcgaccgucgacgugaccaacgggcucggcacguacuacgugcuggaccgggucuaccugaacaccacccucuuccugaacggguacuaccccaccuccggcagcacguaccgcaacauggcccugaagggcaccgacaagcucuccacccugugguucaagccgcccuuccugagcgacuucaucaacgggaucuucgccaaggugaagaacaccaagguguucaaggacggcgucauguacuccgaguuccccgccaucacgaucgggagcaccuucgugaacaccuccuacagcguggucgugcagccccggaccaucaacuccacgcaggacggcgugaacaagcuccaggggcugcuggaggucagcgugugccaguacaacaugugcgaguacccccacaccaucugccaccccaagcucggcaaccacuucaaggagcuguggcacauggacaccggcguggucuccugccuguacaagcgcaacuucaccuacgacgugaacgccacguaccucuacuuccacuucuaccaggagggcggcaccuucuacgcguacuucaccgacaccgggguggucacgaaguuccuguucaacguguaccugggcauggcccucagccacuacuacgugaugccccugaccugcaucucccggcgcgacaucggcuucacccuggaguacugggucacgccccucaccagccggcaguaccugcuggccuucaaccaggacgggaucaucuucaacgccguggacugcauguccgacuucaugagcgagaucaagugcaagacccagagcaucgcgccgcccaccggcguguacgagcucaacggguacaccguccagcccaucgccgacguguaccgccggaagcccgaccugccgaacugcaacaucgaggccuggcugaacgacaaguccguccccagcccccucaacugggagcgcaagacguucuccaacugcaacuucaacaugagcucccugaugagcuucauccaggccgacuccuucacgugcaacaacaucgacgccgcgaagaucuacggcaugugcuucagcuccaucaccaucgacaaguucgccauccccaacgggcggaagguggaccugcagcucggcaaccugggcuaccugcagagcuucaacuaccgcaucgacaccaccgccaccuccugccagcucuacuacaaccugccggccgccaacgugagcgucucccgguucaaccccagcaccuggaacaagcgcuucggguucaucgagaacuccguguucaagccccagcccgcgggcgugcugaccaaccacgacgucguguacgcccagcacugcuucaaggccccgaagaacuucugccccugcaagcucaacagcucccugugcguggggagcggccccgggaagaacaacggcaucgggaccugccccgccgggacgaacuaccugaccugccacaaccucugcaacccggaccccaucaccuucaccggccccuacaagugcccgcagacgaagucccuggucgggaucggcgagcacugcagcgggcuggccgucaagagcgacuacugcggcggcaaccccugcacgugccagccccaggcguuccuggggugguccgccgacagcugccuccagggcgacaagugcaacaucuucgccaaccugauccugcacgacgugaacuccgggcugaccugcagcaccgaccugcagaaggccaacaccgacaucaagcugggcgugugcgugaacuacgaccucuacggcaucuccgggcagggcaucuucguggaggucaacgccaccuacuacaacagcuggcagaaccugcuguacgacuccaacgggaaccucuacggcuuccgggacuacaucaccaaccgcaccuucaugauccggagcugcuacuccgggcgcgugagcgcggccuuccacgccaacuccagcgagcccgcccugcuguuccggaacaucaagugcaacuacguguucaacaacucccucauccgccagcugcagccgaucaacuacuucgacagcuaccugggcugcgucgugaacgcguacaacuccacggccaucagcgugcagaccugcgaccucaccgucggcuccggguacugcguggacuacagcaagaacggcgggagcggcuccgccaucaccacgggguaccgguucaccaacuucgagcccuucaccgugaacagcgucaacgacucccuggagcccgugggcggccuguacgagauccagauccccagcgaguucaccaucgggaacauggaggaguucauccagacguccagcccgaaggugaccaucgacugcgccgccuucgucugcggcgacuacgcggccugcaagucccagcucguggaguacgggagcuucugcgacaacaucaacgccauccugaccgaggugaacgagcugcucgacaccacgcagcugcaggucgccaacucccugaugaacggcgugacccucagcaccaagcugaaggacggggugaacuucaacgucgacgacaucaacuucuccagcgugcugggcugccucggcuccgagugcagcaaggccuccagccgcuccgcgaucgaggaccugcuguucgacaaggugaagcucagcgacgucggguucguggccgccuacaacaacugcaccggcggggccgagauccgcgaccugaucugcgugcaguccuacaagggcaucaagguccugccgccccuccugagcgagaaccagaucagcggguacacgcuggccgcgaccuccgccagccucuucccgcccuggaccgccgccgcgggcgugcccuucuaccugaacgugcaguaccggaucaacggccugggggucaccauggacgugcucucccagaaccagaagcugaucgccaacgccuucaacaacgcccuggacgccauccaggagggcuucgacgcgacgaacagcgcccucgugaagauccaggccgucgugaacgccaacgccgaggcgcugaacaaccugcuccagcagcuguccaaccgcuucggggccaucagcuccagccugcaggagauccucucccggcuggacccgcccgaggccgaggcccagaucgaccgccugaucaacggccggcucaccgcccugaacgcguacgugagccagcagcuguccgacagcacccucgucaaguucuccgccgcccaggccauggagaaggugaacgagugcgucaagagccaguccagccgcaucaacuucugcggcaacgggaaccacaucaucucccuggugcagaacgcgcccuacggccuguacuucauccacuucagcuacgugcccaccaaguacgucacggccaaggugucccccgggcucugcaucgccggcgaccgggggaucgcccccaagagcggcuacuucgugaacgucaacaacaccuggauguacaccggcagcggguacuacuaccccgagcccaucaccgagaacaacgugguggucaugagcacgugcgccgugaacuacaccaaggcgcccuacgugaugcugaacaccuccacccccaaccugccggacuuccgcgaggagcucgaccagugguucaagaaccagaccuccgucgcccccgaccugagccuggacuacaucaacgugacguuccucgaccuccagguggagaugaaccggcugcaggaggccaucaagguccucaacuga

SEQ ID NO: 14963 - RNA, 3945 nt, Artificial Sequence
  HCoV/OC43/1783A_10__AIL49484.1 spike protein CDS gc (variant)
auguuccugauccuccugaucagccugcccaccgccuucgccgugaucggcgaccucaagugcccgcuggacucccgcaccgggagccugaacaacaucgacacgggcccgcccuccaucagcaccgcgaccgucgacgugaccaacgggcucggcacguacuacgugcuggaccgggucuaccugaacaccacccucuuccugaacggguacuaccccaccuccggcagcacguaccgcaacauggcccugaagggcaccgacaagcucuccacccugugguucaagccgcccuuccugagcgacuucaucaacgggaucuucgccaaggugaagaacaccaagguguucaaggacggcgucauguacuccgaguuccccgccaucacgaucgggagcaccuucgugaacaccuccuacagcguggucgugcagccccggaccaucaacuccacgcaggacggcgugaacaagcuccaggggcugcuggaggucagcgugugccaguacaacaugugcgaguacccccacaccaucugccaccccaagcucggcaaccacuucaaggagcuguggcacauggacaccggcguggucuccugccuguacaagcgcaacuucaccuacgacgugaacgccacguaccucuacuuccacuucuaccaggagggcggcaccuucuacgcguacuucaccgacaccgggguggucacgaaguuccuguucaacguguaccugggcauggcccucagccacuacuacgugaugccccugaccugcaucucccggcgcgacaucggcuucacccuggaguacugggucacgccccucaccagccggcaguaccugcuggccuucaaccaggacgggaucaucuucaacgccguggacugcauguccgacuucaugagcgagaucaagugcaagacccagagcaucgcgccgcccaccggcguguacgagcucaacggguacaccguccagcccaucgccgacguguaccgccggaagcccgaccugccgaacugcaacaucgaggccuggcugaacgacaaguccguccccagcccccucaacugggagcgcaagacguucuccaacugcaacuucaacaugagcucccugaugagcuucauccaggccgacuccuucacgugcaacaacaucgacgccgcgaagaucuacggcaugugcuucagcuccaucaccaucgacaaguucgccauccccaacgggcggaagguggaccugcagcucggcaaccugggcuaccugcagagcuucaacuaccgcaucgacaccaccgccaccuccugccagcucuacuacaaccugccggccgccaacgugagcgucucccgguucaaccccagcaccuggaacaagcgcuucggguucaucgagaacuccguguucaagccccagcccgcgggcgugcugaccaaccacgacgucguguacgcccagcacugcuucaaggccccgaagaacuucugccccugcaagcucaacagcucccugugcguggggagcggccccgggaagaacaacggcaucgggaccugccccgccgggacgaacuaccugaccugccacaaccucugcaacccggaccccaucaccuucaccggccccuacaagugcccgcagacgaagucccuggucgggaucggcgagcacugcagcgggcuggccgucaagagcgacuacugcggcggcaaccccugcacgugccagccccaggcguuccuggggugguccgccgacagcugccuccagggcgacaagugcaacaucuucgccaaccugauccugcacgacgugaacuccgggcugaccugcagcaccgaccugcagaaggccaacaccgacaucaagcugggcgugugcgugaacuacgaccucuacggcaucuccgggcagggcaucuucguggaggucaacgccaccuacuacaacagcuggcagaaccugcuguacgacuccaacgggaaccucuacggcuuccgggacuacaucaccaaccgcaccuucaugauccggagcugcuacuccgggcgcgugagcgcggccuuccacgccaacuccagcgagcccgcccugcuguuccggaacaucaagugcaacuacguguucaacaacucccucauccgccagcugcagccgaucaacuacuucgacagcuaccugggcugcgucgugaacgcguacaacuccacggccaucagcgugcagaccugcgaccucaccgucggcuccggguacugcguggacuacagcaagaacggcgggagcggcuccgccaucaccacgggguaccgguucaccaacuucgagcccuucaccgugaacagcgucaacgacucccuggagcccgugggcggccuguacgagauccagauccccagcgaguucaccaucgggaacauggaggaguucauccagacguccagcccgaaggugaccaucgacugcgccgccuucgucugcggcgacuacgcggccugcaagucccagcucguggaguacgggagcuucugcgacaacaucaacgccauccugaccgaggugaacgagcugcucgacaccacgcagcugcaggucgccaacucccugaugaacggcgugacccucagcaccaagcugaaggacggggugaacuucaacgucgacgacaucaacuucuccagcgugcugggcugccucggcuccgagugcagcaaggccuccagccgcuccgcgaucgaggaccugcuguucgacaaggugaagcucagcgacgucggguucguggccgccuacaacaacugcaccggcggggccgagauccgcgaccugaucugcgugcaguccuacaagggcaucaagguccugccgccccuccugagcgagaaccagaucagcggguacacgcuggccgcgaccuccgccagccucuucccgcccuggaccgccgccgcgggcgugcccuucuaccugaacgugcaguaccggaucaacggccugggggucaccauggacgugcucucccagaaccagaagcugaucgccaacgccuucaacaacgcccuggacgccauccaggagggcuucgacgcgacgaacagcgcccucgugaagauccaggccgucgugaacgccaacgccgaggcgcugaacaaccugcuccagcagcuguccaaccgcuucggggccaucagcuccagccugcaggagauccucucccggcuggacccgcccgaggccgaggcccagaucgaccgccugaucaacggccggcucaccgcccugaacgcguacgugagccagcagcuguccgacagcacccucgucaaguucuccgccgcccaggccauggagaaggugaacgagugcgucaagagccaguccagccgcaucaacuucugcggcaacgggaaccacaucaucucccuggugcagaacgcgcccuacggccuguacuucauccacuucagcuacgugcccaccaaguacgucacggccaaggugucccccgggcucugcaucgccggcgaccgggggaucgcccccaagagcggcuacuucgugaacgucaacaacaccuggauguacaccggcagcggguacuacuaccccgagcccaucaccgagaacaacgugguggucaugagcacgugcgccgugaacuacaccaaggcgcccuacgugaugcugaacaccuccacccccaaccugccggacuuccgcgaggagcucgaccagugguucaagaaccagaccuccgucgcccccgaccugagccuggacuacaucaacgugacguuccucgaccuccagguggagaugaaccggcugcaggaggccaucaagguccucaacggcggguacauccccgaggccccgcgcgacggccaggccuacgugcggaaggacggggagugggugcugcuguccaccuucuga

SEQ ID NO: 14964 - RNA, 4056 nt, Artificial Sequence
  HCoV/HKU1/N5__Q0ZME7.1 spike protein CDS gc (1-1351)
auguuccugaucaucuucauccuccccaccacccuggccgugaucggcgacuucaacugcacgaacagcuucaucaacgacuacaacaagaccaucccgcgcaucuccgaggacgucguggacgugagccuggggcucggcaccuacuacguccugaaccggguguaccugaacaccacgcuccuguucaccggguacuuccccaaguccggcgccaacuuccgcgaccuggcgcucaaggggagcaucuaccuguccacccugugguacaagccgcccuuccucagcgacuucaacaacggcaucuucuccaaggugaagaacaccaagcuguacgucaacaacacgcuguacagcgaguucuccaccaucgugaucggcagcguguucgucaacaccuccuacaccaucguggugcagccccacaacgggauccucgagaucacggccugccaguacaccaugugcgaguacccccacaccgucugcaagagcaagggcuccauccggaacgagagcuggcacaucgacuccagcgagccccugugccuguucaagaagaacuucaccuacaacguguccgccgacuggcucuacuuccacuucuaccaggagcgcgggguguucuacgccuacuacgccgacgucggcaugcccacgaccuuccuguucagccuguaccucgggaccauccugucccacuacuacgugaugccgcugaccugcaacgcgaucagcagcaacacggacaacgagacccucgaguacugggugacgccccugucccggcgccaguaccugcucaacuucgacgagcacggcgucaucaccaacgccguggacugcagcuccagcuuccuguccgagauccagugcaagacccagagcuucgcccccaacaccggcguguacgaccuguccggguucaccgucaagcccguggccaccguguaccggcgcaucccgaaccuccccgacugcgacaucgacaacuggcugaacaacgucagcgugcccagcccccugaacugggagcggcgcaucuucuccaacugcaacuucaaccucuccacgcugcugcggcucguccacguggacagcuucuccugcaacaaccuggacaagagcaagaucuucggcuccugcuucaacagcaucaccguggacaaguucgcgaucccgaaccgccggcgcgacgaccugcagcucggguccagcggcuuccugcaguccagcaacuacaagaucgacaucagcuccagcuccugccagcuguacuacagccucccccuggucaacgugaccaucaacaacuucaaccccuccagcuggaaccggcgcuacggcuucggguccuucaaccugagcuccuacgacguggucuacagcgaccacugcuucuccgugaacagcgacuucugccccugcgccgacccguccguggucaacagcugcgccaaguccaagccgcccagcgccaucugccccgccggcaccaaguaccggcacugcgaccucgacacgacccuguacgugaagaacuggugccgcugcuccugccugcccgaccccaucagcaccuacagccccaacacgugcccccagaagaagguggucguggggaucggcgagcacugcccggggcugggcaucaacgaggagaagugcggcacccagcucaaccacuccagcugcuucugcucccccgacgcguuccugggguggagcuucgacuccugcaucagcaacaaccggugcaacaucuucuccaacuucaucuucaacggcaucaacagcgggacgaccugcuccaacgaccugcucuacagcaacaccgagaucuccaccggcgugugcgucaacuacgaccuguacgggaucaccggccagggcaucuucaaggaggugagcgccgccuacuacaacaacuggcagaaccugcucuacgacuccaacgggaacaucaucggcuucaaggacuuccugaccaacaagaccuacaccauccugcccugcuacagcgggcgcguguccgccgccuucuaccagaacagcuccagcccggcgcuccuguaccggaaccugaagugcuccuacguccucaacaacaucagcuucaucagccagcccuucuacuucgacuccuaccugggcugcgugcugaacgccgugaaccucacgagcuacuccgucagcuccugcgaccugcgcauggggagcggcuucugcaucgacuacgcccugcccuccagccgccggaagcgccggggcaucuccagccccuaccgcuucgugaccuucgagccguucaacguguccuucgucaacgacagcguggagaccgucgggggccucuucgagauccagauccccaccaacuucacgaucgccgggcacgaggaguucauccagaccuccagccccaaggugaccaucgacugcuccgccuucgugugcagcaacuacgcggccugccacgaccugcuguccgaguacggcaccuucugcgacaacaucaacagcauccucaacgaggugaacgaccugcuggacaucacgcagcuccaggucgccaacgcccugaugcagggcgugacccuguccagcaaccucaacaccaaccugcacagcgacguggacaacaucgacuucaagucccugcucgggugccugggcagccagugcggguccagcucccggagccugcucgaggaccugcuguucaacaaggucaagcucuccgacgugggcuucguggaggccuacaacaacugcaccgggggcagcgagauccgcgaccugcugugcguccaguccuucaacggcaucaaggugcugcccccgauccucagcgagacgcagaucuccggguacaccaccgcggccaccguggccgccauguucccgcccuggagcgcggccgccggcguccccuucucccugaacgugcaguaccggaucaacgggcucggcgugacgauggacguccugaacaagaaccagaagcugaucgccaacgccuucaacaaggcgcuccugagcauccagaacggguucaccgccaccaacuccgcccuggccaagauccagagcguggugaacgccaacgcgcaggcccucaacucccugcugcagcagcuguucaacaaguucggcgccaucagcuccagccuccaggagauccugagccgccucgacaaccuggaggcccagguccagaucgaccggcugaucaacggccgccucaccgcccugaacgcguacgugucccagcagcugagcgacaucacgcucaucaaggccggggccucccgggccaucgagaaggugaacgagugcgucaagagccagagcccccgcaucaacuucugcggcaacgggaaccacauccugucccuggugcagaacgcgcccuacggccuccuguucauccacuucuccuacaagcccaccagcuucaagaccgugcuggucucccccgggcucugccugagcggcgaccggggcaucgccccgaagcagggguacuucaucaagcagaacgacuccuggauguucaccggcagcuccuacuacuaccccgagcccaucagcgacaagaacguggucuucaugaacuccugcagcgugaacuucacgaaggcccccuucaucuaccugaacaacuccaucccgaaccucagcgacuucgaggccgagcugucccugugguucaagaaccacaccagcaucgcccccaaccucaccuucaacagccacaucaacgcgaccuuccuggaccuguacuacgagaugaacgugauccaggaguccaucaagagccucaacuccagcuucaucaaccugaaggagaucgggacguacgagauguacgucaaguggcccugguacaucuggcugcucaucgugauccuguucaucaucuuccugaugauccucuucuucaucugcugcugcaccggcugcggguccgccugcuucagcaagugccacaacugcugcgacgaguacggcggccacaacgacuucgugaucaaggccucccacgacgacuga

SEQ ID NO: 14965 - RNA, 4056 nt, Artificial Sequence
  HCoV/HKU1/N5__Q0ZME7.1 spike protein CDS gc (1-1351)(N1067P_L1068P)
auguuccugaucaucuucauccuccccaccacccuggccgugaucggcgacuucaacugcacgaacagcuucaucaacgacuacaacaagaccaucccgcgcaucuccgaggacgucguggacgugagccuggggcucggcaccuacuacguccugaaccggguguaccugaacaccacgcuccuguucaccggguacuuccccaaguccggcgccaacuuccgcgaccuggcgcucaaggggagcaucuaccuguccacccugugguacaagccgcccuuccucagcgacuucaacaacggcaucuucuccaaggugaagaacaccaagcuguacgucaacaacacgcuguacagcgaguucuccaccaucgugaucggcagcguguucgucaacaccuccuacaccaucguggugcagccccacaacgggauccucgagaucacggccugccaguacaccaugugcgaguacccccacaccgucugcaagagcaagggcuccauccggaacgagagcuggcacaucgacuccagcgagccccugugccuguucaagaagaacuucaccuacaacguguccgccgacuggcucuacuuccacuucuaccaggagcgcgggguguucuacgccuacuacgccgacgucggcaugcccacgaccuuccuguucagccuguaccucgggaccauccugucccacuacuacgugaugccgcugaccugcaacgcgaucagcagcaacacggacaacgagacccucgaguacugggugacgccccugucccggcgccaguaccugcucaacuucgacgagcacggcgucaucaccaacgccguggacugcagcuccagcuuccuguccgagauccagugcaagacccagagcuucgcccccaacaccggcguguacgaccuguccggguucaccgucaagcccguggccaccguguaccggcgcaucccgaaccuccccgacugcgacaucgacaacuggcugaacaacgucagcgugcccagcccccugaacugggagcggcgcaucuucuccaacugcaacuucaaccucuccacgcugcugcggcucguccacguggacagcuucuccugcaacaaccuggacaagagcaagaucuucggcuccugcuucaacagcaucaccguggacaaguucgcgaucccgaaccgccggcgcgacgaccugcagcucggguccagcggcuuccugcaguccagcaacuacaagaucgacaucagcuccagcuccugccagcuguacuacagccucccccuggucaacgugaccaucaacaacuucaaccccuccagcuggaaccggcgcuacggcuucggguccuucaaccugagcuccuacgacguggucuacagcgaccacugcuucuccgugaacagcgacuucugccccugcgccgacccguccguggucaacagcugcgccaaguccaagccgcccagcgccaucugccccgccggcaccaaguaccggcacugcgaccucgacacgacccuguacgugaagaacuggugccgcugcuccugccugcccgaccccaucagcaccuacagccccaacacgugcccccagaagaagguggucguggggaucggcgagcacugcccggggcugggcaucaacgaggagaagugcggcacccagcucaaccacuccagcugcuucugcucccccgacgcguuccugggguggagcuucgacuccugcaucagcaacaaccggugcaacaucuucuccaacuucaucuucaacggcaucaacagcgggacgaccugcuccaacgaccugcucuacagcaacaccgagaucuccaccggcgugugcgucaacuacgaccuguacgggaucaccggccagggcaucuucaaggaggugagcgccgccuacuacaacaacuggcagaaccugcucuacgacuccaacgggaacaucaucggcuucaaggacuuccugaccaacaagaccuacaccauccugcccugcuacagcgggcgcguguccgccgccuucuaccagaacagcuccagcccggcgcuccuguaccggaaccugaagugcuccuacguccucaacaacaucagcuucaucagccagcccuucuacuucgacuccuaccugggcugcgugcugaacgccgugaaccucacgagcuacuccgucagcuccugcgaccugcgcauggggagcggcuucugcaucgacuacgcccugcccuccagccgccggaagcgccggggcaucuccagccccuaccgcuucgugaccuucgagccguucaacguguccuucgucaacgacagcguggagaccgucgggggccucuucgagauccagauccccaccaacuucacgaucgccgggcacgaggaguucauccagaccuccagccccaaggugaccaucgacugcuccgccuucgugugcagcaacuacgcggccugccacgaccugcuguccgaguacggcaccuucugcgacaacaucaacagcauccucaacgaggugaacgaccugcuggacaucacgcagcuccaggucgccaacgcccugaugcagggcgugacccuguccagcaaccucaacaccaaccugcacagcgacguggacaacaucgacuucaagucccugcucgggugccugggcagccagugcggguccagcucccggagccugcucgaggaccugcuguucaacaaggucaagcucuccgacgugggcuucguggaggccuacaacaacugcaccgggggcagcgagauccgcgaccugcugugcguccaguccuucaacggcaucaaggugcugcccccgauccugagcgagacgcagaucuccggguacaccaccgcggccaccguggccgccauguucccgcccuggagcgcggccgccggcguccccuucucccugaacgugcaguaccggaucaacgggcucggcgugacgauggacguccugaacaagaaccagaagcugaucgccaacgccuucaacaaggcgcuccugagcauccagaacggguucaccgccaccaacuccgcccuggccaagauccagagcguggugaacgccaacgcgcaggcccucaacucccugcugcagcagcuguucaacaaguucggcgccaucagcuccagccuccaggagauccugagccgccucgacccgcccgaggcccagguccagaucgaccggcugaucaacggccgccugaccgcccucaacgcguacgugucccagcagcugagcgacaucacgcugaucaaggccggggccucccgggccaucgagaaggugaacgagugcgucaagagccagagcccccgcaucaacuucugcggcaacgggaaccacauccucucccuggugcagaacgcgcccuacggccuccucuucauccacuucuccuacaagcccaccagcuucaagaccgugcuggucucccccgggcugugccucagcggcgaccggggcaucgcccccaagcagggguacuucaucaagcagaacgacuccuggauguucaccggcagcuccuacuacuaccccgagccgaucagcgacaagaacguggucuucaugaacuccugcagcgugaacuucacgaaggcccccuucaucuaccugaacaacuccauccccaaccugagcgacuucgaggccgagcucucccugugguucaagaaccacaccagcaucgcccccaaccugaccuucaacagccacaucaacgcgaccuuccucgaccuguacuacgagaugaacgugauccaggaguccaucaagagccugaacuccagcuucaucaaccucaaggagaucgggacguacgagauguacgucaaguggccgugguacaucuggcugcugaucgugauccucuucaucaucuuccugaugauccuguucuucaucugcugcugcaccggcugcggguccgccugcuucagcaagugccacaacugcugcgacgaguacggcggccacaacgacuucgugaucaaggccucccacgacgacuga

SEQ ID NO: 14966 - RNA, 3831 nt, Artificial Sequence
  HCoV/HKU1/N5__Q0ZME7.1 spike protein CDS gc (variant)
auguuccugaucaucuucauccuccccaccacccuggccgugaucggcgacuucaacugcacgaacagcuucaucaacgacuacaacaagaccaucccgcgcaucuccgaggacgucguggacgugagccuggggcucggcaccuacuacguccugaaccggguguaccugaacaccacgcuccuguucaccggguacuuccccaaguccggcgccaacuuccgcgaccuggcgcucaaggggagcaucuaccuguccacccugugguacaagccgcccuuccucagcgacuucaacaacggcaucuucuccaaggugaagaacaccaagcuguacgucaacaacacgcuguacagcgaguucuccaccaucgugaucggcagcguguucgucaacaccuccuacaccaucguggugcagccccacaacgggauccucgagaucacggccugccaguacaccaugugcgaguacccccacaccgucugcaagagcaagggcuccauccggaacgagagcuggcacaucgacuccagcgagccccugugccuguucaagaagaacuucaccuacaacguguccgccgacuggcucuacuuccacuucuaccaggagcgcgggguguucuacgccuacuacgccgacgucggcaugcccacgaccuuccuguucagccuguaccucgggaccauccugucccacuacuacgugaugccgcugaccugcaacgcgaucagcagcaacacggacaacgagacccucgaguacugggugacgccccugucccggcgccaguaccugcucaacuucgacgagcacggcgucaucaccaacgccguggacugcagcuccagcuuccuguccgagauccagugcaagacccagagcuucgcccccaacaccggcguguacgaccuguccggguucaccgucaagcccguggccaccguguaccggcgcaucccgaaccuccccgacugcgacaucgacaacuggcugaacaacgucagcgugcccagcccccugaacugggagcggcgcaucuucuccaacugcaacuucaaccucuccacgcugcugcggcucguccacguggacagcuucuccugcaacaaccuggacaagagcaagaucuucggcuccugcuucaacagcaucaccguggacaaguucgcgaucccgaaccgccggcgcgacgaccugcagcucggguccagcggcuuccugcaguccagcaacuacaagaucgacaucagcuccagcuccugccagcuguacuacagccucccccuggucaacgugaccaucaacaacuucaaccccuccagcuggaaccggcgcuacggcuucggguccuucaaccugagcuccuacgacguggucuacagcgaccacugcuucuccgugaacagcgacuucugccccugcgccgacccguccguggucaacagcugcgccaaguccaagccgcccagcgccaucugccccgccggcaccaaguaccggcacugcgaccucgacacgacccuguacgugaagaacuggugccgcugcuccugccugcccgaccccaucagcaccuacagccccaacacgugcccccagaagaagguggucguggggaucggcgagcacugcccggggcugggcaucaacgaggagaagugcggcacccagcucaaccacuccagcugcuucugcucccccgacgcguuccugggguggagcuucgacuccugcaucagcaacaaccggugcaacaucuucuccaacuucaucuucaacggcaucaacagcgggacgaccugcuccaacgaccugcucuacagcaacaccgagaucuccaccggcgugugcgucaacuacgaccuguacgggaucaccggccagggcaucuucaaggaggugagcgccgccuacuacaacaacuggcagaaccugcucuacgacuccaacgggaacaucaucggcuucaaggacuuccugaccaacaagaccuacaccauccugcccugcuacagcgggcgcguguccgccgccuucuaccagaacagcuccagcccggcgcuccuguaccggaaccugaagugcuccuacguccucaacaacaucagcuucaucagccagcccuucuacuucgacuccuaccugggcugcgugcugaacgccgugaaccucacgagcuacuccgucagcuccugcgaccugcgcauggggagcggcuucugcaucgacuacgcccugcccuccagcggcggguccggcagcgggaucuccagccccuaccgcuucgugaccuucgagccguucaacguguccuucgucaacgacagcguggagaccgugggcggccucuucgagauccagauccccaccaacuucacgaucgccgggcacgaggaguucauccagaccuccagccccaaggucaccaucgacugcuccgccuucgugugcagcaacuacgcggccugccacgaccugcuguccgaguacggcaccuucugcgacaacaucaacagcauccucaacgaggugaacgaccugcuggacaucacgcagcuccaggucgccaacgcccugaugcagggggugacccugagcuccaaccucaacaccaaccugcacagcgacguggacaacaucgacuucaagucccugcucggcugccuggggagccagugcggcuccagcucccggagccugcucgaggaccugcuguucaacaaggucaagcucuccgacgugggcuucguggaggccuacaacaacugcaccgggggcagcgagauccgcgaccugcugugcguccaguccuucaacgggaucaaggugcugcccccgauccugagcgagacgcagaucuccggcuacaccaccgcggccaccguggccgccauguucccgcccuggagcgcggccgccgggguccccuucucccugaacgugcaguaccggaucaacggccucggcgugacgauggacguccugaacaagaaccagaagcugaucgccaacgccuucaacaaggcgcuccugagcauccagaacggguucaccgccaccaacuccgcccuggccaagauccagagcguggugaacgccaacgcgcaggcccucaacucccugcugcagcagcuguucaacaaguucggcgccaucagcagcucccuccaggagauccugagccgccucgacccgcccgaggcccagguccagaucgaccggcugaucaacgggcgccugaccgcccucaacgcguacgugucccagcagcugagcgacaucacgcugaucaaggccggcgccucccgggccaucgagaaggugaacgagugcgucaagagccagagcccccgcaucaacuucugcgggaacggcaaccacauccucucccuggugcagaacgcgcccuacggccuccucuucauccacuucuccuacaagcccaccagcuucaagaccgugcuggucucccccgggcugugccucagcggcgaccgggggaucgcccccaagcagggcuacuucaucaagcagaacgacuccuggauguucaccgggagcuccuacuacuaccccgagccgaucagcgacaagaacguggucuucaugaacuccugcagcgugaacuucacgaaggcccccuucaucuaccugaacaacuccauccccaaccugagcgacuucgaggccgagcucagccugugguucaagaaccacaccuccaucgcccccaaccugaccuucaacagccacaucaacgcgaccuuccucgaccuguacuacgagaugaacgugauccaggaguccaucaagagccugaacuga

SEQ ID NO: 14967 - RNA, 3912 nt, Artificial Sequence
  HCoV/HKU1/N5__Q0ZME7.1 spike protein CDS gc (variant)
auguuccugaucaucuucauccuccccaccacccuggccgugaucggcgacuucaacugcacgaacagcuucaucaacgacuacaacaagaccaucccgcgcaucuccgaggacgucguggacgugagccuggggcucggcaccuacuacguccugaaccggguguaccugaacaccacgcuccuguucaccggguacuuccccaaguccggcgccaacuuccgcgaccuggcccucaaggggagcaucuaccuguccacccugugguacaagccgcccuuccucagcgacuucaacaacggcaucuucuccaaggugaagaacaccaagcuguacgucaacaacacgcuguacagcgaguucuccaccaucgugaucggcagcguguucgucaacaccuccuacaccaucguggugcagccccacaacgggauccucgagaucacggccugccaguacaccaugugcgaguacccccacaccgucugcaagagcaagggcuccauccggaacgagagcuggcacaucgacuccagcgagccccugugccuguucaagaagaacuucaccuacaacguguccgccgacuggcucuacuuccacuucuaccaggagcgcgggguguucuacgccuacuacgccgacgucggcaugcccacgaccuuccuguucagccuguaccucgggaccauccugucccacuacuacgugaugccgcugaccugcaacgcgaucagcagcaacacggacaacgagacccucgaguacugggugacgccccugucccggcgccaguaccugcucaacuucgacgagcacggcgucaucaccaacgccguggacugcagcuccagcuuccuguccgagauccagugcaagacccagagcuucgcccccaacaccggcguguacgaccuguccggguucaccgucaagcccguggccaccguguaccggcgcaucccgaaccuccccgacugcgacaucgacaacuggcugaacaacgucagcgugcccagcccccugaacugggagcggcgcaucuucuccaacugcaacuucaaccucuccacgcugcugcggcucguccacguggacagcuucuccugcaacaaccuggacaagagcaagaucuucggcuccugcuucaacagcaucaccguggacaaguucgcgaucccgaaccgccggcgcgacgaccugcagcucggguccagcggcuuccugcaguccagcaacuacaagaucgacaucagcuccagcuccugccagcuguacuacagccucccccuggucaacgugaccaucaacaacuucaaccccuccagcuggaaccggcgcuacggcuucggguccuucaaccugagcuccuacgacguggucuacagcgaccacugcuucuccgugaacagcgacuucugccccugcgccgacccguccguggucaacagcugcgccaaguccaagccgcccagcgccaucugccccgccggcaccaaguaccggcacugcgaccucgacacgacccuguacgugaagaacuggugccgcugcuccugccugcccgaccccaucagcaccuacagccccaacacgugcccccagaagaagguggucguggggaucggcgagcacugcccggggcugggcaucaacgaggagaagugcggcacccagcucaaccacuccagcugcuucugcucccccgacgcguuccugggguggagcuucgacuccugcaucagcaacaaccggugcaacaucuucuccaacuucaucuucaacggcaucaacagcgggacgaccugcuccaacgaccugcucuacagcaacaccgagaucuccaccggcgugugcgucaacuacgaccuguacgggaucaccggccagggcaucuucaaggaggugagcgccgccuacuacaacaacuggcagaaccugcucuacgacuccaacgggaacaucaucggcuucaaggacuuccugaccaacaagaccuacaccauccugcccugcuacagcgggcgcguguccgccgccuucuaccagaacagcuccagcccggcgcuccuguaccggaaccugaagugcuccuacguccucaacaacaucagcuucaucagccagcccuucuacuucgacuccuaccugggcugcgugcugaacgccgugaaccucacgagcuacuccgucagcuccugcgaccugcgcauggggagcggcuucugcaucgacuacgcccugcccuccagcggcggguccggcagcgggaucuccagccccuaccgcuucgugaccuucgagccguucaacguguccuucgucaacgacagcguggagaccgugggcggccucuucgagauccagauccccaccaacuucacgaucgccgggcacgaggaguucauccagaccuccagccccaaggucaccaucgacugcuccgccuucgugugcagcaacuacgcggccugccacgaccugcuguccgaguacggcaccuucugcgacaacaucaacagcauccucaacgaggugaacgaccugcuggacaucacgcagcuccaggucgccaacgcccugaugcagggggugacccugagcuccaaccucaacaccaaccugcacagcgacguggacaacaucgacuucaagucccugcucggcugccuggggagccagugcggcuccagcucccggagccugcucgaggaccugcuguucaacaaggucaagcucuccgacgugggcuucguggaggccuacaacaacugcaccgggggcagcgagauccgcgaccugcugugcguccaguccuucaacgggaucaaggugcugcccccgauccugagcgagacgcagaucuccggcuacaccaccgcggccaccguggccgccauguucccgcccuggagcgcggccgccgggguccccuucucccugaacgugcaguaccggaucaacggccucggcgugacgauggacguccugaacaagaaccagaagcugaucgccaacgccuucaacaaggcgcuccugagcauccagaacggguucaccgccaccaacuccgcccuggccaagauccagagcguggugaacgccaacgcgcaggcccucaacucccugcugcagcagcuguucaacaaguucggcgccaucagcagcucccuccaggagauccugagccgccucgacccgcccgaggcccagguccagaucgaccggcugaucaacgggcgccugaccgcccucaacgcguacgugucccagcagcugagcgacaucacgcugaucaaggccggcgccucccgggccaucgagaaggugaacgagugcgucaagagccagagcccccgcaucaacuucugcgggaacggcaaccacauccucucccuggugcagaacgcgcccuacggccuccucuucauccacuucuccuacaagcccaccagcuucaagaccgugcuggucucccccgggcugugccucagcggcgaccgggggaucgcccccaagcagggcuacuucaucaagcagaacgacuccuggauguucaccgggagcuccuacuacuaccccgagccgaucagcgacaagaacguggucuucaugaacuccugcagcgugaacuucacgaaggcccccuucaucuaccugaacaacuccauccccaaccugagcgacuucgaggccgagcucagccugugguucaagaaccacaccuccaucgcccccaaccugaccuucaacagccacaucaacgcgaccuuccucgaccuguacuacgagaugaacgugauccaggaguccaucaagagccugaacggcggcuacaucccggaggcgccccgcgacgggcaggccuacguccggaaggacggcgagugggugcuccuguccacguucuga

SEQ ID NO: 14968 - RNA, 3516 nt, Artificial Sequence
  HCoV/229E/BN1/GER/2015__AOG74783.1 spike protein CDS gc (1-1171)
auguucgugcugcucgucgccuacgcccugcugcacaucgcgggcugccagaccaccaacgggacgaacaccagccacuccgugugcaacggcugcguggggcacagcgagaacgucuucgccguggaguccggcggguacauccccagcaacuucgccuucaacaacugguuccuccugaccaacaccuccagcguggucgacggcguggugcgcuccuuccagccgcugcuccugaacugccuguggagcgucuccggcagccaguucacgaccggguucguguacuucaacggcaccgggcggggcgccugcaagggguucuacuccaacgccagcuccgacgugauccgcuacaacaucaacuucgaggagaaccuccggcgcggcaccauccuguucaagacgagcuacggcgcggucguguucuacugcaccaacaacacccugguguccggggacgcccacauccccagcggcaccguccucgggaacuucuacugcuucgugaacacgaccaucggcaacgagaccaccuccgccuucgugggcgcccugcccaagacgguccgggaguucgugaucagccgcaccgggcacuucuacaucaacggcuaccgguacuucucccugggggacguggaggcggucaacuucaacgugaccaacgccgccaccacggugugcaccgucgcccucgccagcuacgcggacgugcuggucaacgugagccagaccgccaucgccaacaucaucuacugcaacuccgugaucaaccgccugcggugcgaccagcucagcuucgacguccccgacggcuucuacuccaccagcccgauccagcccguggagcugcccguguccaucgucagccugcccguguaccacaagcacacguucaucgugcucuacgucaacuucgagcaccgccgggggccgggcaagugcuacaacugccgccccgccgugaucaacaucacccuggccaacuucaacgagaccaagggcccccugugcguggacaccucccacuucacgacccaguucgucgacaacgugaagcucgcgcgguggagcgccuccaucaacaccgggaacugccccuucagcuucggcaaggugaacaacuucgucaaguucggguccgugugcuucagccugaaggacaucccgggcgggugcgccaugcccaucauggccaaccuggugaacuccaagagccacaacaucggcucccucuacgucagcugguccgacggcgacgugaucaccggggugcccaagcccgucgagggcgugagcuccuucaugaacgugacgcugaacaagugcaccaaguacaacaucuacgacgucagcggggugggcgugauccgcaucagcaacgacaccuuccugaacgggaucaccuacacguccaccagcggcaaccuccugggcuucaaggacgucaccaacgggaccaucuacuccaucaccccgugcaacccgcccgaccagcuggugguguaccagcaggccgucgugggcgcgaugcucagcgagaacuucacguccuacggguucagcaacguggucgagaugcccaaguucuucuacgccuccaacggcaccuacaacugcaccgacgccgugcugaccuacagcuccuucggcgugugcgccgacgggagcaucaucgccguccagccccggaacguguccuacgacagcguguccgcgaucgucacggccaaccugagcauccccuucaacuggaccaccuccguccagguggaguaccuccagaucaccagcacgcccaucgugguggacugcuccaccuacgugugcaacggcaacguccgcugcguggagcugcugaagcaguacaccagcgccugcaagaccaucgaggacgcccuccggaacagcgcgaugcuggaguccgccgacgugagcgagaugcugacguucgacaagaaggccuucacccucgccaacgucuccagcuucggggacuacaaccuguccagcgugauccccucccugccgcgcagcggcucccggguggccgggcgcagcgcgaucgaggacauccucuucuccaagcuggucaccagcggccugggcaccguggacgccgacuacaagaagugcacgaaggggcuguccaucgccgaccucgccugcgcccaguacuacaacggcaucaugguccugcccgggguggcggacgccgagcggauggccauguacaccggcagccugaucgggggcaucgcccucggcgggcugaccuccgccgcgagcauccccuucucccuggccauccagagccgccucaacuacguggcccugcagaccgacguccugcaggagaaccagcgcauccucgccgcguccuucaacaaggccaugacgaacaucguggacgccuucaccggcgugaacgacgccaucacccagaccagccaggcccugcagacggucgcgaccgcccugaacaagauccaggacguggugaaccagcaggggaacagccucaaccaccugaccucccagcugcggcagaacuuccaggccaucagcuccagcauccaggccaucuacgaccgccucgacaucauccaggccgaccagcaggucgaccggcugaucaccggccgccuggcggcccucaacguguucgugucccacacgcugaccaaguacaccgagguccgggccagccgccagcuggcccagcagaaggugaacgagugcgugaagucccagagcaagcgguacggguucugcggcaacggcacccacaucuucucccucgucaacgccgcgcccgaggggcugguguuccugcacacggugcuccugccgacccaguacaaggacgucgaggccuggagcggccugugcguggacgggaucaacggcuacgugcuccgccagcccaaccuggcccuguacaaggaggggaacuacuaccggaucaccucccgcaucauguucgagccccggaucccgaccaucgccgacuucguccagaucgagaacugcaacgugacguucgugaacaucagccgcuccgagcuccagaccaucguccccgaguacaucgacgugaacaagacccugcaggagcugagcuacaagcuccccaacuacaccgugcccgaccuggucguggagcaguacaaccagaccauccugaaccucacguccgagaucagcacccuggagaacaaguccgcggagcugaacuacaccgugcagaagcuccagacccugaucgacaacaucaacagcacgcuggucgaccucaaguggcugaaccggguggagaccuacaucaaguggccgugguggguguggcugugcaucuccgucgugcucaucuucguggucagcaugcugcugcucugcugcugcagcaccggcugcugcggcuucuucuccugcuucgccagcuccauccgcgggugcugcgagagcaccaagcugcccuacuacgacguggagaagauccacauccaguga

SEQ ID NO: 14969 - RNA, 3516 nt, Artificial Sequence
  HCoV/229E/BN1/GER/2015__AOG74783.1 spike protein CDS gc (1-1171)(I869P_I870P)
auguucgugcugcucgucgccuacgcccugcugcacaucgcgggcugccagaccaccaacgggacgaacaccagccacuccgugugcaacggcugcguggggcacagcgagaacgucuucgccguggaguccggcggguacauccccagcaacuucgccuucaacaacugguuccuccugaccaacaccuccagcguggucgacggcguggugcgcuccuuccagccgcugcuccugaacugccuguggagcgucuccggcagccaguucacgaccggguucguguacuucaacggcaccgggcggggcgccugcaagggguucuacuccaacgccagcuccgacgugauccgcuacaacaucaacuucgaggagaaccuccggcgcggcaccauccuguucaagacgagcuacggcgcggucguguucuacugcaccaacaacacccugguguccggggacgcccacauccccagcggcaccguccucgggaacuucuacugcuucgugaacacgaccaucggcaacgagaccaccuccgccuucgugggcgcccugcccaagacgguccgggaguucgugaucagccgcaccgggcacuucuacaucaacggcuaccgguacuucucccugggggacguggaggcggucaacuucaacgugaccaacgccgccaccacggugugcaccgucgcccucgccagcuacgcggacgugcuggucaacgugagccagaccgccaucgccaacaucaucuacugcaacuccgugaucaaccgccugcggugcgaccagcucagcuucgacguccccgacggcuucuacuccaccagcccgauccagcccguggagcugcccguguccaucgucagccugcccguguaccacaagcacacguucaucgugcucuacgucaacuucgagcaccgccgggggccgggcaagugcuacaacugccgccccgccgugaucaacaucacccuggccaacuucaacgagaccaagggcccccugugcguggacaccucccacuucacgacccaguucgucgacaacgugaagcucgcgcgguggagcgccuccaucaacaccgggaacugccccuucagcuucggcaaggugaacaacuucgucaaguucggguccgugugcuucagccugaaggacaucccgggcgggugcgccaugcccaucauggccaaccuggugaacuccaagagccacaacaucggcucccucuacgucagcugguccgacggcgacgugaucaccggggugcccaagcccgucgagggcgugagcuccuucaugaacgugacgcugaacaagugcaccaaguacaacaucuacgacgucagcggggugggcgugauccgcaucagcaacgacaccuuccugaacgggaucaccuacacguccaccagcggcaaccuccugggcuucaaggacgucaccaacgggaccaucuacuccaucaccccgugcaacccgcccgaccagcuggugguguaccagcaggccgucgugggcgcgaugcucagcgagaacuucacguccuacggguucagcaacguggucgagaugcccaaguucuucuacgccuccaacggcaccuacaacugcaccgacgccgugcugaccuacagcuccuucggcgugugcgccgacgggagcaucaucgccguccagccccggaacguguccuacgacagcguguccgcgaucgucacggccaaccugagcauccccuucaacuggaccaccuccguccagguggaguaccuccagaucaccagcacgcccaucgugguggacugcuccaccuacgugugcaacggcaacguccgcugcguggagcugcugaagcaguacaccagcgccugcaagaccaucgaggacgcccuccggaacagcgcgaugcuggaguccgccgacgugagcgagaugcugacguucgacaagaaggccuucacccucgccaacgucuccagcuucggggacuacaaccuguccagcgugauccccucccugccgcgcagcggcucccggguggccgggcgcagcgcgaucgaggacauccucuucuccaagcuggucaccagcggccugggcaccguggacgccgacuacaagaagugcacgaaggggcuguccaucgccgaccucgccugcgcccaguacuacaacggcaucaugguccugcccgggguggcggacgccgagcggauggccauguacaccggcagccugaucgggggcaucgcccucggcgggcugaccuccgccgcgagcauccccuucucccuggccauccagagccgccucaacuacguggcccugcagaccgacguccugcaggagaaccagcgcauccucgccgcguccuucaacaaggccaugacgaacaucguggacgccuucaccggcgugaacgacgccaucacccagaccagccaggcccugcagacggucgcgaccgcccugaacaagauccaggacguggugaaccagcaggggaacagccucaaccaccugaccucccagcugcggcagaacuuccaggccaucagcuccagcauccaggccaucuacgaccgccucgacccgccccaggccgaccagcaggucgaccggcugaucaccggccgccuggcggcccucaacguguucgugucccacacgcugaccaaguacaccgagguccgggccagccgccagcuggcccagcagaaggugaacgagugcgugaagucccagagcaagcgguacggguucugcggcaacggcacccacaucuucucccucgucaacgccgcgcccgaggggcugguguuccugcacacggugcuccugcccacccaguacaaggacgucgaggccuggagcggccugugcguggacgggaucaacggcuacgugcuccgccagccgaaccuggcccuguacaaggaggggaacuacuaccggaucaccucccgcaucauguucgagccccggauccccaccaucgccgacuucguccagaucgagaacugcaacgugacguucgugaacaucagccgcuccgagcuccagaccaucguccccgaguacaucgacgugaacaagacccugcaggagcugagcuacaagcucccgaacuacaccgugcccgaccuggucguggagcaguacaaccagaccauccugaaccucacguccgagaucagcacccuggagaacaaguccgcggagcugaacuacaccgugcagaagcuccagacccugaucgacaacaucaacagcacgcuggucgaccucaaguggcugaaccggguggagaccuacaucaaguggcccugguggguguggcugugcaucuccgucgugcucaucuucguggucagcaugcugcugcucugcugcugcagcaccggcugcugcggcuucuucuccugcuucgccagcuccauccgcgggugcugcgagagcaccaagcugcccuacuacgacguggagaagauccacauccaguga

SEQ ID NO: 14970 - RNA, 3327 nt, Artificial Sequence
  HCoV/229E/BN1/GER/2015__AOG74783.1 spike protein CDS gc (variant)
auguucgugcugcucgucgccuacgcccugcugcacaucgcgggcugccagaccaccaacgggacgaacaccagccacuccgugugcaacggcugcguggggcacagcgagaacgucuucgccguggaguccggcggguacauccccagcaacuucgccuucaacaacugguuccuccugaccaacaccuccagcguggucgacggcguggugcgcuccuuccagccgcugcuccugaacugccuguggagcgucuccggcagccaguucacgaccggguucguguacuucaacggcaccgggcggggcgccugcaagggguucuacuccaacgccagcuccgacgugauccgcuacaacaucaacuucgaggagaaccuccggcgcggcaccauccuguucaagacgagcuacggcgcggucguguucuacugcaccaacaacacccugguguccggggacgcccacauccccagcggcaccguccucgggaacuucuacugcuucgugaacacgaccaucggcaacgagaccaccuccgccuucgugggcgcccugcccaagacgguccgggaguucgugaucagccgcaccgggcacuucuacaucaacggcuaccgguacuucucccugggggacguggaggcggucaacuucaacgugaccaacgccgccaccacggugugcaccgucgcccucgccagcuacgcggacgugcuggucaacgugagccagaccgccaucgccaacaucaucuacugcaacuccgugaucaaccgccugcggugcgaccagcucagcuucgacguccccgacggcuucuacuccaccagcccgauccagcccguggagcugcccguguccaucgucagccugcccguguaccacaagcacacguucaucgugcucuacgucaacuucgagcaccgccgggggccgggcaagugcuacaacugccgccccgccgugaucaacaucacccuggccaacuucaacgagaccaagggcccccugugcguggacaccucccacuucacgacccaguucgucgacaacgugaagcucgcgcgguggagcgccuccaucaacaccgggaacugccccuucagcuucggcaaggugaacaacuucgucaaguucggguccgugugcuucagccugaaggacaucccgggcgggugcgccaugcccaucauggccaaccuggugaacuccaagagccacaacaucggcucccucuacgucagcugguccgacggcgacgugaucaccggggugcccaagcccgucgagggcgugagcuccuucaugaacgugacgcugaacaagugcaccaaguacaacaucuacgacgucagcggggugggcgugauccgcaucagcaacgacaccuuccugaacgggaucaccuacacguccaccagcggcaaccuccugggcuucaaggacgucaccaacgggaccaucuacuccaucaccccgugcaacccgcccgaccagcuggugguguaccagcaggccgucgugggcgcgaugcucagcgagaacuucacguccuacggguucagcaacguggucgagaugcccaaguucuucuacgccuccaacggcaccuacaacugcaccgacgccgugcugaccuacagcuccuucggcgugugcgccgacgggagcaucaucgccguccagccccggaacguguccuacgacagcguguccgcgaucgucacggccaaccugagcauccccuucaacuggaccaccuccguccagguggaguaccuccagaucaccagcacgcccaucgugguggacugcuccaccuacgugugcaacggcaacguccgcugcguggagcugcugaagcaguacaccagcgccugcaagaccaucgaggacgcccuccggaacagcgcgaugcuggaguccgccgacgugagcgagaugcugacguucgacaagaaggccuucacccucgccaacgucuccagcuucggggacuacaaccuguccagcgugauccccucccugccgcgcagcggcucccggguggccgggcgcagcgcgaucgaggacauccucuucuccaagcuggucaccagcggccugggcaccguggacgccgacuacaagaagugcacgaaggggcuguccaucgccgaccucgccugcgcccaguacuacaacggcaucaugguccugcccgggguggcggacgccgagcggauggccauguacaccggcagccugaucgggggcaucgcccucggcgggcugaccuccgccgcgagcauccccuucucccuggccauccagagccgccucaacuacguggcccugcagaccgacguccugcaggagaaccagcgcauccucgccgcguccuucaacaaggccaugacgaacaucguggacgccuucaccggcgugaacgacgccaucacccagaccagccaggcccugcagacggucgcgaccgcccugaacaagauccaggacguggugaaccagcaggggaacagccucaaccaccugaccucccagcugcggcagaacuuccaggccaucagcuccagcauccaggccaucuacgaccgccucgacccgccccaggccgaccagcaggucgaccggcugaucaccggccgccuggcggcccucaacguguucgugucccacacgcugaccaaguacaccgagguccgggccagccgccagcuggcccagcagaaggugaacgagugcgugaagucccagagcaagcgguacggguucugcggcaacggcacccacaucuucucccucgucaacgccgcgcccgaggggcugguguuccugcacacggugcuccugcccacccaguacaaggacgucgaggccuggagcggccugugcguggacgggaucaacggcuacgugcuccgccagccgaaccuggcccuguacaaggaggggaacuacuaccggaucaccucccgcaucauguucgagccccggauccccaccaucgccgacuucguccagaucgagaacugcaacgugacguucgugaacaucagccgcuccgagcuccagaccaucguccccgaguacaucgacgugaacaagacccugcaggagcugagcuacaagcucccgaacuacaccgugcccgaccuggucguggagcaguacaaccagaccauccugaaccucacguccgagaucagcacccuggagaacaaguccgcggagcugaacuacaccgugcagaagcuccagacccugaucgacaacaucaacagcacgcuggucgaccucaaguggcugaaccggguggagaccuga

SEQ ID NO: 14971 - RNA, 3408 nt, Artificial Sequence
  HCoV/229E/BN1/GER/2015__AOG74783.1 spike protein CDS gc (variant)
auguucgugcugcucgucgccuacgcccugcugcacaucgccggcugccagaccaccaacgggacgaacaccagccacuccgugugcaacggcugcguggggcacagcgagaacgucuucgccguggaguccggcggguacauccccagcaacuucgccuucaacaacugguuccuccugaccaacaccuccagcguggucgacggcguggugcgcuccuuccagccgcugcuccugaacugccuguggagcgucuccggcagccaguucacgaccggguucguguacuucaacggcaccgggcggggcgccugcaagggguucuacuccaacgccagcuccgacgugauccgcuacaacaucaacuucgaggagaaccuccggcgcggcaccauccuguucaagacgagcuacggcgcggucguguucuacugcaccaacaacacccugguguccggggacgcccacauccccagcggcaccguccucgggaacuucuacugcuucgugaacacgaccaucggcaacgagaccaccuccgccuucgugggcgcccugcccaagacgguccgggaguucgugaucagccgcaccgggcacuucuacaucaacggcuaccgguacuucucccugggggacguggaggcggucaacuucaacgugaccaacgccgccaccacggugugcaccgucgcccucgccagcuacgcggacgugcuggucaacgugagccagaccgccaucgccaacaucaucuacugcaacuccgugaucaaccgccugcggugcgaccagcucagcuucgacguccccgacggcuucuacuccaccagcccgauccagcccguggagcugcccguguccaucgucagccugcccguguaccacaagcacacguucaucgugcucuacgucaacuucgagcaccgccgggggccgggcaagugcuacaacugccgccccgccgugaucaacaucacccuggccaacuucaacgagaccaagggcccccugugcguggacaccucccacuucacgacccaguucgucgacaacgugaagcucgcgcgguggagcgccuccaucaacaccgggaacugccccuucagcuucggcaaggugaacaacuucgucaaguucggguccgugugcuucagccugaaggacaucccgggcgggugcgccaugcccaucauggccaaccuggugaacuccaagagccacaacaucggcucccucuacgucagcugguccgacggcgacgugaucaccggggugcccaagcccgucgagggcgugagcuccuucaugaacgugacgcugaacaagugcaccaaguacaacaucuacgacgucagcggggugggcgugauccgcaucagcaacgacaccuuccugaacgggaucaccuacacguccaccagcggcaaccuccugggcuucaaggacgucaccaacgggaccaucuacuccaucaccccgugcaacccgcccgaccagcuggugguguaccagcaggccgucgugggcgcgaugcucagcgagaacuucacguccuacggguucagcaacguggucgagaugcccaaguucuucuacgccuccaacggcaccuacaacugcaccgacgccgugcugaccuacagcuccuucggcgugugcgccgacgggagcaucaucgccguccagccccggaacguguccuacgacagcguguccgcgaucgucacggccaaccugagcauccccuucaacuggaccaccuccguccagguggaguaccuccagaucaccagcacgcccaucgugguggacugcuccaccuacgugugcaacggcaacguccgcugcguggagcugcugaagcaguacaccagcgccugcaagaccaucgaggacgcccuccggaacagcgcgaugcuggaguccgccgacgugagcgagaugcugacguucgacaagaaggccuucacccucgccaacgucuccagcuucggggacuacaaccuguccagcgugauccccucccugccgcgcagcggcucccggguggccgggcgcagcgcgaucgaggacauccucuucuccaagcuggucaccagcggccugggcaccguggacgccgacuacaagaagugcacgaaggggcuguccaucgccgaccucgccugcgcccaguacuacaacggcaucaugguccugcccgggguggcggacgccgagcggauggccauguacaccggcagccugaucgggggcaucgcccucggcgggcugaccuccgccgcgagcauccccuucucccuggccauccagagccgccucaacuacguggcccugcagaccgacguccugcaggagaaccagcgcauccucgccgcguccuucaacaaggccaugacgaacaucguggacgccuucaccggcgugaacgacgccaucacccagaccagccaggcccugcagacggucgcgaccgcccugaacaagauccaggacguggugaaccagcaggggaacagccucaaccaccugaccucccagcugcggcagaacuuccaggccaucagcuccagcauccaggccaucuacgaccgccucgacccgccccaggccgaccagcaggucgaccggcugaucaccggccgccuggcggcccucaacguguucgugucccacacgcugaccaaguacaccgagguccgggccagccgccagcuggcccagcagaaggugaacgagugcgugaagucccagagcaagcgguacggguucugcggcaacggcacccacaucuucucccucgucaacgccgcgcccgaggggcugguguuccugcacacggugcuccugcccacccaguacaaggacgucgaggccuggagcggccugugcguggacgggaucaacggcuacgugcuccgccagccgaaccuggcccuguacaaggaggggaacuacuaccggaucaccucccgcaucauguucgagccccggauccccaccaucgccgacuucguccagaucgagaacugcaacgugacguucgugaacaucagccgcuccgagcuccagaccaucguccccgaguacaucgacgugaacaagacccugcaggagcugagcuacaagcucccgaacuacaccgugcccgaccuggucguggagcaguacaaccagaccauccugaaccucacguccgagaucagcacccuggagaacaaguccgcggagcugaacuacaccgugcagaagcuccagacccugaucgacaacaucaacagcacgcuggucgaccucaaguggcugaaccggguggagaccggcggcuacauccccgaggcgccccgcgacgggcaggccuacgugcggaaggacggcgaguggguccugcucuccaccuucuga

SEQ ID NO: 14972 - RNA, 4071 nt, Artificial Sequence
  HCoV/NL63/RPTEC/2004__AFV53148.1 spike protein CDS gc (1-1356)
augaagcuguuccucauccugcuggugcucccccuggccagcugcuucuucacgugcaacuccaacgccaaccugagcaugcuccagcugggcgucccggacaacuccagcaccaucgugaccgggcugcuccccacccacugguucugcgcgaaccaguccaccagcguguacuccgccaacggcuucuucuacaucgacgucgggaaccaccgcagcgccuucgcccugcacaccggcuacuacgacgccaaccaguacuacaucuacgugacgaacgagaucgggcugaacgcguccgugacccucaagaucugcaaguucagccggaacaccaccuucgacuuccuguccaacgccagcuccagcuucgacugcaucgucaaccuccucuucacggagcagcugggcgcgccccugggcaucaccaucuccggggagaccgugcgccuccaccuguacaacgugacccggacguucuacguccccgccgccuacaagcugaccaagcucagcgugaagugcuacuucaacuacuccugcguguucagcgucgugaacgccaccgugaccgucaacgugacgacccacaacggccgcguggucaacuacaccgugugcgacgacugcaacggguacaccgacaacaucuucuccgugcagcaggacggccggaucccgaacggguuccccuucaacaacugguuccugcugacgaacggcagcacccucgucgacggcgugagccgccuguaccagccccugcggcugaccugccuguggcccgugccggggcugaaguccagcaccggcuucgucuacuucaacgccacgggguccgacgugaacugcaacggcuaccagcacaacagcgucguggacgugaugcgcuacaaccucaacuucuccgccaacagccuggacaaccugaaguccggcgucaucguguucaagacccuccaguacgacgugcuguucuacugcagcaacuccagcuccgggguccuggacaccaccauccccuucggccccagcucccagcccuacuacugcuucaucaacagcacgaucaacaccacccacguguccaccuucguggggauccucccgcccacgguccgggagaucgugguggcccgcaccggccaguucuacaucaacggguucaaguacuucgaccugggcuucaucgaggcggucaacuucaacgugaccaccgccagcgccacggacuucuggaccguggccuucgccaccuucgucgacgugcuggugaacgucuccgcgaccaacauccagaaccuccuguacugcgacagccccuucgagaagcugcagugcgagcaccuccaguucggccugcaggacggguucuacuccgccaacuuccuggacgacaacgugcuccccgagaccuacguggcccugccgaucuacuaccagcacacggacaucaacuucaccgccaccgccagcuucggcgggagcugcuacgucugcaagccccaccaggugaacaucucccugaacggcaacaccagcgugugcguccggacgucccacuucagcauccgcuacaucuacaaccgggugaaguccgggagccccggcgacuccagcuggcacaucuaccugaaguccgggaccugccccuucagcuucuccaagcucaacaacuuccagaaguucaagaccaucugcuucagcaccguggaggucccgggguccugcaacuucccccuggaggcgacguggcacuacaccagcuacaccaucgugggcgcccuguacgugaccugguccgaggggaacagcaucacgggcguccccuaccccguguccgggauccgcgaguucagcaaccucgugcugaacaacugcaccaaguacaacaucuacgacuacgucggcaccggcaucauccggagcuccaaccagagccuggccgggggcaucaccuacguguccaacagcgggaaccuccugggcuucaagaacguguccacgggcaacaucuucaucgucaccccgugcaaccagcccgaccagguggccguguaccagcagagcaucaucggggccaugaccgcggucaacgagucccgcuacggccugcagaaccuccugcagcugcccaacuucuacuacgugagcaacgggggcaacaacugcaccacggccgugaugaccuacuccaacuucgggaucugcgccgacggcagccucauccccguccggccgcgcaacuccagcgacaacggcaucuccgccaucaucaccgcgaaccugagcauccccuccaacuggaccacgagcguccagguggaguaccugcagaucaccuccacccccaucgugguggacugcgccaccuacgugugcaacgggaacccgcggugcaagaaccuccugaagcaguacacgagcgccugcaagaccaucgaggacgcccugcgccucuccgcccaccuggagaccaacgacgucagcagcaugcugaccuucgacuccaacgcguucagccucgccaacgugacguccuucggcgacuacaaccugagcuccgugcugccccagcggaacauccgcagcucccgcaucgccgggcggagcgcccucgaggaccugcuguucuccaaggucgugaccagcggccucgggaccgucgacguggacuacaaguccugcaccaagggccugagcaucgccgaccuggcgugcgcccaguacuacaacggcaucauggugcuccccggggucgccgacgccgagcgcauggccauguacacgggcucccugaucgggggcauggugcugggcggccucaccagcgcggccgccauccccuucucccuggcccugcaggcgcggcucaacuacguggcccugcagaccgacguccugcaggagaaccagaagauccucgccgccagcuucaacaaggccaucaacaacaucguggcguccuucagcuccgugaacgacgccaucacccagaccgccgaggccauccacacggucaccaucgcccugaacaagauccaggacguggugaaccagcagggcagcgcgcugaaccaccucaccagccagcugcgccacaacuuccaggccaucuccaacagcauccaggccaucuacgaccggcuggacuccauccaggccgaccagcaggucgaccgccucaucaccgggcggcuggccgcgcugaacgccuucgugagccaggugcucaacaaguacacggagguccgcggcucccggcgccuggcccagcagaagaucaacgagugcgucaagagccaguccaaccgguacggguucugcggcaacgggacccacaucuucagcaucgugaacuccgccccggacggccuccuguuccugcacaccgugcugcuccccaccgacuacaagaacgugaaggcguggagcggcaucugcguggacgggaucuacggcuacguccugcgccagcccaaccuggugcucuacuccgacaacgggguguuccgggucacgagccgcaucauguuccagccccggcugccggugcuguccgacuucgugcagaucuacaacugcaacgucaccuucgugaacaucagccgcguggagcuccacaccgucauccccgacuacguggacgugaacaagacccugcaggaguucgcccagaaccugcccaaguacgucaagcccaacuucgaccucacgccguucaaccugaccuaccugaaccucuccagcgagcugaagcagcuggaggccaagaccgccucccucuuccagaccacgguggagcugcagggccugaucgaccagaucaacagcaccuacguggaccucaagcugcugaaccgguucgagaacuacaucaaguggcccuggugggucuggcucaucaucuccgugguguucgucgugcugcugagccuccugguguucugcugccugagcaccggcugcugcgggugcugcaacugccucaccuccagcaugcgcggcugcugcgacugcggguccacgaagcugcccuacuacgaguucgagaagguccacgugcaguga

SEQ ID NO: 14973 - RNA, 4071 nt, Artificial Sequence
  HCoV/NL63/RPTEC/2004__AFV53148.1 spike protein CDS gc (1-1356)(S1052P_I1053P)
augaagcuguuccucauccugcuggugcucccccuggccagcugcuucuucacgugcaacuccaacgccaaccugagcaugcuccagcugggcgucccggacaacuccagcaccaucgugaccgggcugcuccccacccacugguucugcgcgaaccaguccaccagcguguacuccgccaacggcuucuucuacaucgacgucgggaaccaccgcagcgccuucgcccugcacaccggcuacuacgacgccaaccaguacuacaucuacgugacgaacgagaucgggcugaacgcguccgugacccucaagaucugcaaguucagccggaacaccaccuucgacuuccuguccaacgccagcuccagcuucgacugcaucgucaaccuccucuucacggagcagcugggcgcgccccugggcaucaccaucuccggggagaccgugcgccuccaccuguacaacgugacccggacguucuacguccccgccgccuacaagcugaccaagcucagcgugaagugcuacuucaacuacuccugcguguucagcgucgugaacgccaccgugaccgucaacgugacgacccacaacggccgcguggucaacuacaccgugugcgacgacugcaacggguacaccgacaacaucuucuccgugcagcaggacggccggaucccgaacggguuccccuucaacaacugguuccugcugacgaacggcagcacccucgucgacggcgugagccgccuguaccagccccugcggcugaccugccuguggcccgugccggggcugaaguccagcaccggcuucgucuacuucaacgccacgggguccgacgugaacugcaacggcuaccagcacaacagcgucguggacgugaugcgcuacaaccucaacuucuccgccaacagccuggacaaccugaaguccggcgucaucguguucaagacccuccaguacgacgugcuguucuacugcagcaacuccagcuccgggguccuggacaccaccauccccuucggccccagcucccagcccuacuacugcuucaucaacagcacgaucaacaccacccacguguccaccuucguggggauccucccgcccacgguccgggagaucgugguggcccgcaccggccaguucuacaucaacggguucaaguacuucgaccugggcuucaucgaggcggucaacuucaacgugaccaccgccagcgccacggacuucuggaccguggccuucgccaccuucgucgacgugcuggugaacgucuccgcgaccaacauccagaaccuccuguacugcgacagccccuucgagaagcugcagugcgagcaccuccaguucggccugcaggacggguucuacuccgccaacuuccuggacgacaacgugcuccccgagaccuacguggcccugccgaucuacuaccagcacacggacaucaacuucaccgccaccgccagcuucggcgggagcugcuacgucugcaagccccaccaggugaacaucucccugaacggcaacaccagcgugugcguccggacgucccacuucagcauccgcuacaucuacaaccgggugaaguccgggagccccggcgacuccagcuggcacaucuaccugaaguccgggaccugccccuucagcuucuccaagcucaacaacuuccagaaguucaagaccaucugcuucagcaccguggaggucccgggguccugcaacuucccccuggaggcgacguggcacuacaccagcuacaccaucgugggcgcccuguacgugaccugguccgaggggaacagcaucacgggcguccccuaccccguguccgggauccgcgaguucagcaaccucgugcugaacaacugcaccaaguacaacaucuacgacuacgucggcaccggcaucauccggagcuccaaccagagccuggccgggggcaucaccuacguguccaacagcgggaaccuccugggcuucaagaacguguccacgggcaacaucuucaucgucaccccgugcaaccagcccgaccagguggccguguaccagcagagcaucaucggggccaugaccgcggucaacgagucccgcuacggccugcagaaccuccugcagcugcccaacuucuacuacgugagcaacgggggcaacaacugcaccacggccgugaugaccuacuccaacuucgggaucugcgccgacggcagccucauccccguccggccgcgcaacuccagcgacaacggcaucuccgccaucaucaccgcgaaccugagcauccccuccaacuggaccacgagcguccagguggaguaccugcagaucaccuccacccccaucgugguggacugcgccaccuacgugugcaacgggaacccgcggugcaagaaccuccugaagcaguacacgagcgccugcaagaccaucgaggacgcccugcgccucuccgcccaccuggagaccaacgacgucagcagcaugcugaccuucgacuccaacgcguucagccucgccaacgugacguccuucggcgacuacaaccugagcuccgugcugccccagcggaacauccgcagcucccgcaucgccgggcggagcgcccucgaggaccugcuguucuccaaggucgugaccagcggccucgggaccgucgacguggacuacaaguccugcaccaagggccugagcaucgccgaccuggcgugcgcccaguacuacaacggcaucauggugcuccccggggucgccgacgccgagcgcauggccauguacacgggcucccugaucgggggcauggugcugggcggccucaccagcgcggccgccauccccuucucccuggcccugcaggcgcggcucaacuacguggcccugcagaccgacguccugcaggagaaccagaagauccucgccgccagcuucaacaaggccaucaacaacaucguggcguccuucagcuccgugaacgacgccaucacccagaccgccgaggccauccacacggucaccaucgcccugaacaagauccaggacguggugaaccagcagggcagcgcgcugaaccaccucaccagccagcugcgccacaacuuccaggccaucuccaacagcauccaggccaucuacgaccggcuggacccgccccaggccgaccagcaggucgaccgccucaucaccgggcggcuggccgcgcugaacgccuucgugucccaggugcucaacaaguacacggagguccgcggcagccggcgccuggcccagcagaagaucaacgagugcgugaagucccagagcaaccgguacggguucugcggcaacgggacccacaucuucuccaucgugaacagcgcccccgacggccuccuguuccugcacaccguccugcuccccaccgacuacaagaacgugaaggcgugguccggcaucugcguggacgggaucuacggcuacguccugcgccagccgaaccuggugcucuacagcgacaacgggguguuccgggucacgucccgcaucauguuccagccccggcugcccgugcugagcgacuucgugcagaucuacaacugcaacgucaccuucgugaacaucucccgcguggagcuccacaccgucauccccgacuacguggacgugaacaagacccugcaggaguucgcccagaaccugccgaaguacgucaagcccaacuucgaccucacgcccuucaaccugaccuaccugaaccucagcuccgagcugaagcagcuggaggccaagaccgccagccucuuccagaccacgguggagcugcagggccugaucgaccagaucaacuccaccuacguggaccucaagcugcugaaccgguucgagaacuacaucaaguggcccuggugggucuggcucaucaucagcgugguguucgucgugcugcugucccuccugguguucugcugccugagcaccggcugcugcgggugcugcaacugccucaccagcuccaugcgcggcugcugcgacugcgggagcacgaagcugccguacuacgaguucgagaagguccacgugcaguga

SEQ ID NO: 14974 - RNA, 3876 nt, Artificial Sequence
  HCoV/NL63/RPTEC/2004__AFV53148.1 spike protein CDS gc (variant)
augaagcuguuccucauccugcuggugcucccccuggccagcugcuucuucacgugcaacuccaacgccaaccugagcaugcuccagcugggcgucccggacaacuccagcaccaucgugaccgggcugcuccccacccacugguucugcgcgaaccaguccaccagcguguacuccgccaacggcuucuucuacaucgacgucgggaaccaccgcagcgccuucgcccugcacaccggcuacuacgacgccaaccaguacuacaucuacgugacgaacgagaucgggcugaacgcguccgugacccucaagaucugcaaguucagccggaacaccaccuucgacuuccuguccaacgccagcuccagcuucgacugcaucgucaaccuccucuucacggagcagcugggcgcgccccugggcaucaccaucuccggggagaccgugcgccuccaccuguacaacgugacccggacguucuacguccccgccgccuacaagcugaccaagcucagcgugaagugcuacuucaacuacuccugcguguucagcgucgugaacgccaccgugaccgucaacgugacgacccacaacggccgcguggucaacuacaccgugugcgacgacugcaacggguacaccgacaacaucuucuccgugcagcaggacggccggaucccgaacggguuccccuucaacaacugguuccugcugacgaacggcagcacccucgucgacggcgugagccgccuguaccagccccugcggcugaccugccuguggcccgugccggggcugaaguccagcaccggcuucgucuacuucaacgccacgggguccgacgugaacugcaacggcuaccagcacaacagcgucguggacgugaugcgcuacaaccucaacuucuccgccaacagccuggacaaccugaaguccggcgucaucguguucaagacccuccaguacgacgugcuguucuacugcagcaacuccagcuccgggguccuggacaccaccauccccuucggccccagcucccagcccuacuacugcuucaucaacagcacgaucaacaccacccacguguccaccuucguggggauccucccgcccacgguccgggagaucgugguggcccgcaccggccaguucuacaucaacggguucaaguacuucgaccugggcuucaucgaggcggucaacuucaacgugaccaccgccagcgccacggacuucuggaccguggccuucgccaccuucgucgacgugcuggugaacgucuccgcgaccaacauccagaaccuccuguacugcgacagccccuucgagaagcugcagugcgagcaccuccaguucggccugcaggacggguucuacuccgccaacuuccuggacgacaacgugcuccccgagaccuacguggcccugccgaucuacuaccagcacacggacaucaacuucaccgccaccgccagcuucggcgggagcugcuacgucugcaagccccaccaggugaacaucucccugaacggcaacaccagcgugugcguccggacgucccacuucagcauccgcuacaucuacaaccgggugaaguccgggagccccggcgacuccagcuggcacaucuaccugaaguccgggaccugccccuucagcuucuccaagcucaacaacuuccagaaguucaagaccaucugcuucagcaccguggaggucccgggguccugcaacuucccccuggaggcgacguggcacuacaccagcuacaccaucgugggcgcccuguacgugaccugguccgaggggaacagcaucacgggcguccccuaccccguguccgggauccgcgaguucagcaaccucgugcugaacaacugcaccaaguacaacaucuacgacuacgucggcaccggcaucauccggagcuccaaccagagccuggccgggggcaucaccuacguguccaacagcgggaaccuccugggcuucaagaacguguccacgggcaacaucuucaucgucaccccgugcaaccagcccgaccagguggccguguaccagcagagcaucaucggggccaugaccgcggucaacgagucccgcuacggccugcagaaccuccugcagcugcccaacuucuacuacgugagcaacgggggcaacaacugcaccacggccgugaugaccuacuccaacuucgggaucugcgccgacggcagccucauccccguccggccgcgcaacuccagcgacaacggcaucuccgccaucaucaccgcgaaccugagcauccccuccaacuggaccacgagcguccagguggaguaccugcagaucaccuccacccccaucgugguggacugcgccaccuacgugugcaacgggaacccgcggugcaagaaccuccugaagcaguacacgagcgccugcaagaccaucgaggacgcccugcgccucuccgcccaccuggagaccaacgacgucagcagcaugcugaccuucgacuccaacgcguucagccucgccaacgugacguccuucggcgacuacaaccugagcuccgugcugccccagcggaacauccgcagcucccgcaucgccgggcggagcgcccucgaggaccugcuguucuccaaggucgugaccagcggccucgggaccgucgacguggacuacaaguccugcaccaagggccugagcaucgccgaccuggcgugcgcccaguacuacaacggcaucauggugcuccccggggucgccgacgccgagcgcauggccauguacacgggcucccugaucgggggcauggugcugggcggccucaccagcgcggccgccauccccuucucccuggcccugcaggcgcggcucaacuacguggcccugcagaccgacguccugcaggagaaccagaagauccucgccgccagcuucaacaaggccaucaacaacaucguggcguccuucagcuccgugaacgacgccaucacccagaccgccgaggccauccacacggucaccaucgcccugaacaagauccaggacguggugaaccagcagggcagcgcgcugaaccaccucaccagccagcugcgccacaacuuccaggccaucuccaacagcauccaggccaucuacgaccggcuggacccgccccaggccgaccagcaggucgaccgccucaucaccgggcggcuggccgcgcugaacgccuucgugucccaggugcucaacaaguacacggagguccgcggcagccggcgccuggcccagcagaagaucaacgagugcgugaagucccagagcaaccgguacggguucugcggcaacgggacccacaucuucuccaucgugaacagcgcccccgacggccuccuguuccugcacaccguccugcuccccaccgacuacaagaacgugaaggcgugguccggcaucugcguggacgggaucuacggcuacguccugcgccagccgaaccuggugcucuacagcgacaacgggguguuccgggucacgucccgcaucauguuccagccccggcugcccgugcugagcgacuucgugcagaucuacaacugcaacgucaccuucgugaacaucucccgcguggagcuccacaccgucauccccgacuacguggacgugaacaagacccugcaggaguucgcccagaaccugccgaaguacgucaagcccaacuucgaccucacgcccuucaaccugaccuaccugaaccucagcuccgagcugaagcagcuggaggccaagaccgccagccucuuccagaccacgguggagcugcagggccugaucgaccagaucaacuccaccuacguggaccucaagcugcugaaccgguucgagaacuga

SEQ ID NO: 14975 - RNA, 3957 nt, Artificial Sequence
  HCoV/NL63/RPTEC/2004__AFV53148.1 spike protein CDS gc (variant)
augaagcuguuccucauccugcuggugcucccccuggccagcugcuucuucacgugcaacuccaacgccaaccugagcaugcuccagcugggcgucccggacaacuccagcaccaucgugaccgggcugcuccccacccacugguucugcgcgaaccaguccaccagcguguacuccgccaacggcuucuucuacaucgacgucgggaaccaccgcagcgccuucgcccugcacaccggcuacuacgacgccaaccaguacuacaucuacgugacgaacgagaucgggcugaacgcguccgugacccucaagaucugcaaguucagccggaacaccaccuucgacuuccuguccaacgccagcuccagcuucgacugcaucgucaaccuccucuucacggagcagcugggcgcgccccugggcaucaccaucuccggggagaccgugcgccuccaccuguacaacgugacccggacguucuacguccccgccgccuacaagcugaccaagcucagcgugaagugcuacuucaacuacuccugcguguucagcgucgugaacgccaccgugaccgucaacgugacgacccacaacggccgcguggucaacuacaccgugugcgacgacugcaacggguacaccgacaacaucuucuccgugcagcaggacggccggaucccgaacggguuccccuucaacaacugguuccugcugacgaacggcagcacccucgucgacggcgugagccgccuguaccagccccugcggcugaccugccuguggcccgugccggggcugaaguccagcaccggcuucgucuacuucaacgccacgggguccgacgugaacugcaacggcuaccagcacaacagcgucguggacgugaugcgcuacaaccucaacuucuccgccaacagccuggacaaccugaaguccggcgucaucguguucaagacccuccaguacgacgugcuguucuacugcagcaacuccagcuccgggguccuggacaccaccauccccuucggccccagcucccagcccuacuacugcuucaucaacagcacgaucaacaccacccacguguccaccuucguggggauccucccgcccacgguccgggagaucgugguggcccgcaccggccaguucuacaucaacggguucaaguacuucgaccugggcuucaucgaggcggucaacuucaacgugaccaccgccagcgccacggacuucuggaccguggccuucgccaccuucgucgacgugcuggugaacgucuccgcgaccaacauccagaaccuccuguacugcgacagccccuucgagaagcugcagugcgagcaccuccaguucggccugcaggacggguucuacuccgccaacuuccuggacgacaacgugcuccccgagaccuacguggcccugccgaucuacuaccagcacacggacaucaacuucaccgccaccgccagcuucggcgggagcugcuacgucugcaagccccaccaggugaacaucucccugaacggcaacaccagcgugugcguccggacgucccacuucagcauccgcuacaucuacaaccgggugaaguccgggagccccggcgacuccagcuggcacaucuaccugaaguccgggaccugccccuucagcuucuccaagcucaacaacuuccagaaguucaagaccaucugcuucagcaccguggaggucccgggguccugcaacuucccccuggaggcgacguggcacuacaccagcuacaccaucgugggcgcccuguacgugaccugguccgaggggaacagcaucacgggcguccccuaccccguguccgggauccgcgaguucagcaaccucgugcugaacaacugcaccaaguacaacaucuacgacuacgucggcaccggcaucauccggagcuccaaccagagccuggccgggggcaucaccuacguguccaacagcgggaaccuccugggcuucaagaacguguccacgggcaacaucuucaucgucaccccgugcaaccagcccgaccagguggccguguaccagcagagcaucaucggggccaugaccgcggucaacgagucccgcuacggccugcagaaccuccugcagcugcccaacuucuacuacgugagcaacgggggcaacaacugcaccacggccgugaugaccuacuccaacuucgggaucugcgccgacggcagccucauccccguccggccgcgcaacuccagcgacaacggcaucuccgccaucaucaccgcgaaccugagcauccccuccaacuggaccacgagcguccagguggaguaccugcagaucaccuccacccccaucgugguggacugcgccaccuacgugugcaacgggaacccgcggugcaagaaccuccugaagcaguacacgagcgccugcaagaccaucgaggacgcccugcgccucuccgcccaccuggagaccaacgacgucagcagcaugcugaccuucgacuccaacgcguucagccucgccaacgugacguccuucggcgacuacaaccugagcuccgugcugccccagcggaacauccgcagcucccgcaucgccgggcggagcgcccucgaggaccugcuguucuccaaggucgugaccagcggccucgggaccgucgacguggacuacaaguccugcaccaagggccugagcaucgccgaccuggcgugcgcccaguacuacaacggcaucauggugcuccccggggucgccgacgccgagcgcauggccauguacacgggcucccugaucgggggcauggugcugggcggccucaccagcgcggccgccauccccuucucccuggcccugcaggcgcggcucaacuacguggcccugcagaccgacguccugcaggagaaccagaagauccucgccgccagcuucaacaaggccaucaacaacaucguggcguccuucagcuccgugaacgacgccaucacccagaccgccgaggccauccacacggucaccaucgcccugaacaagauccaggacguggugaaccagcagggcagcgcgcugaaccaccucaccagccagcugcgccacaacuuccaggccaucuccaacagcauccaggccaucuacgaccggcuggacccgccccaggccgaccagcaggucgaccgccucaucaccgggcggcuggccgcgcugaacgccuucgugucccaggugcucaacaaguacacggagguccgcggcagccggcgccuggcccagcagaagaucaacgagugcgugaagucccagagcaaccgguacggguucugcggcaacgggacccacaucuucuccaucgugaacagcgcccccgacggccuccuguuccugcacaccguccugcuccccaccgacuacaagaacgugaaggcgugguccggcaucugcguggacgggaucuacggcuacguccugcgccagccgaaccuggugcucuacagcgacaacgggguguuccgggucacgucccgcaucauguuccagccccggcugcccgugcugagcgacuucgugcagaucuacaacugcaacgucaccuucgugaacaucucccgcguggagcuccacaccgucauccccgacuacguggacgugaacaagacccugcaggaguucgcccagaaccugccgaaguacgucaagcccaacuucgaccucacgcccuucaaccugaccuaccugaaccucagcuccgagcugaagcagcuggaggccaagaccgccagccucuuccagaccacgguggagcugcagggccugaucgaccagaucaacuccaccuacguggaccucaagcugcugaaccgguucgagaacggcggguacauccccgaggccccgcgcgacggccaggcguacguccggaaggacggggagugggugcuccugagcaccuucuga

SEQ ID NO: 14976 - RNA, 3771 nt, Artificial Sequence
  Bat SARS-like CoV/WIV1__AGZ48828.1 spike protein CDS gc (1-1256)
augaagcugcucgugcuggucuucgccacccuggugagcuccuacaccaucgagaagugccucgacuucgacgaccgcacgcccccggccaacacccaguuccugagcucccaccggggcguguacuaccccgacgacaucuuccgcagcaacguccugcaccucgugcaggaccacuuccugcccuucgacuccaacgugacccgguucaucaccuucgggcugaacuucgacaaccccaucaucccguucaaggacggcaucuacuucgcggccacggagaaguccaacgucauccgcggguggguguucggcagcaccaugaacaacaagagccaguccgugaucaucaugaacaacagcaccaaccucgucauccgggccugcaacuucgagcugugcgacaaccccuucuucguggugcugaaguccaacaacacccagauccccagcuacaucuucaacaacgccuucaacugcacguucgaguacgucuccaaggacuucaaccucgaccugggggagaagcccggcaacuucaaggaccugcgcgaguucguguuccggaacaaggacggcuuccuccacguguacagcggguaccagccgaucuccgccgcgagcggccugcccaccggguucaacgcccugaagcccaucuucaagcucccccugggcaucaacaucaccaacuuccgcacccugcucacggccuucccgccccggcccgacuacugggggaccuccgccgcggccuacuucgucggcuaccugaagcccaccaccuucaugcugaaguacgacgagaacggcacgaucaccgacgccguggacugcagccagaacccgcucgccgagcugaagugcuccgucaagagcuucgagaucgacaaggggaucuaccagaccagcaacuuccgcguggcccccuccaaggagguggugcgguuccccaacaucaccaaccugugccccuucggcgaggucuucaacgcgacgaccuucccgagcguguacgccugggagcgcaagcggaucuccaacugcguggccgacuacagcguccucuacaacuccaccagcuucuccaccuucaagugcuacggggugagcgccacgaagcugaacgaccugugcuucuccaacgucuacgccgacagcuucguggugaagggcgacgacguccgccagaucgcgcccggccagaccggggugaucgccgacuacaacuacaagcuccccgacgacuucaccggcugcgugcuggccuggaacacccggaacaucgacgccacgcagaccgggaacuacaacuacaaguaccgcucccugcggcacggcaagcuccgccccuucgagcgggacaucagcaacgucccguucucccccgacgggaagcccugcacgcccccggccuucaacugcuacuggccccugaacgacuacggcuucuacaucaccaacggcaucggguaccagcccuaccgcguggugguccugagcuucgagcuccugaacgcgccggccaccgugugcggccccaagcuguccaccgaccucaucaagaaccagugcgugaacuucaacuucaacgggcugaccggcaccgggguccugacgcccagcuccaagcgguuccagcccuuccagcaguucggccgcgacgugagcgacuucaccgacuccgugcgcgacccgaagaccagcgagauccucgacaucagccccugcuccuucggcggggucagcgugaucacccccggcaccaacacguccagcgagguggccguccuguaccaggacgugaacugcaccgacgugcccgucgccauccacgccgaccagcugaccccguccuggcgggugcacagcaccgggaacaacguguuccagacgcaggcgggcugccucaucggggccgagcacgucgacaccuccuacgagugcgacauccccaucggcgccggcaucugcgccagcuaccacaccguguccagccugcgcuccaccagccagaaguccaucguggcguacacgaugagccugggggccgacuccagcaucgccuacuccaacaacaccaucgccauccccaccaacuucagcaucagcaucaccacggaggucaugcccguguccauggccaagaccagcguggacugcaacauguacaucugcggcgacuccaccgagugcgcgaaccugcuccugcaguacgggagcuucugcacccagcugaaccgggcccucuccggcaucgccgucgagcaggaccgcaacacgcgggagguguucgcccaggugaagcagauguacaagaccccgacccugaaggacuucggcggguucaacuucagccagauccugcccgacccccucaagcccaccaagcgcuccuucaucgaggaccugcuguucaacaaggucacgcucgccgacgcgggcuucaugaagcaguacggggagugccugggcgacaucaacgcccgggaccugaucugcgcccagaaguucaacgggcucaccgugcugccgccccugcucaccgacgacaugaucgccgccuacaccgcggcccuggugagcggcacggccaccgccggcuggaccuucggggcgggcgccgcccugcagauccccuucgccaugcagauggccuaccgcuucaacgggaucggcgucacccagaacgugcucuacgagaaccagaagcagaucgcgaaccaguucaacaaggccaucucccagauccaggagagccugacgaccaccuccaccgcccuggggaagcuccaggacguggucaaccagaacgcccaggcccugaacacgcuggugaagcagcucagcuccaacuucggcgcgaucagcuccgugcugaacgacauccugagccggcucgacaaggucgaggccgaggugcagaucgaccgccugaucaccggccggcugcagucccuccagaccuacgugacccagcagcugauccgcgccgccgagauccgggccagcgcgaaccuggccgccacgaagauguccgagugcguccucgggcagagcaagcgcguggacuucugcggcaagggguaccaccugaugagcuucccccaggccgcgccgcacggcguggucuuccugcacgugaccuacgugcccucccaggagcggaacuucaccaccgcccccgccaucugccacgaggggaaggccuacuucccccgcgagggcgucuucguguucaacggcaccagcugguucaucacgcagcggaacuucuucuccccgcagaucaucaccaccgacaacaccuucgucagcggguccugcgacguggugaucggcaucaucaacaacacggucuacgacccccuccagcccgagcuggacagcuucaaggaggagcuggacaaguacuucaagaaccacaccuccccggacguggaccucggggacaucagcggcaucaacgccuccguggucaacauccagaaggagaucgaccgccugaacgagguggcgaagaaccugaacgagagccucaucgaccugcaggagcuggggaaguacgagcaguacaucaaguggcccugguacguguggcucggcuucaucgccggccugaucgccaucgucauggugaccauccugcucugcugcaugaccuccugcugcagcugccugaagggggccugcuccugcggcagcugcugcaaguucgacgaggacgacuccgagcccgugcugaagggggucaagcuccacuacacguga

SEQ ID NO: 14977 - RNA, 3771 nt, Artificial Sequence
  Bat SARS-like CoV/WIV1__AGZ48828.1 spike protein CDS gc (1-1256)(K969P_V970P)
augaagcugcucgugcuggucuucgccacccuggugagcuccuacaccaucgagaagugccucgacuucgacgaccgcacgcccccggccaacacccaguuccugagcucccaccggggcguguacuaccccgacgacaucuuccgcagcaacguccugcaccucgugcaggaccacuuccugcccuucgacuccaacgugacccgguucaucaccuucgggcugaacuucgacaaccccaucaucccguucaaggacggcaucuacuucgcggccacggagaaguccaacgucauccgcggguggguguucggcuccaccaugaacaacaagagccaguccgugaucaucaugaacaacagcaccaaccucgucauccgggccugcaacuucgagcugugcgacaaccccuucuucguggugcugaaguccaacaacacccagauccccagcuacaucuucaacaacgccuucaacugcacguucgaguacgucuccaaggacuucaaccucgaccugggggagaagcccggcaacuucaaggaccugcgcgaguucguguuccggaacaaggacggcuuccuccacguguacagcggguaccagccgaucuccgccgcgagcggccugcccaccggguucaacgcccugaagcccaucuucaagcucccccugggcaucaacaucaccaacuuccgcacccugcucacggccuucccgccccggcccgacuacugggggaccuccgccgcggccuacuucgucggcuaccugaagcccaccaccuucaugcugaaguacgacgagaacggcacgaucaccgacgccguggacugcagccagaacccgcucgccgagcugaagugcuccgucaagagcuucgagaucgacaaggggaucuaccagaccagcaacuuccgcguggcccccuccaaggagguggugcgguuccccaacaucaccaaccugugccccuucggcgaggucuucaacgcgacgaccuucccgagcguguacgccugggagcgcaagcggaucuccaacugcguggccgacuacagcguccucuacaacuccaccagcuucuccaccuucaagugcuacggggugagcgccacgaagcugaacgaccugugcuucuccaacgucuacgccgacagcuucguggugaagggcgacgacguccgccagaucgcgcccggccagaccggggugaucgccgacuacaacuacaagcuccccgacgacuucaccggcugcgugcuggccuggaacacccggaacaucgacgccacgcagaccgggaacuacaacuacaaguaccgcucccugcggcacggcaagcuccgccccuucgagcgggacaucagcaacgucccguucucccccgacgggaagcccugcacgcccccggccuucaacugcuacuggccccugaacgacuacggcuucuacaucaccaacggcaucggguaccagcccuaccgcguggugguccugagcuucgagcuccugaacgcgccggccaccgugugcggccccaagcuguccaccgaccucaucaagaaccagugcgugaacuucaacuucaacgggcugaccggcaccgggguccugacgcccagcuccaagcgguuccagcccuuccagcaguucggccgcgacgugagcgacuucaccgacuccgugcgcgacccgaagaccagcgagauccucgacaucagccccugcuccuucggcggggucagcgugaucacccccggcaccaacacguccagcgagguggccguccuguaccaggacgugaacugcaccgacgugcccgucgccauccacgccgaccagcugaccccguccuggcgggugcacagcaccgggaacaacguguuccagacgcaggcgggcugccucaucggggccgagcacgucgacaccuccuacgagugcgacauccccaucggcgccggcaucugcgccagcuaccacaccguguccagccugcgcuccaccagccagaaguccaucguggcguacacgaugagccugggggccgacuccagcaucgccuacuccaacaacaccaucgccauccccaccaacuucagcaucagcaucaccacggaggucaugcccguguccauggccaagaccagcguggacugcaacauguacaucugcggcgacuccaccgagugcgcgaaccugcuccugcaguacgggagcuucugcacccagcugaaccgggcccucuccggcaucgccgucgagcaggaccgcaacacgcgggagguguucgcccaggugaagcagauguacaagaccccgacccugaaggacuucggcggguucaacuucagccagauccugcccgacccccucaagcccaccaagcgcuccuucaucgaggaccugcuguucaacaaggucacgcucgccgacgcgggcuucaugaagcaguacggggagugccugggcgacaucaacgcccgggaccugaucugcgcccagaaguucaacgggcucaccgugcugccgccccugcucaccgacgacaugaucgccgccuacaccgcggcccuggugagcggcacggccaccgccggcuggaccuucggggcgggcgccgcccugcagauccccuucgccaugcagauggccuaccgcuucaacgggaucggcgucacccagaacgugcucuacgagaaccagaagcagaucgcgaaccaguucaacaaggccaucucccagauccaggagagccugacgaccaccuccaccgcccuggggaagcuccaggacguggucaaccagaacgcccaggcccugaacacgcuggugaagcagcucagcuccaacuucggcgcgaucagcuccgugcugaacgacauccugagccggcucgacccgcccgaggccgagguccagaucgaccgccugaucaccggccggcugcagucccuccagaccuacgugacccagcagcugauccgcgccgccgagauccgggccagcgcgaaccuggccgccacgaagauguccgagugcgugcucgggcagagcaagcgcgucgacuucugcggcaagggguaccaccugaugagcuucccccaggccgcgccccacggcgugguguuccugcacgucaccuacgugcccucccaggagcggaacuucaccaccgccccggccaucugccacgaggggaaggccuacuucccccgcgagggcguguucgucuucaacggcaccagcugguucaucacgcagcggaacuucuucagcccccagaucaucaccaccgacaacaccuucgugagcggguccugcgacgucgugaucggcaucaucaacaacacgguguacgacccgcuccagcccgagcuggacagcuucaaggaggagcuggacaaguacuucaagaaccacaccucccccgacgucgaccucggggacaucagcggcaucaacgccuccguggugaacauccagaaggagaucgaccgccugaacgaggucgcgaagaaccugaacgagagccucaucgaccugcaggagcuggggaaguacgagcaguacaucaaguggcccugguacguguggcucggcuucaucgccggccugaucgccaucgugauggucaccauccugcucugcugcaugaccuccugcugcagcugccugaagggggccugcuccugcggcagcugcugcaaguucgacgaggacgacuccgagccggugcugaagggggugaagcuccacuacacguga

SEQ ID NO: 14978 - RNA, 3576 nt, Artificial Sequence
  Bat SARS-like CoV/WIV1__AGZ48828.1 spike protein CDS gc (variant)
augaagcugcucgugcuggucuucgccacccuggugagcuccuacaccaucgagaagugccucgacuucgacgaccgcacgcccccggccaacacccaguuccugagcucccaccggggcguguacuaccccgacgacaucuuccgcagcaacguccugcaccucgugcaggaccacuuccugcccuucgacuccaacgugacccgguucaucaccuucgggcugaacuucgacaaccccaucaucccguucaaggacggcaucuacuucgcggccacggagaaguccaacgucauccgcggguggguguucggcuccaccaugaacaacaagagccaguccgugaucaucaugaacaacagcaccaaccucgucauccgggccugcaacuucgagcugugcgacaaccccuucuucguggugcugaaguccaacaacacccagauccccagcuacaucuucaacaacgccuucaacugcacguucgaguacgucuccaaggacuucaaccucgaccugggggagaagcccggcaacuucaaggaccugcgcgaguucguguuccggaacaaggacggcuuccuccacguguacagcggguaccagccgaucuccgccgcgagcggccugcccaccggguucaacgcccugaagcccaucuucaagcucccccugggcaucaacaucaccaacuuccgcacccugcucacggccuucccgccccggcccgacuacugggggaccuccgccgcggccuacuucgucggcuaccugaagcccaccaccuucaugcugaaguacgacgagaacggcacgaucaccgacgccguggacugcagccagaacccgcucgccgagcugaagugcuccgucaagagcuucgagaucgacaaggggaucuaccagaccagcaacuuccgcguggcccccuccaaggagguggugcgguuccccaacaucaccaaccugugccccuucggcgaggucuucaacgcgacgaccuucccgagcguguacgccugggagcgcaagcggaucuccaacugcguggccgacuacagcguccucuacaacuccaccagcuucuccaccuucaagugcuacggggugagcgccacgaagcugaacgaccugugcuucuccaacgucuacgccgacagcuucguggugaagggcgacgacguccgccagaucgcgcccggccagaccggggugaucgccgacuacaacuacaagcuccccgacgacuucaccggcugcgugcuggccuggaacacccggaacaucgacgccacgcagaccgggaacuacaacuacaaguaccgcucccugcggcacggcaagcuccgccccuucgagcgggacaucagcaacgucccguucucccccgacgggaagcccugcacgcccccggccuucaacugcuacuggccccugaacgacuacggcuucuacaucaccaacggcaucggguaccagcccuaccgcguggugguccugagcuucgagcuccugaacgcgccggccaccgugugcggccccaagcuguccaccgaccucaucaagaaccagugcgugaacuucaacuucaacgggcugaccggcaccgggguccugacgcccagcuccaagcgguuccagcccuuccagcaguucggccgcgacgugagcgacuucaccgacuccgugcgcgacccgaagaccagcgagauccucgacaucagccccugcuccuucggcggggucagcgugaucacccccggcaccaacacguccagcgagguggccguccuguaccaggacgugaacugcaccgacgugcccgucgccauccacgccgaccagcugaccccguccuggcgggugcacagcaccgggaacaacguguuccagacgcaggcgggcugccucaucggggccgagcacgucgacaccuccuacgagugcgacauccccaucggcgccggcaucugcgccagcuaccacaccguguccagccugcgcuccaccagccagaaguccaucguggcguacacgaugagccugggggccgacuccagcaucgccuacuccaacaacaccaucgccauccccaccaacuucagcaucagcaucaccacggaggucaugcccguguccauggccaagaccagcguggacugcaacauguacaucugcggcgacuccaccgagugcgcgaaccugcuccugcaguacgggagcuucugcacccagcugaaccgggcccucuccggcaucgccgucgagcaggaccgcaacacgcgggagguguucgcccaggugaagcagauguacaagaccccgacccugaaggacuucggcggguucaacuucagccagauccugcccgacccccucaagcccaccaagcgcuccuucaucgaggaccugcuguucaacaaggucacgcucgccgacgcgggcuucaugaagcaguacggggagugccugggcgacaucaacgcccgggaccugaucugcgcccagaaguucaacgggcucaccgugcugccgccccugcucaccgacgacaugaucgccgccuacaccgcggcccuggugagcggcacggccaccgccggcuggaccuucggggcgggcgccgcccugcagauccccuucgccaugcagauggccuaccgcuucaacgggaucggcgucacccagaacgugcucuacgagaaccagaagcagaucgcgaaccaguucaacaaggccaucucccagauccaggagagccugacgaccaccuccaccgcccuggggaagcuccaggacguggucaaccagaacgcccaggcccugaacacgcuggugaagcagcucagcuccaacuucggcgcgaucagcuccgugcugaacgacauccugagccggcucgacccgcccgaggccgagguccagaucgaccgccugaucaccggccggcugcagucccuccagaccuacgugacccagcagcugauccgcgccgccgagauccgggccagcgcgaaccuggccgccacgaagauguccgagugcgugcucgggcagagcaagcgcgucgacuucugcggcaagggguaccaccugaugagcuucccccaggccgcgccccacggcgugguguuccugcacgucaccuacgugcccucccaggagcggaacuucaccaccgccccggccaucugccacgaggggaaggccuacuucccccgcgagggcguguucgucuucaacggcaccagcugguucaucacgcagcggaacuucuucagcccccagaucaucaccaccgacaacaccuucgugagcggguccugcgacgucgugaucggcaucaucaacaacacgguguacgacccgcuccagcccgagcuggacagcuucaaggaggagcuggacaaguacuucaagaaccacaccucccccgacgucgaccucggggacaucagcggcaucaacgccuccguggugaacauccagaaggagaucgaccgccugaacgaggucgcgaagaaccugaacgagagccucaucgaccugcaggagcuggggaaguacgagcaguga

SEQ ID NO: 14979 - RNA, 3657 nt, Artificial Sequence
  Bat SARS-like CoV/WIV1__AGZ48828.1 spike protein CDS gc (variant)
augaagcugcucgugcuggucuucgccacccuggugagcuccuacaccaucgagaagugccucgacuucgacgaccgcacgcccccggccaacacccaguuccugagcucccaccggggcguguacuaccccgacgacaucuuccgcagcaacguccugcaccucgugcaggaccacuuccugcccuucgacuccaacgugacccgguucaucaccuucgggcugaacuucgacaaccccaucaucccguucaaggacggcaucuacuucgcggccacggagaaguccaacgucauccgcggguggguguucggcuccaccaugaacaacaagagccaguccgugaucaucaugaacaacagcaccaaccucgucauccgggccugcaacuucgagcugugcgacaaccccuucuucguggugcugaaguccaacaacacccagauccccagcuacaucuucaacaacgccuucaacugcacguucgaguacgucuccaaggacuucaaccucgaccugggggagaagcccggcaacuucaaggaccugcgcgaguucguguuccggaacaaggacggcuuccuccacguguacagcggguaccagccgaucuccgccgcgagcggccugcccaccggguucaacgcccugaagcccaucuucaagcucccccugggcaucaacaucaccaacuuccgcacccugcucacggccuucccgccccggcccgacuacugggggaccuccgccgcggccuacuucgucggcuaccugaagcccaccaccuucaugcugaaguacgacgagaacggcacgaucaccgacgccguggacugcagccagaacccgcucgccgagcugaagugcuccgucaagagcuucgagaucgacaaggggaucuaccagaccagcaacuuccgcguggcccccuccaaggagguggugcgguuccccaacaucaccaaccugugccccuucggcgaggucuucaacgcgacgaccuucccgagcguguacgccugggagcgcaagcggaucuccaacugcguggccgacuacagcguccucuacaacuccaccagcuucuccaccuucaagugcuacggggugagcgccacgaagcugaacgaccugugcuucuccaacgucuacgccgacagcuucguggugaagggcgacgacguccgccagaucgcgcccggccagaccggggugaucgccgacuacaacuacaagcuccccgacgacuucaccggcugcgugcuggccuggaacacccggaacaucgacgccacgcagaccgggaacuacaacuacaaguaccgcucccugcggcacggcaagcuccgccccuucgagcgggacaucagcaacgucccguucucccccgacgggaagcccugcacgcccccggccuucaacugcuacuggccccugaacgacuacggcuucuacaucaccaacggcaucggguaccagcccuaccgcguggugguccugagcuucgagcuccugaacgcgccggccaccgugugcggccccaagcuguccaccgaccucaucaagaaccagugcgugaacuucaacuucaacgggcugaccggcaccgggguccugacgcccagcuccaagcgguuccagcccuuccagcaguucggccgcgacgugagcgacuucaccgacuccgugcgcgacccgaagaccagcgagauccucgacaucagccccugcuccuucggcggggucagcgugaucacccccggcaccaacacguccagcgagguggccguccuguaccaggacgugaacugcaccgacgugcccgucgccauccacgccgaccagcugaccccguccuggcgggugcacagcaccgggaacaacguguuccagacgcaggcgggcugccucaucggggccgagcacgucgacaccuccuacgagugcgacauccccaucggcgccggcaucugcgccagcuaccacaccguguccagccugcgcuccaccagccagaaguccaucguggcguacacgaugagccugggggccgacuccagcaucgccuacuccaacaacaccaucgccauccccaccaacuucagcaucagcaucaccacggaggucaugcccguguccauggccaagaccagcguggacugcaacauguacaucugcggcgacuccaccgagugcgcgaaccugcuccugcaguacgggagcuucugcacccagcugaaccgggcccucuccggcaucgccgucgagcaggaccgcaacacgcgggagguguucgcccaggugaagcagauguacaagaccccgacccugaaggacuucggcggguucaacuucagccagauccugcccgacccccucaagcccaccaagcgcuccuucaucgaggaccugcuguucaacaaggucacgcucgccgacgcgggcuucaugaagcaguacggggagugccugggcgacaucaacgcccgggaccugaucugcgcccagaaguucaacgggcucaccgugcugccgccccugcucaccgacgacaugaucgccgccuacaccgcggcccuggugagcggcacggccaccgccggcuggaccuucggggcgggcgccgcccugcagauccccuucgccaugcagauggccuaccgcuucaacgggaucggcgucacccagaacgugcucuacgagaaccagaagcagaucgcgaaccaguucaacaaggccaucucccagauccaggagagccugacgaccaccuccaccgcccuggggaagcuccaggacguggucaaccagaacgcccaggcccugaacacgcuggugaagcagcucagcuccaacuucggcgcgaucagcuccgugcugaacgacauccugagccggcucgacccgcccgaggccgagguccagaucgaccgccugaucaccggccggcugcagucccuccagaccuacgugacccagcagcugauccgcgccgccgagauccgggccagcgcgaaccuggccgccacgaagauguccgagugcgugcucgggcagagcaagcgcgucgacuucugcggcaagggguaccaccugaugagcuucccccaggccgcgccccacggcgugguguuccugcacgucaccuacgugcccucccaggagcggaacuucaccaccgccccggccaucugccacgaggggaaggccuacuucccccgcgagggcguguucgucuucaacggcaccagcugguucaucacgcagcggaacuucuucagcccccagaucaucaccaccgacaacaccuucgugagcggguccugcgacgucgugaucggcaucaucaacaacacgguguacgacccgcuccagcccgagcuggacagcuucaaggaggagcuggacaaguacuucaagaaccacaccucccccgacgucgaccucggggacaucagcggcaucaacgccuccguggugaacauccagaaggagaucgaccgccugaacgaggucgcgaagaaccugaacgagagccucaucgaccugcaggagcuggggaaguacgagcagggcggcuacauccccgaggccccgcgggacgggcaggccuacgugcgcaaggacggcgagugggugcuccuguccaccuucuga

SEQ ID NO: 14980 - RNA, 3825 nt, Artificial Sequence
  BatCoV/HKU9-1 BF_005I__YP_001039971.1 spike protein CDS gc (1-1274)
augcugcucauccuggugcugggcgucagccucgccgccgcgucccgccccgagugcuucaacccgcgguucacccugacgccccugaaccacacccucaacuacaccagcaucaaggccaagguguccaacgugcugcugcccgaccccuacaucgccuacagcgggcagacccuccgccagaaccuguucauggccgacauguccaacaccauccuguacccggucacgccgcccgccaacggcgcgaacgggggcuucaucuacaacaccagcaucauccccguguccgccggccucuucgugaacaccuggauguaccggcagcccgccagcucccgcgccuacugccaggagcccuucggggucgcguucggcgacaccuucgagaacgaccggaucgccauccugaucauggcccccgacaaccuggggagcugguccgccguggcgccccgcaaccagacgaacaucuaccuccuggugugcagcaacgccacccugugcaucaacccgggcuucaaccggugggggcccgccggcuccuucaucgcccccgacgcccucgucgaccacagcaacuccugcuucgugaacaacaccuucagcgugaacaucuccaccagccgcaucucccuggccuuccuguucaaggacggggaccuccugaucuaccacagcggcuggcugcccacgagcaacuucgagcacggcuucucccgggggagccacccgaugaccuacuucaugucccuccccgucggcgggaaccugccccgcgcgcaguucuuccagagcaucgugcgguccaacgccaucgacaagggcgacggcaugugcaccaacuucgacgugaaccugcacgucgcccaccucaucaaccgcgaccugcuggugagcuacuucaacaacggguccguggccaacgccgcggacugcgccgacagcgccgccgaggagcucuacugcgucaccggcuccuucgacccgcccacggggguguacccccugagccgguaccgcgcccagguggcgggcuucguccgggugacccagcgcggguccuacugcaccccgcccuacagcgugcugcaggacccgccccagcccgucguguggcggcgcuacaugcucuacgacugcgucuucgacuucaccgugguggucgacucccugcccacgcaccagcugcagugcuacggcgugagcccccggcgccucgccuccaugugcuacggcagcgugacccuggacgucaugcggaucaacgagacccaccugaacaaccucuucaaccgcgugcccgacaccuucucccuguacaacuacgcccugcccgacaacuucuacgggugccuccacgccuucuaccugaacagcacggcgccguacgccguggccaaccgcuuccccaucaagcccggcgggcggcaguccaacagcgccuucaucgacaccgucaucaacgccgcgcacuacagccccuucuccuacguguacggccuggccgugaucacccucaagccggccgccgggagcaagcuggucugccccguggccaacgacaccguggucaucacggaccgcugcgugcaguacaaccuguacggcuacaccggcaccggggugcuguccaagaacaccagccucgucauccccgacggcaagguguucacggcguccagcaccgggaccaucaucggcguguccaucaacagcaccacguacuccaucaugcccugcgucaccgugccggugagcgucggguaccaccccaacuucgagcgggcccugcuguucaacggccucuccugcagccagcgcucccgggccgugaccgagcccgugagcguccugugguccgccagcgccaccgcgcaggacgccuucgacacccccuccggcugcguggugaacgucgagcugcgcaacacgaccaucgugaacacgugcgccaugccgaucgggaacagccucugcuucaucaacggcagcaucgccaccgcgaacgccgacucccugccccggcugcagcucgugaacuacgacccccuguacgacaacagcaccgccacccccaugaccccggucuacugggugaaggugcccaccaacuucacgcuguccgccaccgaggaguacauccagaccaccgcccccaagaucacgaucgacugcgcgcgcuaccucugcggggacagcucccggugccugaacguccugcuccacuacggcaccuucugcaacgacaucaacaaggcccugagccgcguguccaccauccuggacagcgcccuccugucccuggugaaggagcucagcaucaacacccgggacgaggucacgaccuucuccuucgacggcgacuacaacuucaccgggcugaugggcugccuggggcccaacugcggcgccaccacguaccgcagcgccuucuccgaccuccuguacgacaaggugcggaucaccgacccgggguucaugcagagcuaccagaagugcaucgacucccaguggggcggcagcauccgcgaccugcucugcacccagaccuacaacgggaucgcggugcugccgcccaucgucucccccgccaugcaggcccuguacacgagccuccuggugggcgccguggccuccagcggguacaccuucggcaucaccagcgcgggggucauccccuucgccacccagcugcaguuccggcucaacggcaucggcgugacgacccaggugcuggucgagaaccagaagcugaucgccuccagcuucaacaacgcccucgugaacauccagaagggguucaccgagaccuccaucgcgcugagcaagaugcaggacgugaucaaccagcacgccgcccagcugcacacgcucgucgugcagcugggcaacuccuucggggccaucagcuccagcaucaacgagaucuucucccgccuggagggccucgccgcgaacgccgaggucgaccggcugaucaacgggcgcaugauggugcugaacaccuacgugacccagcuccugauccaggccagcgaggccaaggcccagaacgcgcuggccgcccagaagaucuccgagugcgucaaggcccagagccuccggaacgacuucugcggcaacggcacccacgugcuguccaucccccagcuggcccccaacgggguccucuucauccacuacgcguacacgccgaccgaguacgccuucgugcagaccagcgccggccugugccacaacgggaccggcuacgcgccccgccaggggauguucgugcugcccaacaacaccaacauguggcacuucacgaccaugcaguucuacaaccccgugaacaucuccgccagcaacacccagguccucaccuccugcagcgugaacuacacguccgugaacuacaccguccuggagccgagcgugcccggcgacuacgacuuccagaaggaguucgacaaguucuacaagaaccugagcaccaucuucaacaacaccuucaaccccaacgacuucaacuucuccacgguggacgucaccgcccagaucaagagccuccacgacguggugaaccagcugaaccaguccuucaucgaccugaagaagcucaacgucuacgagaagaccaucaaguggcccugguacguguggcuggccaugaucgccggcaucguggggcugguccucgccgugaucaugcugaugugcaugaccaacugcugcagcugcuucaagggcaugugcgacugccgccggugcugcggguccuacgacagcuacgacgacguguacccggcgguccgcgugaacaagaagcggacgguguga

SEQ ID NO: 14981 - RNA, 3825 nt, Artificial Sequence
  BatCoV/HKU9-1 BF_005I__YP_001039971.1 spike protein CDS gc (1-1274)(G983P_L984P)
augcugcucauccuggugcugggcgucagccucgccgccgcgucccgccccgagugcuucaacccgcgguucacccugacgccccugaaccacacccucaacuacaccagcaucaaggccaagguguccaacgugcugcugcccgaccccuacaucgccuacagcgggcagacccuccgccagaaccuguucauggccgacauguccaacaccauccuguacccggucacgccgcccgccaacggcgcgaacgggggcuucaucuacaacaccagcaucauccccguguccgccggccucuucgugaacaccuggauguaccggcagcccgccagcucccgcgccuacugccaggagcccuucggggucgcguucggcgacaccuucgagaacgaccggaucgccauccugaucauggcccccgacaaccuggggagcugguccgccguggcgccccgcaaccagacgaacaucuaccuccuggugugcagcaacgccacccugugcaucaacccgggcuucaaccggugggggcccgccggcuccuucaucgcccccgacgcccucgucgaccacagcaacuccugcuucgugaacaacaccuucagcgugaacaucuccaccagccgcaucucccuggccuuccuguucaaggacggggaccuccugaucuaccacagcggcuggcugcccacgagcaacuucgagcacggcuucucccgggggagccacccgaugaccuacuucaugucccuccccgucggcgggaaccugccccgcgcgcaguucuuccagagcaucgugcgguccaacgccaucgacaagggcgacggcaugugcaccaacuucgacgugaaccugcacgucgcccaccucaucaaccgcgaccugcuggugagcuacuucaacaacggguccguggccaacgccgcggacugcgccgacagcgccgccgaggagcucuacugcgucaccggcuccuucgacccgcccacggggguguacccccugagccgguaccgcgcccagguggcgggcuucguccgggugacccagcgcggguccuacugcaccccgcccuacagcgugcugcaggacccgccccagcccgucguguggcggcgcuacaugcucuacgacugcgucuucgacuucaccgugguggucgacucccugcccacgcaccagcugcagugcuacggcgugagcccccggcgccucgccuccaugugcuacggcagcgugacccuggacgucaugcggaucaacgagacccaccugaacaaccucuucaaccgcgugcccgacaccuucucccuguacaacuacgcccugcccgacaacuucuacgggugccuccacgccuucuaccugaacagcacggcgccguacgccguggccaaccgcuuccccaucaagcccggcgggcggcaguccaacagcgccuucaucgacaccgucaucaacgccgcgcacuacagccccuucuccuacguguacggccuggccgugaucacccucaagccggccgccgggagcaagcuggucugccccguggccaacgacaccguggucaucacggaccgcugcgugcaguacaaccuguacggcuacaccggcaccggggugcuguccaagaacaccagccucgucauccccgacggcaagguguucacggcguccagcaccgggaccaucaucggcguguccaucaacagcaccacguacuccaucaugcccugcgucaccgugccggugagcgucggguaccaccccaacuucgagcgggcccugcuguucaacggccucuccugcagccagcgcucccgggccgugaccgagcccgugagcguccugugguccgccagcgccaccgcgcaggacgccuucgacacccccuccggcugcguggugaacgucgagcugcgcaacacgaccaucgugaacacgugcgccaugccgaucgggaacagccucugcuucaucaacggcagcaucgccaccgcgaacgccgacucccugccccggcugcagcucgugaacuacgacccccuguacgacaacagcaccgccacccccaugaccccggucuacugggugaaggugcccaccaacuucacgcuguccgccaccgaggaguacauccagaccaccgcccccaagaucacgaucgacugcgcgcgcuaccucugcggggacagcucccggugccugaacguccugcuccacuacggcaccuucugcaacgacaucaacaaggcccugagccgcguguccaccauccuggacagcgcccuccugucccuggugaaggagcucagcaucaacacccgggacgaggucacgaccuucuccuucgacggcgacuacaacuucaccgggcugaugggcugccuggggcccaacugcggcgccaccacguaccgcagcgccuucuccgaccuccuguacgacaaggugcggaucaccgacccgggguucaugcagagcuaccagaagugcaucgacucccaguggggcggcagcauccgcgaccugcucugcacccagaccuacaacgggaucgcggugcugccgcccaucgucucccccgccaugcaggcccuguacacgagccuccuggugggcgccguggccuccagcggguacaccuucggcaucaccagcgcgggggucauccccuucgccacccagcugcaguuccggcucaacggcaucggcgugacgacccaggugcuggucgagaaccagaagcugaucgccuccagcuucaacaacgcccucgugaacauccagaagggguucaccgagaccuccaucgcgcugagcaagaugcaggacgugaucaaccagcacgccgcccagcugcacacgcucgucgugcagcugggcaacuccuucggggccaucagcuccagcaucaacgagaucuucucccgccuggagccgcccgccgcgaacgccgaggucgaccggcucaucaacggccgcaugauggugcugaacaccuacgugacccagcugcucauccaggccagcgaggccaaggcccagaacgcgcuggccgcccagaagaucuccgagugcgucaaggcccagagccugcggaacgacuucugcgggaacggcacccacgugcucuccaucccccagcuggcccccaacggcgugcuguucauccacuacgcguacacgcccaccgaguacgccuucguccagaccagcgccgggcucugccacaacggcaccggguacgcgccccgccagggcauguucgugcugccgaacaacaccaacauguggcacuucacgaccaugcaguucuacaaccccgugaacaucuccgccagcaacacccagguccugaccuccugcagcgugaacuacacguccgugaacuacaccguccucgagcccagcgugcccggggacuacgacuuccagaaggaguucgacaaguucuacaagaaccugagcaccaucuucaacaacaccuucaacccgaacgacuucaacuucuccacgguggacgucaccgcccagaucaagagccugcacgacguggugaaccagcucaaccaguccuucaucgaccugaagaagcugaacgucuacgagaagaccaucaaguggcccugguacguguggcucgccaugaucgccggcaucgugggccugguccuggccgugaucaugcucaugugcaugaccaacugcugcagcugcuucaaggggaugugcgacugccgccggugcugcggcuccuacgacagcuacgacgacguguaccccgcgguccgcgugaacaagaagcggacgguguga

SEQ ID NO: 14982 - RNA, 3624 nt, Artificial Sequence
  BatCoV/HKU9-1 BF_005I__YP_001039971.1 spike protein CDS gc (variant)
augcugcucauccuggugcugggcgucagccucgccgccgcgucccgccccgagugcuucaacccgcgguucacccugacgccccugaaccacacccucaacuacaccagcaucaaggccaagguguccaacgugcugcugcccgaccccuacaucgccuacagcgggcagacccuccgccagaaccuguucauggccgacauguccaacaccauccuguacccggucacgccgcccgccaacggcgcgaacgggggcuucaucuacaacaccagcaucauccccguguccgccggccucuucgugaacaccuggauguaccggcagcccgccagcucccgcgccuacugccaggagcccuucggggucgcguucggcgacaccuucgagaacgaccggaucgccauccugaucauggcccccgacaaccuggggagcugguccgccguggcgccccgcaaccagacgaacaucuaccuccuggugugcagcaacgccacccugugcaucaacccgggcuucaaccggugggggcccgccggcuccuucaucgcccccgacgcccucgucgaccacagcaacuccugcuucgugaacaacaccuucagcgugaacaucuccaccagccgcaucucccuggccuuccuguucaaggacggggaccuccugaucuaccacagcggcuggcugcccacgagcaacuucgagcacggcuucucccgggggagccacccgaugaccuacuucaugucccuccccgucggcgggaaccugccccgcgcgcaguucuuccagagcaucgugcgguccaacgccaucgacaagggcgacggcaugugcaccaacuucgacgugaaccugcacgucgcccaccucaucaaccgcgaccugcuggugagcuacuucaacaacggguccguggccaacgccgcggacugcgccgacagcgccgccgaggagcucuacugcgucaccggcuccuucgacccgcccacggggguguacccccugagccgguaccgcgcccagguggcgggcuucguccgggugacccagcgcggguccuacugcaccccgcccuacagcgugcugcaggacccgccccagcccgucguguggcggcgcuacaugcucuacgacugcgucuucgacuucaccgugguggucgacucccugcccacgcaccagcugcagugcuacggcgugagcccccggcgccucgccuccaugugcuacggcagcgugacccuggacgucaugcggaucaacgagacccaccugaacaaccucuucaaccgcgugcccgacaccuucucccuguacaacuacgcccugcccgacaacuucuacgggugccuccacgccuucuaccugaacagcacggcgccguacgccguggccaaccgcuuccccaucaagcccggcgggcggcaguccaacagcgccuucaucgacaccgucaucaacgccgcgcacuacagccccuucuccuacguguacggccuggccgugaucacccucaagccggccgccgggagcaagcuggucugccccguggccaacgacaccguggucaucacggaccgcugcgugcaguacaaccuguacggcuacaccggcaccggggugcuguccaagaacaccagccucgucauccccgacggcaagguguucacggcguccagcaccgggaccaucaucggcguguccaucaacagcaccacguacuccaucaugcccugcgucaccgugccggugagcgucggguaccaccccaacuucgagcgggcccugcuguucaacggccucuccugcagccagcgcucccgggccgugaccgagcccgugagcguccugugguccgccagcgccaccgcgcaggacgccuucgacacccccuccggcugcguggugaacgucgagcugcgcaacacgaccaucgugaacacgugcgccaugccgaucgggaacagccucugcuucaucaacggcagcaucgccaccgcgaacgccgacucccugccccggcugcagcucgugaacuacgacccccuguacgacaacagcaccgccacccccaugaccccggucuacugggugaaggugcccaccaacuucacgcuguccgccaccgaggaguacauccagaccaccgcccccaagaucacgaucgacugcgcgcgcuaccucugcggggacagcucccggugccugaacguccugcuccacuacggcaccuucugcaacgacaucaacaaggcccugagccgcguguccaccauccuggacagcgcccuccugucccuggugaaggagcucagcaucaacacccgggacgaggucacgaccuucuccuucgacggcgacuacaacuucaccgggcugaugggcugccuggggcccaacugcggcgccaccacguaccgcagcgccuucuccgaccuccuguacgacaaggugcggaucaccgacccgggguucaugcagagcuaccagaagugcaucgacucccaguggggcggcagcauccgcgaccugcucugcacccagaccuacaacgggaucgcggugcugccgcccaucgucucccccgccaugcaggcccuguacacgagccuccuggugggcgccguggccuccagcggguacaccuucggcaucaccagcgcgggggucauccccuucgccacccagcugcaguuccggcucaacggcaucggcgugacgacccaggugcuggucgagaaccagaagcugaucgccuccagcuucaacaacgcccucgugaacauccagaagggguucaccgagaccuccaucgcgcugagcaagaugcaggacgugaucaaccagcacgccgcccagcugcacacgcucgucgugcagcugggcaacuccuucggggccaucagcuccagcaucaacgagaucuucucccgccuggagccgcccgccgcgaacgccgaggucgaccggcucaucaacggccgcaugauggugcugaacaccuacgugacccagcugcucauccaggccagcgaggccaaggcccagaacgcgcuggccgcccagaagaucuccgagugcgucaaggcccagagccugcggaacgacuucugcgggaacggcacccacgugcucuccaucccccagcuggcccccaacggcgugcuguucauccacuacgcguacacgcccaccgaguacgccuucguccagaccagcgccgggcucugccacaacggcaccggguacgcgccccgccagggcauguucgugcugccgaacaacaccaacauguggcacuucacgaccaugcaguucuacaaccccgugaacaucuccgccagcaacacccagguccugaccuccugcagcgugaacuacacguccgugaacuacaccguccucgagcccagcgugcccggggacuacgacuuccagaaggaguucgacaaguucuacaagaaccugagcaccaucuucaacaacaccuucaacccgaacgacuucaacuucuccacgguggacgucaccgcccagaucaagagccugcacgacguggugaaccagcucaaccaguccuucaucgaccugaagaagcugaacgucuacgagaaguga

SEQ ID NO: 14983 - RNA, 3705 nt, Artificial Sequence
  BatCoV/HKU9-1 BF_005I__YP_001039971.1 spike protein CDS gc (variant)
augcugcucauccuggugcugggcgucagccucgccgccgccucccgccccgagugcuucaacccgcgguucacccugacgccccugaaccacacccucaacuacaccagcaucaaggccaagguguccaacgugcugcugcccgaccccuacaucgccuacagcgggcagacccuccgccagaaccuguucauggccgacauguccaacaccauccuguacccggucacgccgcccgccaacggcgcgaacgggggcuucaucuacaacaccagcaucauccccguguccgccggccucuucgugaacaccuggauguaccggcagcccgccagcucccgcgccuacugccaggagcccuucggggucgcguucggcgacaccuucgagaacgaccggaucgccauccugaucauggcccccgacaaccuggggagcugguccgccguggcgccccgcaaccagacgaacaucuaccuccuggugugcagcaacgccacccugugcaucaacccgggcuucaaccggugggggcccgccggcuccuucaucgcccccgacgcccucgucgaccacagcaacuccugcuucgugaacaacaccuucagcgugaacaucuccaccagccgcaucucccuggccuuccuguucaaggacggggaccuccugaucuaccacagcggcuggcugcccacgagcaacuucgagcacggcuucucccgggggagccacccgaugaccuacuucaugucccuccccgucggcgggaaccugccccgcgcgcaguucuuccagagcaucgugcgguccaacgccaucgacaagggcgacggcaugugcaccaacuucgacgugaaccugcacgucgcccaccucaucaaccgcgaccugcuggugagcuacuucaacaacggguccguggccaacgccgcggacugcgccgacagcgccgccgaggagcucuacugcgucaccggcuccuucgacccgcccacggggguguacccccugagccgguaccgcgcccagguggcgggcuucguccgggugacccagcgcggguccuacugcaccccgcccuacagcgugcugcaggacccgccccagcccgucguguggcggcgcuacaugcucuacgacugcgucuucgacuucaccgugguggucgacucccugcccacgcaccagcugcagugcuacggcgugagcccccggcgccucgccuccaugugcuacggcagcgugacccuggacgucaugcggaucaacgagacccaccugaacaaccucuucaaccgcgugcccgacaccuucucccuguacaacuacgcccugcccgacaacuucuacgggugccuccacgccuucuaccugaacagcacggcgccguacgccguggccaaccgcuuccccaucaagcccggcgggcggcaguccaacagcgccuucaucgacaccgucaucaacgccgcgcacuacagccccuucuccuacguguacggccuggccgugaucacccucaagccggccgccgggagcaagcuggucugccccguggccaacgacaccguggucaucacggaccgcugcgugcaguacaaccuguacggcuacaccggcaccggggugcuguccaagaacaccagccucgucauccccgacggcaagguguucacggcguccagcaccgggaccaucaucggcguguccaucaacagcaccacguacuccaucaugcccugcgucaccgugccggugagcgucggguaccaccccaacuucgagcgggcccugcuguucaacggccucuccugcagccagcgcucccgggccgugaccgagcccgugagcguccugugguccgccagcgccaccgcgcaggacgccuucgacacccccuccggcugcguggugaacgucgagcugcgcaacacgaccaucgugaacacgugcgccaugccgaucgggaacagccucugcuucaucaacggcagcaucgccaccgcgaacgccgacucccugccccggcugcagcucgugaacuacgacccccuguacgacaacagcaccgccacccccaugaccccggucuacugggugaaggugcccaccaacuucacgcuguccgccaccgaggaguacauccagaccaccgcccccaagaucacgaucgacugcgcgcgcuaccucugcggggacagcucccggugccugaacguccugcuccacuacggcaccuucugcaacgacaucaacaaggcccugagccgcguguccaccauccuggacagcgcccuccugucccuggugaaggagcucagcaucaacacccgggacgaggucacgaccuucuccuucgacggcgacuacaacuucaccgggcugaugggcugccuggggcccaacugcggcgccaccacguaccgcagcgccuucuccgaccuccuguacgacaaggugcggaucaccgacccgggguucaugcagagcuaccagaagugcaucgacucccaguggggcggcagcauccgcgaccugcucugcacccagaccuacaacgggaucgcggugcugccgcccaucgucucccccgccaugcaggcccuguacacgagccuccuggugggcgccguggccuccagcggguacaccuucggcaucaccagcgcgggggucauccccuucgccacccagcugcaguuccggcucaacggcaucggcgugacgacccaggugcuggucgagaaccagaagcugaucgccuccagcuucaacaacgcccucgugaacauccagaagggguucaccgagaccuccaucgcgcugagcaagaugcaggacgugaucaaccagcacgccgcccagcugcacacgcucgucgugcagcugggcaacuccuucggggccaucagcuccagcaucaacgagaucuucucccgccuggagccgcccgccgcgaacgccgaggucgaccggcucaucaacggccgcaugauggugcugaacaccuacgugacccagcugcucauccaggccagcgaggccaaggcccagaacgcgcuggccgcccagaagaucuccgagugcgucaaggcccagagccugcggaacgacuucugcgggaacggcacccacgugcucuccaucccccagcuggcccccaacggcgugcuguucauccacuacgcguacacgcccaccgaguacgccuucguccagaccagcgccgggcucugccacaacggcaccggguacgcgccccgccagggcauguucgugcugccgaacaacaccaacauguggcacuucacgaccaugcaguucuacaaccccgugaacaucuccgccagcaacacccagguccugaccuccugcagcgugaacuacacguccgugaacuacaccguccucgagcccagcgugcccggggacuacgacuuccagaaggaguucgacaaguucuacaagaaccugagcaccaucuucaacaacaccuucaacccgaacgacuucaacuucuccacgguggacgucaccgcccagaucaagagccugcacgacguggugaaccagcucaaccaguccuucaucgaccugaagaagcugaacgucuacgagaagggcggcuacauccccgaggcgccccgcgacgggcaggccuacgugcggaaggacggcgagugggugcuccugagcaccuucuga

SEQ ID NO: 14984 - RNA, 3483 nt, Artificial Sequence
  PDCoV/Swine/Thailand/S5011/2015__AMN91621.1 spike protein CDS gc (1-1160)
augcagcgcgcccugcucaucaugacccugcugugccucgcccgggcgaaguucgccgacgaccugcuggaccuccugaccuuccccggcgcccaccgcuuccugcacaagccgacgcggaacgacagcauccucuacucccgcgccaacaacaacuucgacguggggguccugcccggcuaccccaccaagaacgugaaccuguucagcccccucaccaacuccacccugccgaucaacgggcugcaccggagcuaccagccccucaugcugaacugccugacgaagaucaccaaccagacccucuccauguaccugcagcccagcgagauccagaccuacuccugcggcggggccauggugaaguaccagacgcacgacgcgguccgcaucauccuggaccucaucgccaccgaccggaucagcguggagguggucggccaggccggcgagaacuacguguucgugugcuccgaccaguucaacuacaccaccgcccugcacaacagcacguucuucucccugaacagccagcucuacugcuucaccaacaacaccuaccuggggauccugcccccggaccucaccgacuucacggucuaccgcaccggccaguucuacgcgaacggguaccugcugggcacccuccccaucaccgugaacuacgugcggcuguaccgcgggcagcuguccgccaacagcgcccacuucgcccucgccaaccugacggacacccugaucacccucaccaacacgaccaucucccagaucaccuacugcgacaagagcgucguggacuccaucgcgugccagcggagcucccaccagguggaggacggcuucuacagcgaccccaagagcgccguccgcgcccggcagcgcaccaucgugacgcugcccaagcugccggagcucgaggugguccagcugaacaucuccgcccacauggacuucggcgaggcccggcuggacagcgugaccaucaacgggaacaccuccuacugcgugaccaagcccuacuuccgccucgagacgaacuuccugugccggggcugcaccaugaaccugcgcaccgacacgugcagcuucgaccucuccgcggucaacaacgggaugagcuucucccaguucugccugagcaccgaguccggcgccugcgagaugaagaucaucgugaccuacguguggaacuaccugcugcggcagcgccucuacgucaccgccguggagggccagacccacaccgggacgaccagcguccacgccaccgacaccuccagcgugaucacggacgugugcaccgacuacaccaucuacggcgucuccgggaccggcaucaucaagcccagcgaccugcugcuccacaacgggaucgccuucacgucccccaccggcgagcuguacgcguucaagaacaucaccaccggcaagacgcuccaggugcugccgugcgagacccccagccagcugaucgugaucaacaacaccgucgugggggccaucaccuccagcaacuccacggagaacaaccgguucaccaccaccaucgugacgcccaccuucuucuacagcaccaacgccaccacgcugaacugcaccaagcccguccucagcuacggcccgaucuccgugugcagcgacggggccaucgccggcaccuccacccugcagaacacgcgccccagcaucgugucccuguacgacggggagaucgagauccccagcgcguucucccucagcguccagaccgaguaccuccaggugcaggccgagcaggucaucguggacugcccccaguacgugugcaacggcaacucccgcugccugcagcugcuggcccaguacaccagcgccugcuccaacaucgagguggcgcugcacagcuccgcccagcucgacagccgggagaucaucuccauguucaagaccagcacgcagucccugcagcuggccaacaucaccaacuucaagggcgacuacaacuucagcagcauccucaccucccgcgucgggggccggagcgccaucgaggaccugcuguucaacaagguggugaccuccgggcucggcacggucgaccaggacuacaagagcugcucccgcaacauggccaucgcggaccuggugugcagccaguacuacaacgggaucauggugcugccgggcgucguggacgccgagaagauggccauguacaccggcucccucaccggggccaugguguucggcgggcugaccgccgcggccgccauccccuucgccaccgccguccaggcgcggcugaacuacguggcccuccagacgaacgugcugcaggagaaccagaagauccuggccgagagcuucaaccaggccgucggcaacaucucccucgcgcugagcuccgugaacgacgccauccagcagaccagcgaggcccugaacaccguggccaucgccaucaagaagauccagaccgucgugaaccagcagggcgaggcgcucucccaccugacggcccagcugagcaacaacuuccaggccaucuccaccagcauccaggacaucuacaaccgccucgaggagguggaggccaaccagcaggucgaccggcugaucaacgggcgccuggccgcgcucaacgccuacgugacccagcugcugaaccagaugucccagauccggcagagccgccuccuggcccagcagaagaucaacgagugcgugaagucccagagcccccgguacggcuucugcgggaacggcacccacaucuucagccugacgcagaccgcccccaacgggaucuucuucaugcacgccguccucgugccgaacaaguucacccgcgugaacgcguccgccggcaucugcgucgacaacacccggggcuacagccugcagccccagcugauccucuaccaguucaacaacuccuggcgcgugacgccccggaacauguacgagccgcgccugccccggcaggccgacuucauccagcugaccgacugcagcgugaccuucuacaacaccacggccgcgaaccuccccaacaucauccccgacgucaucgacgugaaccagaccguguccgacaucaucgacaaccugccgaccgccaccccgccccagugggacgucgggaucuacaacaacacgauccugaaccucaccguggagaucaacgaccugcaggagcgcagcaagaaccugucccagaucgccgaccggcuccagaacuacaucgacaaccugaacaacacccugguggaccucgaguggcugaaccgcgucgagaccuaccugaaguggcccugguacaucuggcucgccaucgcccuggcgcugaucgccuucgugacgauccucaucaccaucuuccugugcaccggcugcugcgggggcugcuucgggugcugcggcggcugcuucgggcuguucagcaagaagaagcgcuacaccgacgaccagcccacgcccuccuucaaguucaaggagugguga

SEQ ID NO: 14985 - RNA, 3483 nt, Artificial Sequence
  PDCoV/Swine/Thailand/S5011/2015__AMN91621.1 spike protein CDS gc (1-1160)(E855P_V856P)
augcagcgcgcccugcucaucaugacccugcugugccucgcccgggcgaaguucgccgacgaccugcuggaccuccugaccuuccccggcgcccaccgcuuccugcacaagccgacgcggaacgacagcauccucuacucccgcgccaacaacaacuucgacguggggguccugcccggcuaccccaccaagaacgugaaccuguucagcccccucaccaacuccacccugccgaucaacgggcugcaccggagcuaccagccccucaugcugaacugccugacgaagaucaccaaccagacccucuccauguaccugcagcccagcgagauccagaccuacuccugcggcggggccauggugaaguaccagacgcacgacgcgguccgcaucauccuggaccucaucgccaccgaccggaucagcguggagguggucggccaggccggcgagaacuacguguucgugugcuccgaccaguucaacuacaccaccgcccugcacaacagcacguucuucucccugaacagccagcucuacugcuucaccaacaacaccuaccuggggauccugcccccggaccucaccgacuucacggucuaccgcaccggccaguucuacgcgaacggguaccugcugggcacccuccccaucaccgugaacuacgugcggcuguaccgcgggcagcuguccgccaacagcgcccacuucgcccucgccaaccugacggacacccugaucacccucaccaacacgaccaucucccagaucaccuacugcgacaagagcgucguggacuccaucgcgugccagcggagcucccaccagguggaggacggcuucuacagcgaccccaagagcgccguccgcgcccggcagcgcaccaucgugacgcugcccaagcugccggagcucgaggugguccagcugaacaucuccgcccacauggacuucggcgaggcccggcuggacagcgugaccaucaacgggaacaccuccuacugcgugaccaagcccuacuuccgccucgagacgaacuuccugugccggggcugcaccaugaaccugcgcaccgacacgugcagcuucgaccucuccgcggucaacaacgggaugagcuucucccaguucugccugagcaccgaguccggcgccugcgagaugaagaucaucgugaccuacguguggaacuaccugcugcggcagcgccucuacgucaccgccguggagggccagacccacaccgggacgaccagcguccacgccaccgacaccuccagcgugaucacggacgugugcaccgacuacaccaucuacggcgucuccgggaccggcaucaucaagcccagcgaccugcugcuccacaacgggaucgccuucacgucccccaccggcgagcuguacgcguucaagaacaucaccaccggcaagacgcuccaggugcugccgugcgagacccccagccagcugaucgugaucaacaacaccgucgugggggccaucaccuccagcaacuccacggagaacaaccgguucaccaccaccaucgugacgcccaccuucuucuacagcaccaacgccaccacgcugaacugcaccaagcccguccucagcuacggcccgaucuccgugugcagcgacggggccaucgccggcaccuccacccugcagaacacgcgccccagcaucgugucccuguacgacggggagaucgagauccccagcgcguucucccucagcguccagaccgaguaccuccaggugcaggccgagcaggucaucguggacugcccccaguacgugugcaacggcaacucccgcugccugcagcugcuggcccaguacaccagcgccugcuccaacaucgagguggcgcugcacagcuccgcccagcucgacagccgggagaucaucuccauguucaagaccagcacgcagucccugcagcuggccaacaucaccaacuucaagggcgacuacaacuucagcagcauccucaccucccgcgucgggggccggagcgccaucgaggaccugcuguucaacaagguggugaccuccgggcucggcacggucgaccaggacuacaagagcugcucccgcaacauggccaucgcggaccuggugugcagccaguacuacaacgggaucauggugcugccgggcgucguggacgccgagaagauggccauguacaccggcucccucaccggggccaugguguucggcgggcugaccgccgcggccgccauccccuucgccaccgccguccaggcgcggcugaacuacguggcccuccagacgaacgugcugcaggagaaccagaagauccuggccgagagcuucaaccaggccgucggcaacaucucccucgcgcugagcuccgugaacgacgccauccagcagaccagcgaggcccugaacaccguggccaucgccaucaagaagauccagaccgucgugaaccagcagggcgaggcgcucucccaccugacggcccagcugagcaacaacuuccaggccaucuccaccagcauccaggacaucuacaaccgccucgagccgcccgaggccaaccagcaggucgaccggcugaucaacgggcgccuggccgcgcucaacgccuacgugacccagcugcugaaccagaugucccagauccggcagagccgccuccuggcccagcagaagaucaacgagugcgugaagucccagagcccccgguacggcuucugcgggaacggcacccacaucuucagccugacgcagaccgcccccaacgggaucuucuucaugcacgccgugcucguccccaacaaguucacccgcgugaacgcguccgccggcaucugcguggacaacacccggggcuacagccugcagccgcagcugauccucuaccaguucaacaacuccuggcgcgucacgccccggaacauguacgagccccgccugccccggcaggccgacuucauccagcugaccgacugcagcgugaccuucuacaacaccacggccgcgaaccucccgaacaucauccccgacgugaucgacgucaaccagaccguguccgacaucaucgacaaccugcccaccgccacgcccccgcagugggacguggggaucuacaacaacaccauccugaaccucaccgucgagaucaacgaccugcaggagcgcagcaagaaccugucccagaucgccgaccggcuccagaacuacaucgacaaccugaacaacacccugguggaccucgaguggcugaaccgcguggagaccuaccugaaguggcccugguacaucuggcucgccaucgcccuggcgcugaucgccuucgucacgauccucaucaccaucuuccugugcaccggcugcugcgggggcugcuucgggugcugcggcggcugcuucgggcuguucagcaagaagaagcgcuacaccgacgaccagcccacgcccuccuucaaguucaaggagugguga

SEQ ID NO: 14986 - RNA, 3282 nt, Artificial Sequence
  PDCoV/Swine/Thailand/S5011/2015__AMN91621.1 spike protein CDS gc (variant)
augcagcgcgcccugcucaucaugacccugcugugccucgcccgggcgaaguucgccgacgaccugcuggaccuccugaccuuccccggcgcccaccgcuuccugcacaagccgacgcggaacgacagcauccucuacucccgcgccaacaacaacuucgacguggggguccugcccggcuaccccaccaagaacgugaaccuguucagcccccucaccaacuccacccugccgaucaacgggcugcaccggagcuaccagccccucaugcugaacugccugacgaagaucaccaaccagacccucuccauguaccugcagcccagcgagauccagaccuacuccugcggcggggccauggugaaguaccagacgcacgacgcgguccgcaucauccuggaccucaucgccaccgaccggaucagcguggagguggucggccaggccggcgagaacuacguguucgugugcuccgaccaguucaacuacaccaccgcccugcacaacagcacguucuucucccugaacagccagcucuacugcuucaccaacaacaccuaccuggggauccugcccccggaccucaccgacuucacggucuaccgcaccggccaguucuacgcgaacggguaccugcugggcacccuccccaucaccgugaacuacgugcggcuguaccgcgggcagcuguccgccaacagcgcccacuucgcccucgccaaccugacggacacccugaucacccucaccaacacgaccaucucccagaucaccuacugcgacaagagcgucguggacuccaucgcgugccagcggagcucccaccagguggaggacggcuucuacagcgaccccaagagcgccguccgcgcccggcagcgcaccaucgugacgcugcccaagcugccggagcucgaggugguccagcugaacaucuccgcccacauggacuucggcgaggcccggcuggacagcgugaccaucaacgggaacaccuccuacugcgugaccaagcccuacuuccgccucgagacgaacuuccugugccggggcugcaccaugaaccugcgcaccgacacgugcagcuucgaccucuccgcggucaacaacgggaugagcuucucccaguucugccugagcaccgaguccggcgccugcgagaugaagaucaucgugaccuacguguggaacuaccugcugcggcagcgccucuacgucaccgccguggagggccagacccacaccgggacgaccagcguccacgccaccgacaccuccagcgugaucacggacgugugcaccgacuacaccaucuacggcgucuccgggaccggcaucaucaagcccagcgaccugcugcuccacaacgggaucgccuucacgucccccaccggcgagcuguacgcguucaagaacaucaccaccggcaagacgcuccaggugcugccgugcgagacccccagccagcugaucgugaucaacaacaccgucgugggggccaucaccuccagcaacuccacggagaacaaccgguucaccaccaccaucgugacgcccaccuucuucuacagcaccaacgccaccacgcugaacugcaccaagcccguccucagcuacggcccgaucuccgugugcagcgacggggccaucgccggcaccuccacccugcagaacacgcgccccagcaucgugucccuguacgacggggagaucgagauccccagcgcguucucccucagcguccagaccgaguaccuccaggugcaggccgagcaggucaucguggacugcccccaguacgugugcaacggcaacucccgcugccugcagcugcuggcccaguacaccagcgccugcuccaacaucgagguggcgcugcacagcuccgcccagcucgacagccgggagaucaucuccauguucaagaccagcacgcagucccugcagcuggccaacaucaccaacuucaagggcgacuacaacuucagcagcauccucaccucccgcgucgggggccggagcgccaucgaggaccugcuguucaacaagguggugaccuccgggcucggcacggucgaccaggacuacaagagcugcucccgcaacauggccaucgcggaccuggugugcagccaguacuacaacgggaucauggugcugccgggcgucguggacgccgagaagauggccauguacaccggcucccucaccggggccaugguguucggcgggcugaccgccgcggccgccauccccuucgccaccgccguccaggcgcggcugaacuacguggcccuccagacgaacgugcugcaggagaaccagaagauccuggccgagagcuucaaccaggccgucggcaacaucucccucgcgcugagcuccgugaacgacgccauccagcagaccagcgaggcccugaacaccguggccaucgccaucaagaagauccagaccgucgugaaccagcagggcgaggcgcucucccaccugacggcccagcugagcaacaacuuccaggccaucuccaccagcauccaggacaucuacaaccgccucgagccgcccgaggccaaccagcaggucgaccggcugaucaacgggcgccuggccgcgcucaacgccuacgugacccagcugcugaaccagaugucccagauccggcagagccgccuccuggcccagcagaagaucaacgagugcgugaagucccagagcccccgguacggcuucugcgggaacggcacccacaucuucagccugacgcagaccgcccccaacgggaucuucuucaugcacgccgugcucguccccaacaaguucacccgcgugaacgcguccgccggcaucugcguggacaacacccggggcuacagccugcagccgcagcugauccucuaccaguucaacaacuccuggcgcgucacgccccggaacauguacgagccccgccugccccggcaggccgacuucauccagcugaccgacugcagcgugaccuucuacaacaccacggccgcgaaccucccgaacaucauccccgacgugaucgacgucaaccagaccguguccgacaucaucgacaaccugcccaccgccacgcccccgcagugggacguggggaucuacaacaacaccauccugaaccucaccgucgagaucaacgaccugcaggagcgcagcaagaaccugucccagaucgccgaccggcuccagaacuacaucgacaaccugaacaacacccugguggaccucgaguggcugaaccgcguggagaccuga

SEQ ID NO: 14987 - RNA, 3363 nt, Artificial Sequence
  PDCoV/Swine/Thailand/S5011/2015__AMN91621.1 spike protein CDS gc (variant)
augcagcgcgcccugcucaucaugacccugcugugccucgcccgggccaaguucgccgacgaccugcuggaccuccugaccuuccccggcgcccaccgcuuccugcacaagccgacgcggaacgacagcauccucuacucccgcgccaacaacaacuucgacguggggguccugcccggcuaccccaccaagaacgugaaccuguucagcccccucaccaacuccacccugccgaucaacgggcugcaccggagcuaccagccccucaugcugaacugccugacgaagaucaccaaccagacccucuccauguaccugcagcccagcgagauccagaccuacuccugcggcggggccauggugaaguaccagacgcacgacgcgguccgcaucauccuggaccucaucgccaccgaccggaucagcguggagguggucggccaggccggcgagaacuacguguucgugugcuccgaccaguucaacuacaccaccgcccugcacaacagcacguucuucucccugaacagccagcucuacugcuucaccaacaacaccuaccuggggauccugcccccggaccucaccgacuucacggucuaccgcaccggccaguucuacgcgaacggguaccugcugggcacccuccccaucaccgugaacuacgugcggcuguaccgcgggcagcuguccgccaacagcgcccacuucgcccucgccaaccugacggacacccugaucacccucaccaacacgaccaucucccagaucaccuacugcgacaagagcgucguggacuccaucgcgugccagcggagcucccaccagguggaggacggcuucuacagcgaccccaagagcgccguccgcgcccggcagcgcaccaucgugacgcugcccaagcugccggagcucgaggugguccagcugaacaucuccgcccacauggacuucggcgaggcccggcuggacagcgugaccaucaacgggaacaccuccuacugcgugaccaagcccuacuuccgccucgagacgaacuuccugugccggggcugcaccaugaaccugcgcaccgacacgugcagcuucgaccucuccgcggucaacaacgggaugagcuucucccaguucugccugagcaccgaguccggcgccugcgagaugaagaucaucgugaccuacguguggaacuaccugcugcggcagcgccucuacgucaccgccguggagggccagacccacaccgggacgaccagcguccacgccaccgacaccuccagcgugaucacggacgugugcaccgacuacaccaucuacggcgucuccgggaccggcaucaucaagcccagcgaccugcugcuccacaacgggaucgccuucacgucccccaccggcgagcuguacgcguucaagaacaucaccaccggcaagacgcuccaggugcugccgugcgagacccccagccagcugaucgugaucaacaacaccgucgugggggccaucaccuccagcaacuccacggagaacaaccgguucaccaccaccaucgugacgcccaccuucuucuacagcaccaacgccaccacgcugaacugcaccaagcccguccucagcuacggcccgaucuccgugugcagcgacggggccaucgccggcaccuccacccugcagaacacgcgccccagcaucgugucccuguacgacggggagaucgagauccccagcgcguucucccucagcguccagaccgaguaccuccaggugcaggccgagcaggucaucguggacugcccccaguacgugugcaacggcaacucccgcugccugcagcugcuggcccaguacaccagcgccugcuccaacaucgagguggcgcugcacagcuccgcccagcucgacagccgggagaucaucuccauguucaagaccagcacgcagucccugcagcuggccaacaucaccaacuucaagggcgacuacaacuucagcagcauccucaccucccgcgucgggggccggagcgccaucgaggaccugcuguucaacaagguggugaccuccgggcucggcacggucgaccaggacuacaagagcugcucccgcaacauggccaucgcggaccuggugugcagccaguacuacaacgggaucauggugcugccgggcgucguggacgccgagaagauggccauguacaccggcucccucaccggggccaugguguucggcgggcugaccgccgcggccgccauccccuucgccaccgccguccaggcgcggcugaacuacguggcccuccagacgaacgugcugcaggagaaccagaagauccuggccgagagcuucaaccaggccgucggcaacaucucccucgcgcugagcuccgugaacgacgccauccagcagaccagcgaggcccugaacaccguggccaucgccaucaagaagauccagaccgucgugaaccagcagggcgaggcgcucucccaccugacggcccagcugagcaacaacuuccaggccaucuccaccagcauccaggacaucuacaaccgccucgagccgcccgaggccaaccagcaggucgaccggcugaucaacgggcgccuggccgcgcucaacgccuacgugacccagcugcugaaccagaugucccagauccggcagagccgccuccuggcccagcagaagaucaacgagugcgugaagucccagagcccccgguacggcuucugcgggaacggcacccacaucuucagccugacgcagaccgcccccaacgggaucuucuucaugcacgccgugcucguccccaacaaguucacccgcgugaacgcguccgccggcaucugcguggacaacacccggggcuacagccugcagccgcagcugauccucuaccaguucaacaacuccuggcgcgucacgccccggaacauguacgagccccgccugccccggcaggccgacuucauccagcugaccgacugcagcgugaccuucuacaacaccacggccgcgaaccucccgaacaucauccccgacgugaucgacgucaaccagaccguguccgacaucaucgacaaccugcccaccgccacgcccccgcagugggacguggggaucuacaacaacaccauccugaaccucaccgucgagaucaacgaccugcaggagcgcagcaagaaccugucccagaucgccgaccggcuccagaacuacaucgacaaccugaacaacacccugguggaccucgaguggcugaaccgcguggagaccggcggguacauccccgaggcgccccgcgacggccaggccuacguccggaaggacggggagugggugcugcucagcacguucuga

SEQ ID NO: 14988 - RNA, 4161 nt, Artificial Sequence
  PEDV/NPL-PEDv/2013/P10__AHZ94887.1 spike protein CDS gc (1-1386)
augaagucccugaccuacuucuggcuguuccugcccgugcugagcacccucagccugccgcaggacgucacgcgcugcuccgccaacaccaacuuccggcgcuucuucagcaaguucaacgugcaggcccccgcgguggucgugcugggcggguaccuccccaucggcgagaaccagggggugaacuccaccugguacugcgccggccagcaccccaccgccagcgggguccacggcaucuucgugucccacauccggggcgggcacggcuucgagaucgggaucagccaggagccguucgaccccuccggcuaccagcuguaccugcacaaggccacgaacgggaacaccaacgccaccgcgcgccuccggaucugccaguuccccagcaucaagacccugggccccacggccaacaacgacgugaccaccggccgcaacugccuguucaacaaggccaucccggcccacauguccgagcacagcgucguggggaucaccugggacaacgaccgggugacggucuucuccgacaagaucuacuacuucuacuucaagaacgacuggagccgcguggcgaccaagugcuacaacuccggcgggugcgccaugcaguacguguacgagcccaccuacuacaugcucaacgucaccagcgccggcgaggacggcaucuccuaccagcccugcacggccaacugcaucggguacgccgcgaacguguucgccaccgagcccaacggccacaucccggagggguucagcuucaacaacugguuccugcuguccaacgacagcacccucgugcacggcaaggucgugagcaaccagccccugcuggugaacugccuccuggccauccccaagaucuacgggcugggccaguucuucuccuucaaccagaccaucgacggcgucugcaacggggccgccgugcagcgggcgcccgaggcccuccgcuucaacaucaacgacaucagcgugauccuggccgagggcuccaucguccugcacacggcccucgggaccaacuucagcuucgugugcuccaacagcuccaacccgcaccuggccaccuucgcgaucccccugggcgccacccagguccccuacuacugcuucuucaagguggacacguacaacagcaccguguacaaguuccucgccguccugcccccgaccgugcgggagaucgugaucaccaaguacggggacgucuacgugaacggcuucggcuaccugcaccucgggcugcuggacgccgugacgaucaacuucaccggccacgggaccgacgacgacgucuccggcuucuggaccaucgccagcacgaacuucguggacgcgcucaucgaggugcaggggaccgccauccagcgcauccuguacugcgacgaccccgucucccagcugaagugcagccagguggccuucgaccucgacgacggcuucuacaccaucuccagccggaaccugcugucccacgagcagcccaucagcuucgugacccuccccuccuucaacgaccacagcuucgucaacaucacgguguccgccagcuucggcgggcacagcggcgcgaaccugaucgccuccgacaccaccaucaacggguucagcuccuucugcguggacacccgccaguucaccaucagccuguucuacaacgucacgaacuccuacggcuacgugagcaagucccaggacagcaacugcccguucacccuccaguccgugaacgacuaccugagcuucuccaaguucugcgucagcaccucccugcucgccagcgccugcaccaucgaccuguucggcuaccccgaguucggguccggcgugaaguucacgagccuguacuuccaguucaccaagggggagcugaucaccggcacccccaagccccucgagggggugacggacgucuccuucaugacccuggacgugugcaccaaguacaccaucuacggcuucaagggcgaggggaucaucacgcugaccaacagcagcuuccucgccggcguguacuacaccuccgacagcgggcagcugcuggcguucaagaacgucaccuccggcgccguguacagcgugacgccgugcuccuucagcgagcaggccgccuacgucgacgacgacaucgugggggugaucuccagccucuccagcuccaccuucaacagcacccgggagcugcccggcuucuucuaccacuccaacgacggcagcaacugcaccgagcccguccugguguacuccaacaucggggugugcaagagcggcuccaucggguacgucccgagccaguccggccaggugaagaucgcccccacggugaccgggaacaucagcauccccaccaacuucagcauguccauccgcaccgaguaccuccagcuguacaacacgcccgucagcguggacugcgcgaccuacgugugcaacggcaacucccggugcaagcagcugcucacccaguacaccgccgccugcaagacgaucgagagcgcccugcagcuguccgcccgccucgagagcgucgaggugaacuccaugcugaccaucagcgacgaggcgcugcagcucgccaccaucuccagcuucaacggcgacggguacaacuucaccaacgugcugggcgucuccguguacgacccggccagccggcgcgugguccagaagcgguccuucaucgaggaccuccucuucaacaagguggugacgaacgggcugggcaccgucgacgaggacuacaagcgcugcagcaacgggcgcuccguggccgaccuggucugcgcgcaguacuacagcggcgugauggugcuccccggcgucguggacgccgagaagcugcacauguacuccgccagccugaucgggggcauggugcucgggggcuucaccuccgccgccgcgcugcccuucagcuacgccguccaggcccggcugaacuaccucgcccugcagaccgacgugcugcagcgcaaccagcagcuccuggccgagagcuucaacuccgcgaucggcaacaucacgagcgccuucgaguccgugaaggaggccaucagccagaccuccaaggggcugaacaccgucgcccacgcccucaccaaggugcaggagguggucaacagccagggcgcggcccugacccagcugacggugcagcuccagcacaacuuccaggccaucuccagcuccaucgacgacaucuacagccggcuggacauccuguccgccgacgcccagguggaccgccucaucaccgggcggcugagcgcccugaacgccuucgucgcccagacccucaccaaguacacggaggugcaggccucccgcaagcuggcgcagcagaaggugaacgagugcgucaagagccagucccagcgguacggcuucugcgggggcgacggcgagcacaucuucagccuggugcaggccgcgccccaggggcuccuguuccugcacaccgugcucgucccguccgacuucguggacgugaucgccaucgccggccugugcgucaacgacgagaucgcgcugacccuccgcgagcccgggcuggugcuguucacccacgagcuccagaaccacacggccaccgaguacuucgugagcucccggcgcauguucgagccccggaagcccaccgucagcgacuucgugcagaucgagagcugcguggucaccuacgugaaccugacgcgcgaccagcugccggacgugauccccgacuacaucgacgucaacaagacccucuacgagauccuggccucccugcccaaccggaccggccccagccucccgcuggacguguucaacgccaccuaccugaaccucacgggggagaucgccgaccuggagcagcgcuccgagagccugcggaacaccaccgaggagcuccagucccugaucuacaacaucaacaacacccugguggaccucgaguggcugaaccgcgucgagacguacaucaaguggcccugguggguguggcugaucaucuucaucgugcucaucuucgucgugagccugcugguguucugcugcaucuccaccggcugcugcggcugcugcgggugcugcugcgcgugcuucagcggcugcugccgggggccccgccuccagcccuacgaggucuucgagaaggugcacgugcaguga

SEQ ID NO: 14989 - RNA, 4161 nt, Artificial Sequence
  PEDV/NPL-PEDv/2013/P10__AHZ94887.1 spike protein CDS gc (1-1386)(I1076P_L1077P)
augaagucccugaccuacuucuggcuguuccugcccgugcugagcacccucagccugccgcaggacgucacgcgcugcuccgccaacaccaacuuccggcgcuucuucagcaaguucaacgugcaggcccccgcgguggucgugcugggcggguaccuccccaucggcgagaaccagggggugaacuccaccugguacugcgccggccagcaccccaccgccagcgggguccacggcaucuucgugucccacauccggggcgggcacggcuucgagaucgggaucagccaggagccguucgaccccuccggcuaccagcuguaccugcacaaggccacgaacgggaacaccaacgccaccgcgcgccuccggaucugccaguuccccagcaucaagacccugggccccacggccaacaacgacgugaccaccggccgcaacugccuguucaacaaggccaucccggcccacauguccgagcacagcgucguggggaucaccugggacaacgaccgggugacggucuucuccgacaagaucuacuacuucuacuucaagaacgacuggagccgcguggcgaccaagugcuacaacuccggcgggugcgccaugcaguacguguacgagcccaccuacuacaugcucaacgucaccagcgccggcgaggacggcaucuccuaccagcccugcacggccaacugcaucggguacgccgcgaacguguucgccaccgagcccaacggccacaucccggagggguucagcuucaacaacugguuccugcuguccaacgacagcacccucgugcacggcaaggucgugagcaaccagccccugcuggugaacugccuccuggccauccccaagaucuacgggcugggccaguucuucuccuucaaccagaccaucgacggcgucugcaacggggccgccgugcagcgggcgcccgaggcccuccgcuucaacaucaacgacaucagcgugauccuggccgagggcuccaucguccugcacacggcccucgggaccaacuucagcuucgugugcuccaacagcuccaacccgcaccuggccaccuucgcgaucccccugggcgccacccagguccccuacuacugcuucuucaagguggacacguacaacagcaccguguacaaguuccucgccguccugcccccgaccgugcgggagaucgugaucaccaaguacggggacgucuacgugaacggcuucggcuaccugcaccucgggcugcuggacgccgugacgaucaacuucaccggccacgggaccgacgacgacgucuccggcuucuggaccaucgccagcacgaacuucguggacgcgcucaucgaggugcaggggaccgccauccagcgcauccuguacugcgacgaccccgucucccagcugaagugcagccagguggccuucgaccucgacgacggcuucuacaccaucuccagccggaaccugcugucccacgagcagcccaucagcuucgugacccuccccuccuucaacgaccacagcuucgucaacaucacgguguccgccagcuucggcgggcacagcggcgcgaaccugaucgccuccgacaccaccaucaacggguucagcuccuucugcguggacacccgccaguucaccaucagccuguucuacaacgucacgaacuccuacggcuacgugagcaagucccaggacagcaacugcccguucacccuccaguccgugaacgacuaccugagcuucuccaaguucugcgucagcaccucccugcucgccagcgccugcaccaucgaccuguucggcuaccccgaguucggguccggcgugaaguucacgagccuguacuuccaguucaccaagggggagcugaucaccggcacccccaagccccucgagggggugacggacgucuccuucaugacccuggacgugugcaccaaguacaccaucuacggcuucaagggcgaggggaucaucacgcugaccaacagcagcuuccucgccggcguguacuacaccuccgacagcgggcagcugcuggcguucaagaacgucaccuccggcgccguguacagcgugacgccgugcuccuucagcgagcaggccgccuacgucgacgacgacaucgugggggugaucuccagccucuccagcuccaccuucaacagcacccgggagcugcccggcuucuucuaccacuccaacgacggcagcaacugcaccgagcccguccugguguacuccaacaucggggugugcaagagcggcuccaucggguacgucccgagccaguccggccaggugaagaucgcccccacggugaccgggaacaucagcauccccaccaacuucagcauguccauccgcaccgaguaccuccagcuguacaacacgcccgucagcguggacugcgcgaccuacgugugcaacggcaacucccggugcaagcagcugcucacccaguacaccgccgccugcaagacgaucgagagcgcccugcagcuguccgcccgccucgagagcgucgaggugaacuccaugcugaccaucagcgacgaggcgcugcagcucgccaccaucuccagcuucaacggcgacggguacaacuucaccaacgugcugggcgucuccguguacgacccggccagccggcgcgugguccagaagcgguccuucaucgaggaccuccucuucaacaagguggugacgaacgggcugggcaccgucgacgaggacuacaagcgcugcagcaacgggcgcuccguggccgaccuggucugcgcgcaguacuacagcggcgugauggugcuccccggcgucguggacgccgagaagcugcacauguacuccgccagccugaucgggggcauggugcucgggggcuucaccuccgccgccgcgcugcccuucagcuacgccguccaggcccggcugaacuaccucgcccugcagaccgacgugcugcagcgcaaccagcagcuccuggccgagagcuucaacuccgcgaucggcaacaucacgagcgccuucgaguccgugaaggaggccaucagccagaccuccaaggggcugaacaccgucgcccacgcccucaccaaggugcaggagguggucaacagccagggcgcggcccugacccagcugacggugcagcuccagcacaacuuccaggccaucuccagcuccaucgacgacaucuacagccggcuggacccgcccuccgccgacgcccagguggaccgccugaucaccgggcggcucagcgcccugaacgccuucgucgcccagacccugaccaaguacacggaggugcaggccucccgcaagcucgcgcagcagaaggugaacgagugcgucaagagccagucccagcgguacggcuucugcgggggcgacggcgagcacaucuucagccuggugcaggccgcgccccaggggcuccuguuccugcacaccgugcugguccccuccgacuucguggacgugaucgccaucgccggccucugcgucaacgacgagaucgcgcugacccugcgcgagcccgggcucgugcuguucacccacgagcugcagaaccacacggccaccgaguacuucgugagcucccggcgcauguucgagccgcggaagcccaccgucagcgacuucgugcagaucgagagcugcguggucaccuacgugaaccucacgcgcgaccagcugcccgacgugauccccgacuacaucgacgucaacaagacccuguacgagauccucgccucccugccgaaccggaccggccccagccugccccucgacguguucaacgccaccuaccugaaccugacgggggagaucgccgaccucgagcagcgcuccgagagccugcggaacaccaccgaggagcugcagucccucaucuacaacaucaacaacacccugguggaccuggaguggcucaaccgcgucgagacguacaucaaguggcccugguggguguggcugaucaucuucaucgugcugaucuucgucgugagccuccugguguucugcugcaucuccaccggcugcugcggcugcugcgggugcugcugcgcgugcuucagcggcugcugccgggggccgcgccugcagcccuacgaggucuucgagaaggugcacgugcaguga

SEQ ID NO: 14990 - RNA, 3969 nt, Artificial Sequence
  PEDV/NPL-PEDv/2013/P10__AHZ94887.1 spike protein CDS gc (variant)
augaagucccugaccuacuucuggcuguuccugcccgugcugagcacccucagccugccgcaggacgucacgcgcugcuccgccaacaccaacuuccggcgcuucuucagcaaguucaacgugcaggcccccgcgguggucgugcugggcggguaccuccccaucggcgagaaccagggggugaacuccaccugguacugcgccggccagcaccccaccgccagcgggguccacggcaucuucgugucccacauccggggcgggcacggcuucgagaucgggaucagccaggagccguucgaccccuccggcuaccagcuguaccugcacaaggccacgaacgggaacaccaacgccaccgcgcgccuccggaucugccaguuccccagcaucaagacccugggccccacggccaacaacgacgugaccaccggccgcaacugccuguucaacaaggccaucccggcccacauguccgagcacagcgucguggggaucaccugggacaacgaccgggugacggucuucuccgacaagaucuacuacuucuacuucaagaacgacuggagccgcguggcgaccaagugcuacaacuccggcgggugcgccaugcaguacguguacgagcccaccuacuacaugcucaacgucaccagcgccggcgaggacggcaucuccuaccagcccugcacggccaacugcaucggguacgccgcgaacguguucgccaccgagcccaacggccacaucccggagggguucagcuucaacaacugguuccugcuguccaacgacagcacccucgugcacggcaaggucgugagcaaccagccccugcuggugaacugccuccuggccauccccaagaucuacgggcugggccaguucuucuccuucaaccagaccaucgacggcgucugcaacggggccgccgugcagcgggcgcccgaggcccuccgcuucaacaucaacgacaucagcgugauccuggccgagggcuccaucguccugcacacggcccucgggaccaacuucagcuucgugugcuccaacagcuccaacccgcaccuggccaccuucgcgaucccccugggcgccacccagguccccuacuacugcuucuucaagguggacacguacaacagcaccguguacaaguuccucgccguccugcccccgaccgugcgggagaucgugaucaccaaguacggggacgucuacgugaacggcuucggcuaccugcaccucgggcugcuggacgccgugacgaucaacuucaccggccacgggaccgacgacgacgucuccggcuucuggaccaucgccagcacgaacuucguggacgcgcucaucgaggugcaggggaccgccauccagcgcauccuguacugcgacgaccccgucucccagcugaagugcagccagguggccuucgaccucgacgacggcuucuacaccaucuccagccggaaccugcugucccacgagcagcccaucagcuucgugacccuccccuccuucaacgaccacagcuucgucaacaucacgguguccgccagcuucggcgggcacagcggcgcgaaccugaucgccuccgacaccaccaucaacggguucagcuccuucugcguggacacccgccaguucaccaucagccuguucuacaacgucacgaacuccuacggcuacgugagcaagucccaggacagcaacugcccguucacccuccaguccgugaacgacuaccugagcuucuccaaguucugcgucagcaccucccugcucgccagcgccugcaccaucgaccuguucggcuaccccgaguucggguccggcgugaaguucacgagccuguacuuccaguucaccaagggggagcugaucaccggcacccccaagccccucgagggggugacggacgucuccuucaugacccuggacgugugcaccaaguacaccaucuacggcuucaagggcgaggggaucaucacgcugaccaacagcagcuuccucgccggcguguacuacaccuccgacagcgggcagcugcuggcguucaagaacgucaccuccggcgccguguacagcgugacgccgugcuccuucagcgagcaggccgccuacgucgacgacgacaucgugggggugaucuccagccucuccagcuccaccuucaacagcacccgggagcugcccggcuucuucuaccacuccaacgacggcagcaacugcaccgagcccguccugguguacuccaacaucggggugugcaagagcggcuccaucggguacgucccgagccaguccggccaggugaagaucgcccccacggugaccgggaacaucagcauccccaccaacuucagcauguccauccgcaccgaguaccuccagcuguacaacacgcccgucagcguggacugcgcgaccuacgugugcaacggcaacucccggugcaagcagcugcucacccaguacaccgccgccugcaagacgaucgagagcgcccugcagcuguccgcccgccucgagagcgucgaggugaacuccaugcugaccaucagcgacgaggcgcugcagcucgccaccaucuccagcuucaacggcgacggguacaacuucaccaacgugcugggcgucuccguguacgacccggccagccggcgcgugguccagaagcgguccuucaucgaggaccuccucuucaacaagguggugacgaacgggcugggcaccgucgacgaggacuacaagcgcugcagcaacgggcgcuccguggccgaccuggucugcgcgcaguacuacagcggcgugauggugcuccccggcgucguggacgccgagaagcugcacauguacuccgccagccugaucgggggcauggugcucgggggcuucaccuccgccgccgcgcugcccuucagcuacgccguccaggcccggcugaacuaccucgcccugcagaccgacgugcugcagcgcaaccagcagcuccuggccgagagcuucaacuccgcgaucggcaacaucacgagcgccuucgaguccgugaaggaggccaucagccagaccuccaaggggcugaacaccgucgcccacgcccucaccaaggugcaggagguggucaacagccagggcgcggcccugacccagcugacggugcagcuccagcacaacuuccaggccaucuccagcuccaucgacgacaucuacagccggcuggacccgcccuccgccgacgcccagguggaccgccugaucaccgggcggcucagcgcccugaacgccuucgucgcccagacccugaccaaguacacggaggugcaggccucccgcaagcucgcgcagcagaaggugaacgagugcgucaagagccagucccagcgguacggcuucugcgggggcgacggcgagcacaucuucagccuggugcaggccgcgccccaggggcuccuguuccugcacaccgugcugguccccuccgacuucguggacgugaucgccaucgccggccucugcgucaacgacgagaucgcgcugacccugcgcgagcccgggcucgugcuguucacccacgagcugcagaaccacacggccaccgaguacuucgugagcucccggcgcauguucgagccgcggaagcccaccgucagcgacuucgugcagaucgagagcugcguggucaccuacgugaaccucacgcgcgaccagcugcccgacgugauccccgacuacaucgacgucaacaagacccuguacgagauccucgccucccugccgaaccggaccggccccagccugccccucgacguguucaacgccaccuaccugaaccugacgggggagaucgccgaccucgagcagcgcuccgagagccugcggaacaccaccgaggagcugcagucccucaucuacaacaucaacaacacccugguggaccuggaguggcucaaccgcgucgagacguga

SEQ ID NO: 14991 - RNA, 4050 nt, Artificial Sequence
  PEDV/NPL-PEDv/2013/P10__AHZ94887.1 spike protein CDS gc (variant)
augaagucccugaccuacuucuggcuguuccugcccgugcugagcacccucagccugccgcaggacgucacgcgcugcuccgccaacaccaacuuccggcgcuucuucagcaaguucaacgugcaggcccccgcgguggucgugcugggcggguaccuccccaucggcgagaaccagggggugaacuccaccugguacugcgccggccagcaccccaccgccagcgggguccacggcaucuucgugucccacauccggggcgggcacggcuucgagaucgggaucagccaggagccguucgaccccuccggcuaccagcuguaccugcacaaggccacgaacgggaacaccaacgccaccgcgcgccuccggaucugccaguuccccagcaucaagacccugggccccacggccaacaacgacgugaccaccggccgcaacugccuguucaacaaggccaucccggcccacauguccgagcacagcgucguggggaucaccugggacaacgaccgggugacggucuucuccgacaagaucuacuacuucuacuucaagaacgacuggagccgcguggcgaccaagugcuacaacuccggcgggugcgccaugcaguacguguacgagcccaccuacuacaugcucaacgucaccagcgccggcgaggacggcaucuccuaccagcccugcacggccaacugcaucggguacgccgcgaacguguucgccaccgagcccaacggccacaucccggagggguucagcuucaacaacugguuccugcuguccaacgacagcacccucgugcacggcaaggucgugagcaaccagccccugcuggugaacugccuccuggccauccccaagaucuacgggcugggccaguucuucuccuucaaccagaccaucgacggcgucugcaacggggccgccgugcagcgggcgcccgaggcccuccgcuucaacaucaacgacaucagcgugauccuggccgagggcuccaucguccugcacacggcccucgggaccaacuucagcuucgugugcuccaacagcuccaacccgcaccuggccaccuucgcgaucccccugggcgccacccagguccccuacuacugcuucuucaagguggacacguacaacagcaccguguacaaguuccucgccguccugcccccgaccgugcgggagaucgugaucaccaaguacggggacgucuacgugaacggcuucggcuaccugcaccucgggcugcuggacgccgugacgaucaacuucaccggccacgggaccgacgacgacgucuccggcuucuggaccaucgccagcacgaacuucguggacgcgcucaucgaggugcaggggaccgccauccagcgcauccuguacugcgacgaccccgucucccagcugaagugcagccagguggccuucgaccucgacgacggcuucuacaccaucuccagccggaaccugcugucccacgagcagcccaucagcuucgugacccuccccuccuucaacgaccacagcuucgucaacaucacgguguccgccagcuucggcgggcacagcggcgcgaaccugaucgccuccgacaccaccaucaacggguucagcuccuucugcguggacacccgccaguucaccaucagccuguucuacaacgucacgaacuccuacggcuacgugagcaagucccaggacagcaacugcccguucacccuccaguccgugaacgacuaccugagcuucuccaaguucugcgucagcaccucccugcucgccagcgccugcaccaucgaccuguucggcuaccccgaguucggguccggcgugaaguucacgagccuguacuuccaguucaccaagggggagcugaucaccggcacccccaagccccucgagggggugacggacgucuccuucaugacccuggacgugugcaccaaguacaccaucuacggcuucaagggcgaggggaucaucacgcugaccaacagcagcuuccucgccggcguguacuacaccuccgacagcgggcagcugcuggcguucaagaacgucaccuccggcgccguguacagcgugacgccgugcuccuucagcgagcaggccgccuacgucgacgacgacaucgugggggugaucuccagccucuccagcuccaccuucaacagcacccgggagcugcccggcuucuucuaccacuccaacgacggcagcaacugcaccgagcccguccugguguacuccaacaucggggugugcaagagcggcuccaucggguacgucccgagccaguccggccaggugaagaucgcccccacggugaccgggaacaucagcauccccaccaacuucagcauguccauccgcaccgaguaccuccagcuguacaacacgcccgucagcguggacugcgcgaccuacgugugcaacggcaacucccggugcaagcagcugcucacccaguacaccgccgccugcaagacgaucgagagcgcccugcagcuguccgcccgccucgagagcgucgaggugaacuccaugcugaccaucagcgacgaggcgcugcagcucgccaccaucuccagcuucaacggcgacggguacaacuucaccaacgugcugggcgucuccguguacgacccggccagccggcgcgugguccagaagcgguccuucaucgaggaccuccucuucaacaagguggugacgaacgggcugggcaccgucgacgaggacuacaagcgcugcagcaacgggcgcuccguggccgaccuggucugcgcgcaguacuacagcggcgugauggugcuccccggcgucguggacgccgagaagcugcacauguacuccgccagccugaucgggggcauggugcucgggggcuucaccuccgccgccgcgcugcccuucagcuacgccguccaggcccggcugaacuaccucgcccugcagaccgacgugcugcagcgcaaccagcagcuccuggccgagagcuucaacuccgcgaucggcaacaucacgagcgccuucgaguccgugaaggaggccaucagccagaccuccaaggggcugaacaccgucgcccacgcccucaccaaggugcaggagguggucaacagccagggcgcggcccugacccagcugacggugcagcuccagcacaacuuccaggccaucuccagcuccaucgacgacaucuacagccggcuggacccgcccuccgccgacgcccagguggaccgccugaucaccgggcggcucagcgcccugaacgccuucgucgcccagacccugaccaaguacacggaggugcaggccucccgcaagcucgcgcagcagaaggugaacgagugcgucaagagccagucccagcgguacggcuucugcgggggcgacggcgagcacaucuucagccuggugcaggccgcgccccaggggcuccuguuccugcacaccgugcugguccccuccgacuucguggacgugaucgccaucgccggccucugcgucaacgacgagaucgcgcugacccugcgcgagcccgggcucgugcuguucacccacgagcugcagaaccacacggccaccgaguacuucgugagcucccggcgcauguucgagccgcggaagcccaccgucagcgacuucgugcagaucgagagcugcguggucaccuacgugaaccucacgcgcgaccagcugcccgacgugauccccgacuacaucgacgucaacaagacccuguacgagauccucgccucccugccgaaccggaccggccccagccugccccucgacguguucaacgccaccuaccugaaccugacgggggagaucgccgaccucgagcagcgcuccgagagccugcggaacaccaccgaggagcugcagucccucaucuacaacaucaacaacacccugguggaccuggaguggcucaaccgcgucgagacgggcggcuacauccccgaggcgccgcgggacgggcaggccuacgugcgcaaggacggcgagugggugcugcugagcaccuucuga

SEQ ID NO: 14992 - RNA, 4086 nt, Artificial Sequence
  MHV/S__BAK18575.1 spike protein CDS gc (1-1361)
augcugagcguguucauccucuuccugcccuccugccugggcuacaucggggacuuccgcugcaucaaccucgucaacaccgacaccagcaacgccuccgccccgagcguguccacggagguggucgacgugagcaagggcaucgggaccuacuacgugcuggaccgggucuaccugaacgcgacccuccugcugaccggcuacuaccccguggacggguccaacuaccgcaaccucgcccugacgggcaccaacacccugagccucaacugguacaagccgcccuuccuguccgaguucaacgacggcaucuucgccaaggugaagaaccugaaggccagccuccccaaggacuccaccagcuacuuccccacgaucgucaucggguccaacuucgugaccaccagcuacaccgugguccuggagcccuacaacggcaucaucauggccuccaucugccaguacacgaucugccugcuccccuacaccgacugcaagccgaacaccgggggcaacaagcugaucggguucuggcacaucgaccugaagucccccgugugcauccucaagcggaacuucaccuucaacgugaacgcggacuggcuguacuuccacuucuaccagcagggcggcacguucuacgccuacuacgccgacgccggguccgcgaccaccuuccuguucagcuccuacaucggcgacguccucacccaguacuucgugcugcccuucgugugcacgcccaccaccaccggggucuucagcccgcaguacugggugacgccccuggugaagcgccaguaccucuucaacuucaaccagaagggcaccaucaccagcgccgucgacugcgccuccagcuacaccuccgagaucaagugcaagacgcagagcaugaaccccaacaccggcguguacgaccuguccggguacaccgugcagcccgucggccugguguaccggcgcguccggaaccucccggacugccgcaucgaggacuggcuggccgccaagaccgugcccagcccccugaacugggagcggaagacguuccagaacugcaacuucaaccucuccagccugcugcgccucgugcaggcggggucccugagcugcuccaacaucgacgccgccaaggucuacggcaugugcuucgggagcauguccaucgacaaguucgccauccccaacagccggcgcguggaccugcagcucggcaacuccggcuuccugcagagcuucaacuacaagaucgacacccgggccaccuccugccagcuguacuacagccucgcgcaguccaacgugaccgucaacaaccacaacccgagcagcuggaaccgccgguacggguucaacgacguggccacguucggccgcgggaagcacgacguggccuacgccgaggccugcuucaccgucggcgcguccuacugccccugcgccaaccccagcaucgugucccccugcaccaccgggaagccgaaguucgccaacugccccaccggcacgaccaaccgggagugcaacgugcuggcccugggcagcaaccucuucaagugcgacugcacgugcaaccccagcccccugaccaccuacgaccugcgcugccugcaggggcggagcaugcucggcgucggggaccacugcgagggccugggggugcuggaggacaagugcggcggcuccaacacgugcaacugcagcgccgacgcguucguggggugggccaaggacuccugccucagcaacggccgcugccacaucuucuccaaccugaugcugaacgggaucaacagcggcacgaccugcuccaccgaccuccagcugccgaacaccgaggucgugaccggcaucugcgugaaguacgaccuguacgggaucaccggccagggggucuucaaggaggugaaggccgacuacuacaacagcuggcagaaccuccuguacgacgugaacggcaaccugaacggguuccgggacaucgucaccaacaagaccuaccucacccgcuccugcuacagcggccgcguguccgccgcguaccaccaggacgcccccgagcccgcccugcuguaccggaaccucaagugcgacuacguguucaacaacaacaucuuccgcgaggagaccccgcugaacuacuucgacagcuaccugggcugcgucgugaacgccgacaacagcacggagcaggccguggacgcgugcgaccuccggaugggguccggccugugcgucaacuacagcaccgcccaccgcgcccggaccuccgugagcaccggguacaagcugacgaccuucgagcccuucaccguguccaucgucaacgacagcguggaguccgugggcgggcucuacgagaugcagauccccaccaacuucacgaucgccagccaccaggaguucauccagacccgcgcccccaaggucaccaucgacugcgcggccuucgugugcggcgacuacaccacgugccggcagcagcugguggaguacggcuccuucugcgacaacaucaacgccauccugggggaggucaacaaccucaucgacaccaugcagcuccagguggccagcgcccugauccagggcgugacccucuccagccgccuggcggacgggaucuccggccagaucgacgacaucaacuucagcccgcugcucgggugccugggcucccagugcagcgagggcaccauggccgcccaggggcgguccacggucgaggaccugcuguucgacaaggugaagcugagcgacgugggcuucgucgaggccuacaacaacugcaccgggggccaggaggugcgcgaccugcucugcgugcaguccuucaacgggaucaagguccugccgcccgugcugagcgagaaccaggugagcggcuacaccgcgggcgccaccgccuccagcauguucccgcccugguccgccgccgcggggguccccuucagccucuccgugcaguaccggaucaacggccugggggugacgaugaacguccugagcgagaaccagaagaugaucgccuccgccuucaacaacgccaucggcgccauccaggagggcuucgacgcgaccaacagcgcccucgccaagauccaguccguggucaacgccaacgccgaggcgcugaacaaccugcucaaccagcugagcaaccgcuucggggccaucuccgccagccugcaggagauccucucccggcuggacgcccuggaggcgcaggcccagaucgaccgccucaucaacggccggcugaccgcccugaacgccuacgugagcaagcagcucuccgacaugacccugaucaaggugagcgccgcgcaggccaucgagaaggucaacgagugcgugaagucccagagcccccgcaucaacuucugcgggaacggcaaccacauccugucccucgugcagaacgcccccuacgggcuguacuuccugcacuucagcuacguccccaccagcuucacgaccgccaacgugucccccggccucugcaucagcggcgaccgggggcuggcccccaaggcgggcuacuucgugcaggacgacggggaguggaaguucaccggcuccaacuacuacuaccccgagccgaucaccgacaagaacagcgucgugauguccagcugcgccgugaacuacacgaaggcccccgaggucuuccugaacaccuccaucagcaaccuccccgacuucaaggaggagcuggacaagugguucaagaaccagaccuccguggcccccgaccugagccucgacuucgagaagcugaacgugaccuuccuggaccucuccgacgagaugaaccgcauccaggaggccaucaagaagcugaacgagagcuacaucaaccugaaggagaucgggacguacgagauguacgucaaguggccgugguacguguggcuccugaucggccuggcgggcguggccgucugcgugcuccuguucuucaucugcugcugcaccgggugcggcuccugcugcuucaagaagugcgggaacugcugcgacgaguacggcgggcaccaggacagcaucgugauccacaacaucuccagccacgaggacuga

SEQ ID NO: 14993 - RNA, 4086 nt, Artificial Sequence
  MHV/S__BAK18575.1 spike protein CDS gc (1-1361)(A1073P_L1074P)
augcugagcguguucauccucuuccugcccuccugccugggcuacaucggggacuuccgcugcaucaaccucgucaacaccgacaccagcaacgccuccgccccgagcguguccacggagguggucgacgugagcaagggcaucgggaccuacuacgugcuggaccgggucuaccugaacgcgacccuccugcugaccggcuacuaccccguggacggguccaacuaccgcaaccucgcccugacgggcaccaacacccugagccucaacugguacaagccgcccuuccuguccgaguucaacgacggcaucuucgccaaggugaagaaccugaaggccagccuccccaaggacuccaccagcuacuuccccacgaucgucaucggguccaacuucgugaccaccagcuacaccgugguccuggagcccuacaacggcaucaucauggccuccaucugccaguacacgaucugccugcuccccuacaccgacugcaagccgaacaccgggggcaacaagcugaucggguucuggcacaucgaccucaagagccccgugugcauccucaagcggaacuucaccuucaacgugaacgcggacuggcuguacuuccacuucuaccagcagggcggcacguucuacgccuacuacgccgacgccggguccgcgaccaccuuccuguucagcuccuacaucggcgacguccucacccaguacuucgugcugcccuucgugugcacgcccaccaccaccggggucuucagcccgcaguacugggugacgccccuggugaagcgccaguaccucuucaacuucaaccagaagggcaccaucaccagcgccgucgacugcgccuccagcuacaccuccgagaucaagugcaagacgcagagcaugaaccccaacaccggcguguacgaccuguccggguacaccgugcagcccgucggccugguguaccggcgcguccggaaccucccggacugccgcaucgaggacuggcuggccgccaagaccgugcccagcccccugaacugggagcggaagacguuccagaacugcaacuucaaccucuccagccugcugcgccucgugcaggcggggucccugagcugcuccaacaucgacgccgccaaggucuacggcaugugcuucgggagcauguccaucgacaaguucgccauccccaacagccggcgcguggaccugcagcucggcaacuccggcuuccugcagagcuucaacuacaagaucgacacccgggccaccuccugccagcuguacuacagccucgcgcaguccaacgugaccgucaacaaccacaacccgagcagcuggaaccgccgguacggguucaacgacguggccacguucggccgcgggaagcacgacguggccuacgccgaggccugcuucaccgucggcgcguccuacugccccugcgccaaccccagcaucgugucccccugcaccaccgggaagccgaaguucgccaacugccccaccggcacgaccaaccgggagugcaacgugcuggcccugggcagcaaccucuucaagugcgacugcacgugcaaccccagcccccugaccaccuacgaccugcgcugccugcaggggcgguccaugcucggcgucggggaccacugcgagggccugggggugcuggaggacaagugcggcggcuccaacacgugcaacugcagcgccgacgcguucguggggugggccaaggacuccugccucagcaacggccgcugccacaucuucuccaaccugaugcugaacgggaucaacagcggcacgaccugcuccaccgaccuccagcugccgaacaccgaggucgugaccggcaucugcgugaaguacgaccuguacgggaucaccggccagggggucuucaaggaggugaaggccgacuacuacaacagcuggcagaaccuccuguacgacgugaacggcaaccugaacggguuccgggacaucgucaccaacaagaccuaccucacccgcuccugcuacagcggccgcguguccgccgcguaccaccaggacgcccccgagcccgcccugcuguaccggaaccucaagugcgacuacguguucaacaacaacaucuuccgcgaggagaccccgcugaacuacuucgacagcuaccugggcugcgucgugaacgccgacaacagcacggagcaggccguggacgcgugcgaccuccggaugggguccggccugugcgucaacuacagcaccgcccaccgcgcccggaccuccgugagcaccggguacaagcugacgaccuucgagcccuucaccguguccaucgucaacgacagcguggaguccgugggcgggcucuacgagaugcagauccccaccaacuucacgaucgccagccaccaggaguucauccagacccgcgcccccaaggucaccaucgacugcgcggccuucgugugcggcgacuacaccacgugccggcagcagcugguggaguacggcuccuucugcgacaacaucaacgccauccugggggaggucaacaaccucaucgacaccaugcagcuccagguggccagcgcccugauccagggcgugacccucuccagccgccuggcggacgggaucuccggccagaucgacgacaucaacuucagcccgcugcucgggugccugggcucccagugcagcgagggcaccauggccgcccaggggcgguccacggucgaggaccugcuguucgacaaggugaagcugagcgacgugggcuucgucgaggccuacaacaacugcaccgggggccaggaggugcgcgaccugcucugcgugcaguccuucaacgggaucaagguccugccgcccgugcugagcgagaaccaggugagcggcuacaccgcgggcgccaccgccuccagcauguucccgcccugguccgccgccgcggggguccccuucagccucuccgugcaguaccggaucaacggccugggggugacgaugaacguccugagcgagaaccagaagaugaucgccuccgccuucaacaacgccaucggcgccauccaggagggcuucgacgcgaccaacagcgcccucgccaagauccaguccguggucaacgccaacgccgaggcgcugaacaaccugcucaaccagcugagcaaccgcuucggggccaucuccgccagccugcaggagauccucucccggcuggacccgcccgaggcccaggcgcagaucgaccgccugaucaacggccggcucaccgcccugaacgccuacgugagcaagcagcuguccgacaugacccucaucaaggugagcgccgcccaggcgaucgagaaggucaacgagugcgugaagucccagagcccccgcaucaacuucugcgggaacggcaaccacauccugucccuggugcagaacgcccccuacgggcucuacuuccugcacuucagcuacguccccaccagcuucacgaccgccaacgugucccccggccugugcaucagcggcgaccgggggcucgcccccaaggccggcuacuucgugcaggacgacggggaguggaaguucaccggcuccaacuacuacuaccccgagcccaucaccgacaagaacagcgucgugauguccagcugcgcggugaacuacacgaaggcccccgaggucuuccugaacaccuccaucagcaaccugccggacuucaaggaggagcucgacaagugguucaagaaccagaccuccguggcccccgaccugagccuggacuucgagaagcucaacgugaccuuccuggaccuguccgacgagaugaaccgcauccaggaggccaucaagaagcucaacgagagcuacaucaaccugaaggagaucgggacguacgagauguacgucaaguggcccugguacguguggcugcucaucggccuggccggcguggcggucugcgugcugcuguucuucaucugcugcugcaccgggugcggcuccugcugcuucaagaagugcgggaacugcugcgacgaguacggcgggcaccaggacagcaucgugauccacaacaucuccagccacgaggacuga

SEQ ID NO: 14994 - RNA, 3894 nt, Artificial Sequence
  MHV/S__BAK18575.1 spike protein CDS gc (variant)
augcugagcguguucauccucuuccugcccuccugccugggcuacaucggggacuuccgcugcaucaaccucgucaacaccgacaccagcaacgccuccgccccgagcguguccacggagguggucgacgugagcaagggcaucgggaccuacuacgugcuggaccgggucuaccugaacgcgacccuccugcugaccggcuacuaccccguggacggguccaacuaccgcaaccucgcccugacgggcaccaacacccugagccucaacugguacaagccgcccuuccuguccgaguucaacgacggcaucuucgccaaggugaagaaccugaaggccagccuccccaaggacuccaccagcuacuuccccacgaucgucaucggguccaacuucgugaccaccagcuacaccgugguccuggagcccuacaacggcaucaucauggccuccaucugccaguacacgaucugccugcuccccuacaccgacugcaagccgaacaccgggggcaacaagcugaucggguucuggcacaucgaccugaagucccccgugugcauccucaagcggaacuucaccuucaacgugaacgcggacuggcuguacuuccacuucuaccagcagggcggcacguucuacgccuacuacgccgacgccggguccgcgaccaccuuccuguucagcuccuacaucggcgacguccucacccaguacuucgugcugcccuucgugugcacgcccaccaccaccggggucuucagcccgcaguacugggugacgccccuggugaagcgccaguaccucuucaacuucaaccagaagggcaccaucaccagcgccgucgacugcgccuccagcuacaccuccgagaucaagugcaagacgcagagcaugaaccccaacaccggcguguacgaccuguccggguacaccgugcagcccgucggccugguguaccggcgcguccggaaccucccggacugccgcaucgaggacuggcuggccgccaagaccgugcccagcccccugaacugggagcggaagacguuccagaacugcaacuucaaccucuccagccugcugcgccucgugcaggcggggucccugagcugcuccaacaucgacgccgccaaggucuacggcaugugcuucgggagcauguccaucgacaaguucgccauccccaacagccggcgcguggaccugcagcucggcaacuccggcuuccugcagagcuucaacuacaagaucgacacccgggccaccuccugccagcuguacuacagccucgcgcaguccaacgugaccgucaacaaccacaacccgagcagcuggaaccgccgguacggguucaacgacguggccacguucggccgcgggaagcacgacguggccuacgccgaggccugcuucaccgucggcgcguccuacugccccugcgccaaccccagcaucgugucccccugcaccaccgggaagccgaaguucgccaacugccccaccggcacgaccaaccgggagugcaacgugcuggcccugggcagcaaccucuucaagugcgacugcacgugcaaccccagcccccugaccaccuacgaccugcgcugccugcaggggcggagcaugcucggcgucggggaccacugcgagggccugggggugcuggaggacaagugcggcggcuccaacacgugcaacugcagcgccgacgcguucguggggugggccaaggacuccugccucagcaacggccgcugccacaucuucuccaaccugaugcugaacgggaucaacagcggcacgaccugcuccaccgaccuccagcugccgaacaccgaggucgugaccggcaucugcgugaaguacgaccuguacgggaucaccggccagggggucuucaaggaggugaaggccgacuacuacaacagcuggcagaaccuccuguacgacgugaacggcaaccugaacggguuccgggacaucgucaccaacaagaccuaccucacccgcuccugcuacagcggccgcguguccgccgcguaccaccaggacgcccccgagcccgcccugcuguaccggaaccucaagugcgacuacguguucaacaacaacaucuuccgcgaggagaccccgcugaacuacuucgacagcuaccugggcugcgucgugaacgccgacaacagcacggagcaggccguggacgcgugcgaccuccggaugggguccggccugugcgucaacuacagcaccgcccaccgcgcccggaccuccgugagcaccggguacaagcugacgaccuucgagcccuucaccguguccaucgucaacgacagcguggaguccgugggcgggcucuacgagaugcagauccccaccaacuucacgaucgccagccaccaggaguucauccagacccgcgcccccaaggucaccaucgacugcgcggccuucgugugcggcgacuacaccacgugccggcagcagcugguggaguacggcuccuucugcgacaacaucaacgccauccugggggaggucaacaaccucaucgacaccaugcagcuccagguggccagcgcccugauccagggcgugacccucuccagccgccuggcggacgggaucuccggccagaucgacgacaucaacuucagcccgcugcucgggugccugggcucccagugcagcgagggcaccauggccgcccaggggcgguccacggucgaggaccugcuguucgacaaggugaagcugagcgacgugggcuucgucgaggccuacaacaacugcaccgggggccaggaggugcgcgaccugcucugcgugcaguccuucaacgggaucaagguccugccgcccgugcugagcgagaaccaggugagcggcuacaccgcgggcgccaccgccuccagcauguucccgcccugguccgccgccgcggggguccccuucagccucuccgugcaguaccggaucaacggccugggggugacgaugaacguccugagcgagaaccagaagaugaucgccuccgccuucaacaacgccaucggcgccauccaggagggcuucgacgcgaccaacagcgcccucgccaagauccaguccguggucaacgccaacgccgaggcgcugaacaaccugcucaaccagcugagcaaccgcuucggggccaucuccgccagccugcaggagauccucucccggcuggacccgcccgaggcccaggcgcagaucgaccgccugaucaacggccggcucaccgcccugaacgccuacgugagcaagcagcuguccgacaugacccucaucaaggugagcgccgcccaggcgaucgagaaggucaacgagugcgugaagucccagagcccccgcaucaacuucugcgggaacggcaaccacauccugucccuggugcagaacgcccccuacgggcucuacuuccugcacuucagcuacguccccaccagcuucacgaccgccaacgugucccccggccugugcaucagcggcgaccgggggcucgcccccaaggccggcuacuucgugcaggacgacggggaguggaaguucaccggcuccaacuacuacuaccccgagcccaucaccgacaagaacagcgucgugauguccagcugcgcggugaacuacacgaaggcccccgaggucuuccugaacaccuccaucagcaaccugccggacuucaaggaggagcucgacaagugguucaagaaccagaccuccguggcccccgaccugagccuggacuucgagaagcucaacgugaccuuccuggaccuguccgacgagaugaaccgcauccaggaggccaucaagaagcucaacgagagcuacaucaaccugaaggagaucgggacguacgagauguga

SEQ ID NO: 14995 - RNA, 3975 nt, Artificial Sequence
  MHV/S__BAK18575.1 spike protein CDS gc (variant)
augcugagcguguucauccucuuccugcccuccugccugggcuacaucggggacuuccgcugcaucaaccucgucaacaccgacaccagcaacgccuccgccccgagcguguccacggagguggucgacgugagcaagggcaucgggaccuacuacgugcuggaccgggucuaccugaacgcgacccuccugcugaccggcuacuaccccguggacggguccaacuaccgcaaccucgcccugacgggcaccaacacccugagccucaacugguacaagccgcccuuccuguccgaguucaacgacggcaucuucgccaaggugaagaaccugaaggccagccuccccaaggacuccaccagcuacuuccccacgaucgucaucggguccaacuucgugaccaccagcuacaccgugguccuggagcccuacaacggcaucaucauggccuccaucugccaguacacgaucugccugcuccccuacaccgacugcaagccgaacaccgggggcaacaagcugaucggguucuggcacaucgaccugaagucccccgugugcauccucaagcggaacuucaccuucaacgugaacgcggacuggcuguacuuccacuucuaccagcagggcggcacguucuacgccuacuacgccgacgccggguccgcgaccaccuuccuguucagcuccuacaucggcgacguccucacccaguacuucgugcugcccuucgugugcacgcccaccaccaccggggucuucagcccgcaguacugggugacgccccuggugaagcgccaguaccucuucaacuucaaccagaagggcaccaucaccagcgccgucgacugcgccuccagcuacaccuccgagaucaagugcaagacgcagagcaugaaccccaacaccggcguguacgaccuguccggguacaccgugcagcccgucggccugguguaccggcgcguccggaaccucccggacugccgcaucgaggacuggcuggccgccaagaccgugcccagcccccugaacugggagcggaagacguuccagaacugcaacuucaaccucuccagccugcugcgccucgugcaggcggggucccugagcugcuccaacaucgacgccgccaaggucuacggcaugugcuucgggagcauguccaucgacaaguucgccauccccaacagccggcgcguggaccugcagcucggcaacuccggcuuccugcagagcuucaacuacaagaucgacacccgggccaccuccugccagcuguacuacagccucgcgcaguccaacgugaccgucaacaaccacaacccgagcagcuggaaccgccgguacggguucaacgacguggccacguucggccgcgggaagcacgacguggccuacgccgaggccugcuucaccgucggcgcguccuacugccccugcgccaaccccagcaucgugucccccugcaccaccgggaagccgaaguucgccaacugccccaccggcacgaccaaccgggagugcaacgugcuggcccugggcagcaaccucuucaagugcgacugcacgugcaaccccagcccccugaccaccuacgaccugcgcugccugcaggggcggagcaugcucggcgucggggaccacugcgagggccugggggugcuggaggacaagugcggcggcuccaacacgugcaacugcagcgccgacgcguucguggggugggccaaggacuccugccucagcaacggccgcugccacaucuucuccaaccugaugcugaacgggaucaacagcggcacgaccugcuccaccgaccuccagcugccgaacaccgaggucgugaccggcaucugcgugaaguacgaccuguacgggaucaccggccagggggucuucaaggaggugaaggccgacuacuacaacagcuggcagaaccuccuguacgacgugaacggcaaccugaacggguuccgggacaucgucaccaacaagaccuaccucacccgcuccugcuacagcggccgcguguccgccgcguaccaccaggacgcccccgagcccgcccugcuguaccggaaccucaagugcgacuacguguucaacaacaacaucuuccgcgaggagaccccgcugaacuacuucgacagcuaccugggcugcgucgugaacgccgacaacagcacggagcaggccguggacgcgugcgaccuccggaugggguccggccugugcgucaacuacagcaccgcccaccgcgcccggaccuccgugagcaccggguacaagcugacgaccuucgagcccuucaccguguccaucgucaacgacagcguggaguccgugggcgggcucuacgagaugcagauccccaccaacuucacgaucgccagccaccaggaguucauccagacccgcgcccccaaggucaccaucgacugcgcggccuucgugugcggcgacuacaccacgugccggcagcagcugguggaguacggcuccuucugcgacaacaucaacgccauccugggggaggucaacaaccucaucgacaccaugcagcuccagguggccagcgcccugauccagggcgugacccucuccagccgccuggcggacgggaucuccggccagaucgacgacaucaacuucagcccgcugcucgggugccugggcucccagugcagcgagggcaccauggccgcccaggggcgguccacggucgaggaccugcuguucgacaaggugaagcugagcgacgugggcuucgucgaggccuacaacaacugcaccgggggccaggaggugcgcgaccugcucugcgugcaguccuucaacgggaucaagguccugccgcccgugcugagcgagaaccaggugagcggcuacaccgcgggcgccaccgccuccagcauguucccgcccugguccgccgccgcggggguccccuucagccucuccgugcaguaccggaucaacggccugggggugacgaugaacguccugagcgagaaccagaagaugaucgccuccgccuucaacaacgccaucggcgccauccaggagggcuucgacgcgaccaacagcgcccucgccaagauccaguccguggucaacgccaacgccgaggcgcugaacaaccugcucaaccagcugagcaaccgcuucggggccaucuccgccagccugcaggagauccucucccggcuggacccgcccgaggcccaggcgcagaucgaccgccugaucaacggccggcucaccgcccugaacgccuacgugagcaagcagcuguccgacaugacccucaucaaggugagcgccgcccaggcgaucgagaaggucaacgagugcgugaagucccagagcccccgcaucaacuucugcgggaacggcaaccacauccugucccuggugcagaacgcccccuacgggcucuacuuccugcacuucagcuacguccccaccagcuucacgaccgccaacgugucccccggccugugcaucagcggcgaccgggggcucgcccccaaggccggcuacuucgugcaggacgacggggaguggaaguucaccggcuccaacuacuacuaccccgagcccaucaccgacaagaacagcgucgugauguccagcugcgcggugaacuacacgaaggcccccgaggucuuccugaacaccuccaucagcaaccugccggacuucaaggaggagcucgacaagugguucaagaaccagaccuccguggcccccgaccugagccuggacuucgagaagcucaacgugaccuuccuggaccuguccgacgagaugaaccgcauccaggaggccaucaagaagcucaacgagagcuacaucaaccugaaggagaucgggacguacgagaugggcggcuacauccccgaggcgccccgggacgggcaggccuacguccgcaaggacggcgagugggugcugcucuccaccuucuga

SEQ ID NO: 14996 - RNA, 3768 nt, Artificial Sequence
  SARS-CoV__P59594.1 spike protein CDS human (1-1255)
auguucaucuuucugcucuuucuuacccugacaagcggcuccgacuuggauagaugcacuacguuugacgaugugcaggcccccaacuacacccaacacacaucuucaaugagaggggucuauuacccugacgagauuuuccggagugauacuuuauaucugacccaggaccuauuucucccauucuacagcaauguuacaggauuucauaccauaaaccacacuuucgguaauccggugauccccuuuaaggauggcauuuauuucgcugcaacagaaaaauccaacguagugcgcgggugggucuuuggaucuaccaugaauaacaagucgcagucagugaucauuaucaauaacagcacgaauguugugauacgagccuguaacuucgagcugugcgacaauccuuucuucgcggucaguaaaccaaugggcacucagacccauacaaugaucuucgauaacgcuuuuaauuguacuuucgaauacauuuccgacgccuuuucucuugaugugagcgagaaguccgguaacuucaaacaucugcgugaauuuguauucaagaauaaggacggguuuuuguauguuuacaaaggauaccaacccaucgauguggucagagaccucccuucaggcuucaacacccugaagccaauuuuuaaacugccccucggcaucaacauaacaaauuucagggcaauuuuaaccgccuuuaguccugcucaggacaucugggggacgagcgcagccgcuuauuucgugggauaccugaagccaacuacauuuaugcuuaaauaugaugagaacgguaccauuacugacgccguggauugcucucagaauccguuggcggagcugaaguguuccgucaagucauucgaaaucgacaaaggcaucuaccagacaagcaacuuccggguugugcccaguggggauguagugcgcuuuccuaauauuaccaaccuaugcccauucggagaggucuuuaaugcaacgaaguuccccucuguguaugccugggaaaggaaaaagauauccaacuguguugcugacuacagcgugcucuauaauucgaccuuuuucucuacauuuaaaugcuacggcgucuccgccacuaagcugaacgaucuuuguuucucaaauguguacgcagacaguuuuguaguuaaaggugaugacgugaggcaaaucgcuccugggcagaccggagucauugccgauuauaacuacaagcugccagacgacuucaugggcugcguguuggcguggaauacacggaacaucgaugccacuagcaccggcaauuauaacuacaaguaucgcuaccuccgacacgggaaacugagacccuuugagagggacauauccaacgucccguucucuccugauggaaagcccuguacacccccugcauuaaauugcuauuggccccugaacgacuacgguuuuuacaccacuacgggcauuggguaucagccauaccgggugguugugcucagcuucgagcuucugaaugcucccgccacaguaugcggaccuaaauugucaaccgaucuaaucaagaaccagugugucaauuucaacuuuaauggccugacugguaccggggugcucacaccaaguuccaaacguuuccaaccguuucagcaguucggccgcgacguuagcgauuuuaccgacucugugagagaucccaagacuucagaaauccuggacauuaguccuugcagcuucggaggcgucuccgugaucacaccagggacgaacgcuucuucggagguagccgugcuuuaucaagauguuaauuguaccgacgucagcacugcaauucacgccgaucagcugacacccgcuuggaggauauacuccaccggaaacaauguguuucagacacaggcggguugcuugaucggcgcagaacacguggacacuucauaugagugugacauuccuaucggggccggaaucugcgcuaguuaccauaccgucucucuccugcggagcacgucccaaaagucaauuguugccuauaccaugagcuuaggcgcagauucuuccauagccuacaguaacaauacaaucgcuauuccaacuaacuucagcaucucuauuaccacagaagugaugcccguguccauggccaaaacuucaguagacuguaauauguacaucugcggugauaguaccgagugugcaaaccugcuacuccaguaugggagcuuuugcacgcagcugaaccgagcgcuuucgggcauagcugccgagcaggaccgcaauacaagagaagucuucgcacaagugaagcagauguacaaaaccccgacuuugaaguauuuuggaggcuucaacuucucccagauccugccugauccacucaaacccacaaagaggucuuuuauugaggaccugcuuuucaauaagguuacccuggccgaugcuggguuuaugaaacaguacggagaauguuugggugacaucaacgcccgggaucucauuugcgcacaaaaguucaauggccugacuguguuaccuccccugcuaaccgacgauaugaucgcugccuauacagcggcccucgucagcgggacggcuaccgcaggauggacuuuuggcgccggugcugcccugcagauaccauucgcaaugcagauggcguaccgcuuuaacgggauuggcgugacacagaauguucuuuaugagaaccaaaaacagaucgccaaucaguucaacaaggcuauuucacaaauccaggaaaguuugaccacaacuuccaccgcccugggaaaacuccaggacgugguaaaucagaacgcacaagcucugaauacguuagucaagcagcugucuagcaacuuuggcgccauauccucagugcuuaaugauaucuugagcagacucgacaagguggaggcagagguccagauugacaggcugaucacagggcgucuacagagucugcaaaccuacguuacucagcagcucauucgggccgcugaaauccgagcgucugccaaccuggcagcuaccaaaauguccgagugcgugcuuggacagagcaagagaguagauuucuguggcaaagguuaccacuugaugucguuuccucaagccgccccacaugggguggucuuccugcacgugacauauguuccaucacaggaaaggaacuuuacuaccgcuccggcaauaugccacgagggaaaggccuacuucccucgcgaaggcguguucgucuuuaaugguacaucuugguucauuacgcagcggaacuuuuucaguccccaaaucaucaccacugacaauacauuuguguccggcaacugugauguugugauugggaucauuaauaacaccgucuaugacccauuacagcccgagcucgauagcuucaaagaggaacuggacaaguacuuuaaaaaucauacuucuccugauguagaccuuggagauauaagcggcaucaacgcguccgugguuaauauucagaaggagaucgacagacugaacgaaguggcuaagaauuugaacgagucacucauugaucugcaggagcuagggaaauaugaacaauacaucaaguggccaugguaugucuggcugggauucauagccggccucaucgcaauugugaugguaacaauccugcuuugcuguaugaccaguugcuguagcugcuugaaaggugccuguucuugcggguccuguugcaaguuugacgaggacgauucagaacccgugcugaaaggagucaaguuacacuacacguga

SEQ ID NO: 14997 - RNA, 3768 nt, Artificial Sequence
  SARS-CoV__P59594.1 spike protein CDS human (1-1255)(K968P_V969P)
auguucaucuuucugcuguuccuuacccugacaagcggcuccgacuuggauagaugcacuacguuugacgaugugcaggcccccaacuacacccaacacacaucuucaaugagaggggucuauuacccugacgagauuuuccggagugauacuuuauaucugacccaggaccuauuucucccauucuacagcaauguuacaggauuucauaccauaaaccacacuuucgguaauccggugauccccuuuaaggauggcauuuauuucgcugcaacagaaaaauccaacguagugcgcgggugggucuuuggaucuaccaugaauaacaagucgcagucagugaucauuaucaauaacagcacgaauguugugauacgagccuguaacuucgagcugugcgacaauccauuuuucgcggucaguaaaccaaugggcacucagacccauacaaugaucuucgauaacgcuuuuaauuguacuuucgaauacauuuccgacgccuuuucucuugaugugagcgagaaguccgguaacuucaaacaccuccgugaauuuguauucaagaauaaggacggguuuuuguauguuuacaaaggauaccaacccaucgauguggucagagaccucccuucaggcuucaacacccugaagccaauuuuuaaacugccccucggcaucaacauaacaaauuucagggcaauuuuaaccgccuuuaguccugcucaggacaucugggggacgagcgcagccgcuuauuucgugggauaccugaagccaacuacauuuaugcuuaaauaugaugagaacgguaccauuacugacgccguggauugcucucagaauccguuggcggagcugaaguguuccgucaagucauucgaaaucgacaaaggcaucuaccagacaagcaacuuccggguugugcccaguggggauguagugcgcuuuccuaauauuaccaaccuaugcccauucggagaggucuuuaaugcaacgaaguuccccucuguguaugccugggaaaggaaaaagauauccaacuguguugcugacuacagcgugcucuauaauucgaccuuuuucucuacauuuaaaugcuacggcgucuccgccacuaagcugaacgaucuuuguuucucaaauguguacgcagacaguuuuguaguuaaaggugaugacgugaggcaaaucgcuccugggcagaccggagucauugccgauuauaacuacaagcugccagacgacuucaugggcugcguguuggcguggaauacacggaacaucgaugccacuagcaccggcaauuauaacuacaaguaucgcuaccuccgacaugggaaacugagacccuuugagagggacauauccaacgucccguucucuccugauggaaagcccuguacaccuccugcauuaaauugcuauuggccccugaacgacuacgguuuuuacaccacuacgggcauuggguaucagccauaccgggugguugugcucagcuucgagcuucugaaugcucccgccacaguaugcggaccuaaauugucaaccgaucuaaucaagaaccagugugucaauuucaacuuuaauggccugacugguaccggggugcucacaccaaguuccaaacguuuccaaccguuucagcaguucggccgcgacguuagcgauuuuaccgacucugugagagaucccaagacuucagaaauccuggacauuaguccuugcagcuucggaggcgucuccgugaucacaccagggacgaacgcuucuucggagguagccgugcuuuaucaagauguuaauuguaccgacgucagcacugcaauucacgccgaucagcugacacccgcuuggaggauauacuccaccggaaacaauguguuucagacacaggcggguugcuugaucggcgcagaacacguggacacuucauaugagugugacauuccuaucggggccggaaucugcgcuaguuaccauaccgucucucuccugcggagcacgucccaaaagucaauuguugccuauaccaugagcuuaggcgcagauucuuccauagccuacaguaacaauacaaucgcuauuccaacuaacuucagcaucucuauuaccacagaagugaugcccguguccauggccaaaacuucaguagacuguaauauguacaucugcggugauaguaccgagugugcaaaccugcuacuccaguaugggagcuuuugcacgcagcugaaccgagcgcuuucgggcauagcugccgagcaggaccgcaauacaagagaagucuucgcacaagugaagcagauguacaaaaccccgacuuugaaguauuuuggaggcuucaacuucucccagauccugccugauccacucaaacccacaaagaggucuuuuauugaggaccugcuuuucaauaagguuacccuggccgaugcuggguuuaugaaacaguacggagaauguuugggugacaucaacgcccgggaucucauuugcgcacaaaaguucaauggccugacuguguuaccuccccugcuaaccgacgauaugaucgcugccuauacagcggcccucgucagcgggacggcuaccgcaggauggacuuuuggcgccggugcugcccugcagauaccauucgcaaugcagauggcguaccgcuuuaacgggauuggcgugacacagaauguucuuuaugagaaccaaaaacagaucgccaaucaguucaacaaggcuauuucacaaauccaggaaaguuugaccacaacuuccaccgcccugggaaaacuccaggacgugguaaaucagaacgcacaagcucugaauacguuagucaagcagcugucuagcaacuuuggcgccauauccucagugcuuaaugauaucuugagcagacucgacccucccgaggcagaggugcagauugacaggcugaucacagggcgucuacagagucugcaaaccuacgucacucagcagcucauucgggccgcugaaauccgagcgucugccaaccuggcagcuaccaagauguccgagugcguucuuggacagagcaaaagaguggauuucuguggcaaggguuaccacuugaugucguuuccacaagccgccccgcaugggguaguguuccugcacgucacauaugugccuucacaggaaaggaacuuuacuaccgcucccgcaauaugccacgagggaaaagccuacuucccacgcgaaggcguuuucguguuuaaugguacaucuugguucauuacgcagcggaacuuuuucaguccccaaaucaucaccacugacaauacauuugucuccggcaacugugaugugguuauugggaucauuaauaacaccguguaugacccuuuacagccagagcucgauagcuucaaggaggaacuggacaaauacuuuaagaaucauacuucucccgaugucgaccuuggagauauaagcggcaucaacgcguccguagugaauauucagaaagagaucgacagacugaacgaaguugcuaagaauuugaacgagucacucauugaucugcaggagcuagggaaguaugaacaauacaucaaauggccuugguauguguggcugggauucauagccggccucaucgcaauugucauggugacaauccugcuuugcuguaugaccaguugcuguagcugcuugaagggugccuguucuugcggguccuguugcaaauuugacgaggacgauucagaaccgguacugaagggagugaaauuacacuacacguga

SEQ ID NO: 14998 - RNA, 1581 nt, Artificial Sequence
  SARS-CoV__P59594.1 spike protein CDS human (1-17_747-1255)
auguucaucuuucugcucuuucuuacccugacaagcggcuccgacuuggauagagccuuaucugggauugcugcagagcaggacaggaacacucgggaaguguuugcccaagucaagcagauguacaaaacgcccacccugaaguauuucggagguuuuaauuucucacagauacuaccugauccacucaaaccgacaaagcgcaguuuuaucgaggaccugcuuuucaacaaaguuacucuggcggaugcuggcuuuaugaagcaguacggggaaugcuugggagacauuaaugcccgagaucucaucugugcacaaaaguucaacggccugaccgugcugcccccucucuuaacagacgauaugauugccgcuuauaccgcagcccugguaagcgguacugcuacagccggguggaccuuuggagcgggcgcagcccuucagaucccauucgcuaugcagauggccuaccguuuuaauggcauaggggugacgcagaacgucuuguaugagaaucaaaaacagaucgcaaaccaguucaauaaggcuauuucccagauccaagaaucucugacuaccacaucgacugcccuaggaaaacuccaggacgugguuaaccagaaugcgcaagcccugaacacccuugugaagcagcugucaagcaauuucggugcaauuaguuccgucuugaacgauauccucucuagacuggacaaaguggaggcugagguacagauagauagguuaauuacaggccggcugcagagccuccaaaccuacguuacgcagcagcuuauccgcgccgcugaaauuagagccuccgcaaaucuggccgcuacuaagaugucagagugcguguuggggcagaguaagagggucgacuuuuguggaaaaggcuaucaccuaaugagcuucccccaagcggcaccucauggugugguguuucugcacgucacauacguuccaucucaggaacggaacuucaccacugcccccgcuaucugccaugaggggaaggccuacuuuccucgcgagggaguguucguauuuaacggcacauccugguucaucacccagcgaaauuucuucucaccacagauuauaacgaccgacaacacauuugugagcggcaauugugaugucgugaucgggauuaucaacaauacuguuuaugacccgcuccaacccgaacuggauaguuucaaagaggaacuugacaaguacuuuaaaaaccacaccucuccugauguggaccugggagauauauccgguauuaaugcaagcgucgugaacauccagaaggagaucgacagauugaaugaaguagccaaaaaccucaaugagucgcugauugauuuacaggagcugggcaaguaugaacaguacaucaaguggccaugguauguuuggcuaggguucauugcuggacucauagccaucgugauggucacaauucugcuuugcuguaugacuucuugcuguuccugcuugaaaggcgcauguucaugcgguaguugcuguaaguucgacgaggaugacagcgaacccgugcugaaaggggucaagcuccauuacaccuga

SEQ ID NO: 14999 - RNA, 3768 nt, Artificial Sequence
  SARS-CoV/Tor2__NP_828851.1 spike protein CDS human (1-1255)
auguucaucuuucugcuguuccuuacccugacaagcggcuccgacuuggauagaugcacuacguuugacgaugugcaggcccccaacuacacccaacacacaucuucaaugagaggggucuauuacccugacgagauuuuccggagugauacuuuauaucugacccaggaccuauuucucccauucuacagcaauguuacaggauuucauaccauaaaccacacuuucgguaauccggugauccccuuuaaggauggcauuuauuucgcugcaacagaaaaauccaacguagugcgcgggugggucuuuggaucuaccaugaauaacaagucgcagucagugaucauuaucaauaacagcacgaauguugugauacgagccuguaacuucgagcugugcgacaauccauuuuucgcggucaguaaaccaaugggcacucagacccauacaaugaucuucgauaacgcuuuuaauuguacuuucgaauacauuuccgacgccuuuucucuugaugugagcgagaaguccgguaacuucaaacaccuccgugaauuuguauucaagaauaaggacggguuuuuguauguuuacaaaggauaccaacccaucgauguggucagagaccucccuucaggcuucaacacccugaagccaauuuuuaaacugccccucggcaucaacauaacaaauuucagggcaauuuuaaccgccuuuaguccugcucaggacaucugggggacgagcgcagccgcuuauuucgugggauaccugaagccaacuacauuuaugcuuaaauaugaugagaacgguaccauuacugacgccguggauugcucucagaauccguuggcggagcugaaguguuccgucaagucauucgaaaucgacaaaggcaucuaccagacaagcaacuuccggguugugcccaguggggauguagugcgcuuuccuaauauuaccaaccuaugcccauucggagaggucuuuaaugcaacgaaguuccccucuguguaugccugggaaaggaaaaagauauccaacuguguugcugacuacagcgugcucuauaauucgaccuuuuucucuacauuuaaaugcuacggcgucuccgccacuaagcugaacgaucuuuguuucucaaauguguacgcagacaguuuuguaguuaaaggugaugacgugaggcaaaucgcuccugggcagaccggagucauugccgauuauaacuacaagcugccagacgacuucaugggcugcguguuggcguggaauacacggaacaucgaugccacuagcaccggcaauuauaacuacaaguaucgcuaccuccgacaugggaaacugagacccuuugagagggacauauccaacgucccguucucuccugauggaaagcccuguacaccuccugcauuaaauugcuauuggccccugaacgacuacgguuuuuacaccacuacgggcauuggguaucagccauaccgggugguugugcucagcuucgagcuucugaaugcucccgccacaguaugcggaccuaaauugucaaccgaucuaaucaagaaccagugugucaauuucaacuuuaauggccugacugguaccggggugcucacaccaaguuccaaacguuuccaaccguuucagcaguucggccgcgacguuagcgauuuuaccgacucugugagagaucccaagacuucagaaauccuggacauuaguccuugcgcuuucggaggcgucagcgugaucacaccagggacgaacgccuccucugagguagcagugcuuuaucaagauguuaauuguaccgacgucucgacugccauucacgcugaucagcugacacccgcguggaggauauacagcaccggaaacaauguguuucagacacaggcagguugcuugaucggcgccgaacacguggacacuuccuaugagugugacauuccuaucggggcuggaaucugcgccucauaccauaccgucagucuccugcggucuacgagccaaaaguccauuguugcauauaccaugucauuaggcgccgauagcucuauagcuuacuccaacaauacaaucgccauuccaacuaacuucaguaucagcauuaccacagaagugaugcccgugucuauggcaaaaacuuccguagacuguaauauguacaucugcggugauucaaccgagugugcgaaccugcuacuccaguaugggaguuuuugcacgcagcugaaccgagcucuuagcggcauagccgcagagcaggaccgcaauacaagagaagucuucgcccaagugaagcagauguacaaaaccccgacuuugaaguauuuuggaggcuucaacuucucgcagauccugccugauccacucaaacccacaaagagguccuuuauugaggaccugcuuuucaauaagguuacccuggcugaugccggguuuaugaaacaguacggagaauguuugggugacaucaacgcacgggaucucauuugcgcucaaaaguucaauggccugacuguguuaccuccccugcuaaccgacgauaugaucgccgcguauacagccgcucucgucucugggacggcaaccgccggauggacuuuuggcgcuggugccgcacugcagauaccauucgcgaugcagauggccuaccgcuuuaacgggauuggcgugacacagaauguucuuuaugagaaccaaaaacagaucgcuaaucaguucaacaaggccauuagccaaauccaggaaucauugaccacaaccaguacugcacugggaaaacuccaggacgugguaaaucagaacgcucaagcccugaauacguuagucaagcagcuguccucuaacuuuggcgcaauaagcuccgugcuuaaugauaucuugucaagacucgacaagguggaggccgagguccagauugacaggcugaucacagggcgucuacagagccugcaaaccuacguuacucagcagcucauucgggcugcggaaauccgagccagugcaaaccuggcugccaccaaaaugucugagugcgugcuuggacaguccaagagaguagauuucuguggcaaagguuaccacuugaugagcuuuccucaagccgcuccccaugggguggucuuccugcacgugacauauguuccaucgcaggaaaggaacuuuacuaccgcaccggccauaugccacgagggaaaggcguacuucccucgcgaaggcguguucgucuuuaaugguacaucaugguucauuacgcagcggaacuuuuucucuccccaaaucaucaccacugacaauacauuugugaguggcaacugugauguugugauugggaucauuaauaacaccgucuaugacccauuacagcccgagcucgauuccuucaaagaggaacuggacaaguacuuuaaaaaucauacuagcccugauguagaccuuggagauauaucuggcaucaacgcuagcgugguuaauauucagaaggagaucgacagacugaacgaaguggccaagaauuugaacgagucccucauugaucugcaggagcuagggaaauaugaacaauacaucaaguggccaugguaugucuggcugggauucauagcaggccucaucgccauugugaugguaacaauccugcuuugcuguaugaccucaugcuguaguugcuugaaaggugcuuguagcugcgggucuuguugcaaguuugacgaggacgauuccgaacccgugcugaaaggagucaaguuacacuacacguga

SEQ ID NO: 15000 - RNA, 3768 nt, Artificial Sequence
  SARS-CoV/Tor2__NP_828851.1 spike protein CDS human (1-1255)(K968P_V969P)
auguucaucuuucugcuguuccuuacccugacaagcggcuccgacuuggauagaugcacuacguuugacgaugugcaggcccccaacuacacccaacacacaucuucaaugagaggggucuauuacccugacgagauuuuccggagugauacuuuauaucugacccaggaccuauuucucccauucuacagcaauguuacaggauuucauaccauaaaccacacuuucgguaauccggugauccccuuuaaggauggcauuuauuucgcugcaacagaaaaauccaacguagugcgcgggugggucuuuggaucuaccaugaauaacaagucgcagucagugaucauuaucaauaacagcacgaauguugugauacgagccuguaacuucgagcugugcgacaauccauuuuucgcggucaguaaaccaaugggcacucagacccauacaaugaucuucgauaacgcuuuuaauuguacuuucgaauacauuuccgacgccuuuucucuugaugugagcgagaaguccgguaacuucaaacaccuccgugaauuuguauucaagaauaaggacggguuuuuguauguuuacaaaggauaccaacccaucgauguggucagagaccucccuucaggcuucaacacccugaagccaauuuuuaaacugccccucggcaucaacauaacaaauuucagggcaauuuuaaccgccuuuaguccugcucaggacaucugggggacgagcgcagccgcuuauuucgugggauaccugaagccaacuacauuuaugcuuaaauaugaugagaacgguaccauuacugacgccguggauugcucucagaauccguuggcggagcugaaguguuccgucaagucauucgaaaucgacaaaggcaucuaccagacaagcaacuuccggguugugcccaguggggauguagugcgcuuuccuaauauuaccaaccuaugcccauucggagaggucuuuaaugcaacgaaguuccccucuguguaugccugggaaaggaaaaagauauccaacuguguugcugacuacagcgugcucuauaauucgaccuuuuucucuacauuuaaaugcuacggcgucuccgccacuaagcugaacgaucuuuguuucucaaauguguacgcagacaguuuuguaguuaaaggugaugacgugaggcaaaucgcuccugggcagaccggagucauugccgauuauaacuacaagcugccagacgacuucaugggcugcguguuggcguggaauacacggaacaucgaugccacuagcaccggcaauuauaacuacaaguaucgcuaccuccgacaugggaaacugagacccuuugagagggacauauccaacgucccguucucuccugauggaaagcccuguacaccuccugcauuaaauugcuauuggccccugaacgacuacgguuuuuacaccacuacgggcauuggguaucagccauaccgggugguugugcucagcuucgagcuucugaaugcucccgccacaguaugcggaccuaaauugucaaccgaucuaaucaagaaccagugugucaauuucaacuuuaauggccugacugguaccggggugcucacaccaaguuccaaacguuuccaaccguuucagcaguucggccgcgacguuagcgauuuuaccgacucugugagagaucccaagacuucagaaauccuggacauuaguccuugcgcuuucggaggcgucagcgugaucacaccagggacgaacgccuccucugagguagcagugcuuuaucaagauguuaauuguaccgacgucucgacugccauucacgcugaucagcugacacccgcguggaggauauacagcaccggaaacaauguguuucagacacaggcagguugcuugaucggcgccgaacacguggacacuuccuaugagugugacauuccuaucggggcuggaaucugcgccucauaccauaccgucagucuccugcggucuacgagccaaaaguccauuguugcauauaccaugucauuaggcgccgauagcucuauagcuuacuccaacaauacaaucgccauuccaacuaacuucaguaucagcauuaccacagaagugaugcccgugucuauggcaaaaacuuccguagacuguaauauguacaucugcggugauucaaccgagugugcgaaccugcuacuccaguaugggaguuuuugcacgcagcugaaccgagcucuuagcggcauagccgcagagcaggaccgcaauacaagagaagucuucgcccaagugaagcagauguacaaaaccccgacuuugaaguauuuuggaggcuucaacuucucgcagauccugccugauccacucaaacccacaaagagguccuuuauugaggaccugcuuuucaauaagguuacccuggcugaugccggguuuaugaaacaguacggagaauguuugggugacaucaacgcacgggaucucauuugcgcucaaaaguucaauggccugacuguguuaccuccccugcuaaccgacgauaugaucgccgcguauacagccgcucucgucucugggacggcaaccgccggauggacuuuuggcgcuggugccgcacugcagauaccauucgcgaugcagauggccuaccgcuuuaacgggauuggcgugacacagaauguucuuuaugagaaccaaaaacagaucgcuaaucaguucaacaaggccauuagccaaauccaggaaucauugaccacaaccaguacugcacugggaaaacuccaggacgugguaaaucagaacgcucaagcccugaauacguuagucaagcagcuguccucuaacuuuggcgcaauaagcuccgugcuuaaugauaucuugucaagacucgacccucccgaggccgaggugcagauugacaggcugaucacagggcgucuacagagccugcaaaccuacgucacucagcagcucauucgggcugcggaaauccgagccagugcaaaccuggcugccaccaagaugucugagugcguucuuggacaguccaaaagaguggauuucuguggcaaggguuaccacuugaugagcuuuccacaagccgcuccgcaugggguaguguuccugcacgucacauaugugccuucgcaggaaaggaacuuuacuaccgcacccgccauaugccacgagggaaaagcguacuucccacgcgaaggcguuuucguguuuaaugguacaucaugguucauuacgcagcggaacuuuuucucuccccaaaucaucaccacugacaauacauuugucaguggcaacugugaugugguuauugggaucauuaauaacaccguguaugacccuuuacagccagagcucgauuccuucaaggaggaacuggacaaauacuuuaagaaucauacuagccccgaugucgaccuuggagauauaucuggcaucaacgcuagcguagugaauauucagaaagagaucgacagacugaacgaaguugccaagaauuugaacgagucccucauugaucugcaggagcuagggaaguaugaacaauacaucaaauggccuugguauguguggcugggauucauagcaggccucaucgccauugucauggugacaauccugcuuugcuguaugaccucaugcuguaguugcuugaagggugcuuguagcugcgggucuuguugcaaauuugacgaggacgauuccgaaccgguacugaagggagugaaauuacacuacacguga

SEQ ID NO: 15001 - RNA, 3573 nt, Artificial Sequence
  SARS-CoV/Tor2__NP_828851.1 spike protein CDS human (variant)
auguucaucuuucugcuguuccuuacccugacaagcggcuccgacuuggauagaugcacuacguuugacgaugugcaggcccccaacuacacccaacacacaucuucaaugagaggggucuauuacccugacgagauuuuccggagugauacuuuauaucugacccaggaccuauuucucccauucuacagcaauguuacaggauuucauaccauaaaccacacuuucgguaauccggugauccccuuuaaggauggcauuuauuucgcugcaacagaaaaauccaacguagugcgcgggugggucuuuggaucuaccaugaauaacaagucgcagucagugaucauuaucaauaacagcacgaauguugugauacgagccuguaacuucgagcugugcgacaauccauuuuucgcggucaguaaaccaaugggcacucagacccauacaaugaucuucgauaacgcuuuuaauuguacuuucgaauacauuuccgacgccuuuucucuugaugugagcgagaaguccgguaacuucaaacaccuccgugaauuuguauucaagaauaaggacggguuuuuguauguuuacaaaggauaccaacccaucgauguggucagagaccucccuucaggcuucaacacccugaagccaauuuuuaaacugccccucggcaucaacauaacaaauuucagggcaauuuuaaccgccuuuaguccugcucaggacaucugggggacgagcgcagccgcuuauuucgugggauaccugaagccaacuacauuuaugcuuaaauaugaugagaacgguaccauuacugacgccguggauugcucucagaauccguuggcggagcugaaguguuccgucaagucauucgaaaucgacaaaggcaucuaccagacaagcaacuuccggguugugcccaguggggauguagugcgcuuuccuaauauuaccaaccuaugcccauucggagaggucuuuaaugcaacgaaguuccccucuguguaugccugggaaaggaaaaagauauccaacuguguugcugacuacagcgugcucuauaauucgaccuuuuucucuacauuuaaaugcuacggcgucuccgccacuaagcugaacgaucuuuguuucucaaauguguacgcagacaguuuuguaguuaaaggugaugacgugaggcaaaucgcuccugggcagaccggagucauugccgauuauaacuacaagcugccagacgacuucaugggcugcguguuggcguggaauacacggaacaucgaugccacuagcaccggcaauuauaacuacaaguaucgcuaccuccgacaugggaaacugagacccuuugagagggacauauccaacgucccguucucuccugauggaaagcccuguacaccuccugcauuaaauugcuauuggccccugaacgacuacgguuuuuacaccacuacgggcauuggguaucagccauaccgggugguugugcucagcuucgagcuucugaaugcucccgccacaguaugcggaccuaaauugucaaccgaucuaaucaagaaccagugugucaauuucaacuuuaauggccugacugguaccggggugcucacaccaaguuccaaacguuuccaaccguuucagcaguucggccgcgacguuagcgauuuuaccgacucugugagagaucccaagacuucagaaauccuggacauuaguccuugcgcuuucggaggcgucagcgugaucacaccagggacgaacgccuccucugagguagcagugcuuuaucaagauguuaauuguaccgacgucucgacugccauucacgcugaucagcugacacccgcguggaggauauacagcaccggaaacaauguguuucagacacaggcagguugcuugaucggcgccgaacacguggacacuuccuaugagugugacauuccuaucggggcuggaaucugcgccucauaccauaccgucagucuccugcggucuacgagccaaaaguccauuguugcauauaccaugucauuaggcgccgauagcucuauagcuuacuccaacaauacaaucgccauuccaacuaacuucaguaucagcauuaccacagaagugaugcccgugucuauggcaaaaacuuccguagacuguaauauguacaucugcggugauucaaccgagugugcgaaccugcuacuccaguaugggaguuuuugcacgcagcugaaccgagcucuuagcggcauagccgcagagcaggaccgcaauacaagagaagucuucgcccaagugaagcagauguacaaaaccccgacuuugaaguauuuuggaggcuucaacuucucgcagauccugccugauccacucaaacccacaaagagguccuuuauugaggaccugcuuuucaauaagguuacccuggcugaugccggguuuaugaaacaguacggagaauguuugggugacaucaacgcacgggaucucauuugcgcucaaaaguucaauggccugacuguguuaccuccccugcuaaccgacgauaugaucgccgcguauacagccgcucucgucucugggacggcaaccgccggauggacuuuuggcgcuggugccgcacugcagauaccauucgcgaugcagauggccuaccgcuuuaacgggauuggcgugacacagaauguucuuuaugagaaccaaaaacagaucgcuaaucaguucaacaaggccauuagccaaauccaggaaucauugaccacaaccaguacugcacugggaaaacuccaggacgugguaaaucagaacgcucaagcccugaauacguuagucaagcagcuguccucuaacuuuggcgcaauaagcuccgugcuuaaugauaucuugucaagacucgacccucccgaggccgaggugcagauugacaggcugaucacagggcgucuacagagccugcaaaccuacgucacucagcagcucauucgggcugcggaaauccgagccagugcaaaccuggcugccaccaagaugucugagugcguucuuggacaguccaaaagaguggauuucuguggcaaggguuaccacuugaugagcuuuccacaagccgcuccgcaugggguaguguuccugcacgucacauaugugccuucgcaggaaaggaacuuuacuaccgcacccgccauaugccacgagggaaaagcguacuucccacgcgaaggcguuuucguguuuaaugguacaucaugguucauuacgcagcggaacuuuuucucuccccaaaucaucaccacugacaauacauuugucaguggcaacugugaugugguuauugggaucauuaauaacaccguguaugacccuuuacagccagagcucgauuccuucaaggaggaacuggacaaauacuuuaagaaucauacuagccccgaugucgaccuuggagauauaucuggcaucaacgcuagcguagugaauauucagaaagagaucgacagacugaacgaaguugccaagaauuugaacgagucccucauugaucugcaggagcuagggaaguaugaacaauga

SEQ ID NO: 15002 - RNA, 3654 nt, Artificial Sequence
  SARS-CoV/Tor2__NP_828851.1 spike protein CDS human (variant)
auguucaucuuucugcuguuccuuacccugacaagcggcuccgacuuggauagaugcacuacguuugacgaugugcaggcccccaacuacacccaacacacaucuucaaugagaggggucuauuacccugacgagauuuuccggagugauacuuuauaucugacccaggaccuauuucucccauucuacagcaauguuacaggauuucauaccauaaaccacacuuucgguaauccggugauccccuuuaaggauggcauuuauuucgcugcaacagaaaaauccaacguagugcgcgggugggucuuuggaucuaccaugaauaacaagucgcagucagugaucauuaucaauaacagcacgaauguugugauacgagccuguaacuucgagcugugcgacaauccauuuuucgcggucaguaaaccaaugggcacucagacccauacaaugaucuucgauaacgcuuuuaauuguacuuucgaauacauuuccgacgccuuuucucuugaugugagcgagaaguccgguaacuucaaacaccuccgugaauuuguauucaagaauaaggacggguuuuuguauguuuacaaaggauaccaacccaucgauguggucagagaccucccuucaggcuucaacacccugaagccaauuuuuaaacugccccucggcaucaacauaacaaauuucagggcaauuuuaaccgccuuuaguccugcucaggacaucugggggacgagcgcagccgcuuauuucgugggauaccugaagccaacuacauuuaugcuuaaauaugaugagaacgguaccauuacugacgccguggauugcucucagaauccguuggcggagcugaaguguuccgucaagucauucgaaaucgacaaaggcaucuaccagacaagcaacuuccggguugugcccaguggggauguagugcgcuuuccuaauauuaccaaccuaugcccauucggagaggucuuuaaugcaacgaaguuccccucuguguaugccugggaaaggaaaaagauauccaacuguguugcugacuacagcgugcucuauaauucgaccuuuuucucuacauuuaaaugcuacggcgucuccgccacuaagcugaacgaucuuuguuucucaaauguguacgcagacaguuuuguaguuaaaggugaugacgugaggcaaaucgcuccugggcagaccggagucauugccgauuauaacuacaagcugccagacgacuucaugggcugcguguuggcguggaauacacggaacaucgaugccacuagcaccggcaauuauaacuacaaguaucgcuaccuccgacaugggaaacugagacccuuugagagggacauauccaacgucccguucucuccugauggaaagcccuguacaccuccugcauuaaauugcuauuggccccugaacgacuacgguuuuuacaccacuacgggcauuggguaucagccauaccgggugguugugcucagcuucgagcuucugaaugcucccgccacaguaugcggaccuaaauugucaaccgaucuaaucaagaaccagugugucaauuucaacuuuaauggccugacugguaccggggugcucacaccaaguuccaaacguuuccaaccguuucagcaguucggccgcgacguuagcgauuuuaccgacucugugagagaucccaagacuucagaaauccuggacauuaguccuugcgcuuucggaggcgucagcgugaucacaccagggacgaacgccuccucugagguagcagugcuuuaucaagauguuaauuguaccgacgucucgacugccauucacgcugaucagcugacacccgcguggaggauauacagcaccggaaacaauguguuucagacacaggcagguugcuugaucggcgccgaacacguggacacuuccuaugagugugacauuccuaucggggcuggaaucugcgccucauaccauaccgucagucuccugcggucuacgagccaaaaguccauuguugcauauaccaugucauuaggcgccgauagcucuauagcuuacuccaacaauacaaucgccauuccaacuaacuucaguaucagcauuaccacagaagugaugcccgugucuauggcaaaaacuuccguagacuguaauauguacaucugcggugauucaaccgagugugcgaaccugcuacuccaguaugggaguuuuugcacgcagcugaaccgagcucuuagcggcauagccgcagagcaggaccgcaauacaagagaagucuucgcccaagugaagcagauguacaaaaccccgacuuugaaguauuuuggaggcuucaacuucucgcagauccugccugauccacucaaacccacaaagagguccuuuauugaggaccugcuuuucaauaagguuacccuggcugaugccggguuuaugaaacaguacggagaauguuugggugacaucaacgcacgggaucucauuugcgcucaaaaguucaauggccugacuguguuaccuccccugcuaaccgacgauaugaucgccgcguauacagccgcucucgucucugggacggcaaccgccggauggacuuuuggcgcuggugccgcacugcagauaccauucgcgaugcagauggccuaccgcuuuaacgggauuggcgugacacagaauguucuuuaugagaaccaaaaacagaucgcuaaucaguucaacaaggccauuagccaaauccaggaaucauugaccacaaccaguacugcacugggaaaacuccaggacgugguaaaucagaacgcucaagcccugaauacguuagucaagcagcuguccucuaacuuuggcgcaauaagcuccgugcuuaaugauaucuugucaagacucgacccucccgaggccgaggugcagauugacaggcugaucacagggcgucuacagagccugcaaaccuacgucacucagcagcucauucgggcugcggaaauccgagccagugcaaaccuggcugccaccaagaugucugagugcguucuuggacaguccaaaagaguggauuucuguggcaaggguuaccacuugaugagcuuuccacaagccgcuccgcaugggguaguguuccugcacgucacauaugugccuucgcaggaaaggaacuuuacuaccgcacccgccauaugccacgagggaaaagcguacuucccacgcgaaggcguuuucguguuuaaugguacaucaugguucauuacgcagcggaacuuuuucucuccccaaaucaucaccacugacaauacauuugucaguggcaacugugaugugguuauugggaucauuaauaacaccguguaugacccuuuacagccagagcucgauuccuucaaggaggaacuggacaaauacuuuaagaaucauacuagccccgaugucgaccuuggagauauaucuggcaucaacgcuagcguagugaauauucagaaagagaucgacagacugaacgaaguugccaagaauuugaacgagucccucauugaucugcaggagcuagggaaguaugaacaaggaggcuacaucccugaggcaccgagggacggucaggccuaugugcgcaaagacggggaauggguccugcucucaacauucuga

SEQ ID NO: 15003 - RNA, 4062 nt, Artificial Sequence
  HCoV/OC43__P36334.1 spike protein CDS human (1-1353)
auguuccugauccuccuuauuagccugcccaccgccuuugcugugauaggcgacuugaagugcacauccgauaacaucaaugacaaagauacugggccuccaccgauuucuacggacaccgucgauguuacaaacggauuagguacuuacuaugugcuggacagaguauaccuaaauaccacacucuuccugaacggcuauuaccccaccucagggaguacuuauaggaauauggcacuuaagggaagcgugcuguugucccggcucugguuuaaaccuccauuccugucugauuuuaucaacggcauuuucgccaaggucaaaaauacaaaggugaucaaggaccgcguuauguacucggaguuucccgcgauaaccaucgguucaacguucgugaacacuagcuauagugucgugguacagccucgaaccauuaauuccacacaagauggggacaacaaacugcagggacucuuagaaguuucugugugucaguacaauaugugcgaguacccacagacuaucugucaccccaaccugggcaaucaucguaaggaacuuuggcacuuggauaccggcgucgugagcugccuguauaaaagaaacuuuacauacgacgugaaugcugauuaucuauacuuccauuuuuaucaagaagggggaaccuucuacgccuauuuuacggacacuggugucguuacaaaguuccucuucaacguguaccugggcauggcacuuucccacuacuauguaaugccucugaccuguaacucaaaauugacucucgaguacugggugacaccacugaccaguaggcaguauuuacuggccuuuaaucaggacgggauuaucuucaacgcugaggauugcaugagcgacuuuaugucugagauaaaguguaagacgcaguccauugcaccgcccaccggagucuacgaacucaauggcuauacagugcaaccuaucgccgauguuuaccggcgcaaaccaaaccuucccaauugcaacauugaggcuuggcugaaugacaagucagugccuagcccauugaacugggaaagaaaaacuuucaguaauuguaacuuuaauaugucuucccuaaugagcuucauccaggccgauucguuuaccugcaacaauaucgacgcggcaaagauuuaugguauguguuucucuuccauaacaaucgauaaauuugccauucccaacgggaggaaggucgaccugcagcucggaaaucugggcuaccuucagucauucaacuaccggaucgauacuaccgcuacaaguugccaacuguauuacaacuugccggccgcaaaugugagcguaucccgcuuuaacccuucuaccuggaauaaacgauucggcuuuauagaggacagcguuuucaagcccagaccagcuggggugcucacuaaccaugaugucguguaugcccagcacugcuucaaggcgccuaaaaauuuuugucccugcaagcugaacggaucaugugucgguaguggcccagggaaaaauaacggaauuggcacgugccccgccgguacaaauuacuuaaccugugacaaccugugcacuccugacccaaucaccuucacagggaccuauaaguguccgcagacuaaaucccuagugggcaucggagagcacugcagcggccucgcaguuaagucugauuacugugggggaaauucaugcacauguaggccccaagcguuucuggguuggagugccgacagcugccuucagggcgauaagugcaacauuuucgcuaauuuuaucuugcaugacgugaacuccgggcugacguguucuaccgaucuccagaaagccaauacugacauuauacugggaguaugcgucaacuaugaucuuuacggcauccugggucaggggauuuucguggaaguuaacgcaacauacuauaauucguggcaaaacuugcucuacgacagcaauggcaaccuguauggauuucgggauuacaucaucaaucguaccuucaugauucgcuccuguuauucaggcagagugagugccgcuuuucacgcgaacucuagcgagccugcauuacuguucaggaauauaaagugcaacuacgucuuuaauaacucccuaacacggcagcuccagccaaucaauuauuucgacucauaccuggggugugugguaaacgccuacaauagcacugcuauuucugugcagaccugcgaucuuacgguuggauccgguuauugugucgacuacaguaaaaaccgacgcagcagaggcgccaucaccacaggguauagguuuacuaauuucgaacccuucaccgugaacucugugaacgauuccuuggagccugucggaggccuguacgaaauucaaaucccaucagaguuuacaauagguaauaugguugaguucauccagacuucuagccccaaggugaccauugacugcgcagccuuuguguguggggacuaugcugccugcaaaucgcagcucguagaauacggcuccuucugugauaacaucaaugcaauucugacggaggucaacgaauuacuggacacaacccagcuucaaguggcuaauucuuugaugaacggaguuacucucagcacaaagcugaaggauggcgugaauuuuaacgucgacgauaucaauuucucaccggugcuagggugccugggaagugagugcuccaaagcuaguagccgguccgccauagaagaccuccuguuugauaagguuaaacuuucagacgugggcuucguagaggcauauaacaauuguaccgguggggccgagauucgcgauuugaucugcguccagagcuacaagggaauuaaagugcugccuccauuacucagugaaaaccagaucucuggcuacacucuggcugccaccuccgcaagccuuuuucccccuuggacagcugccgcgggugugcccuucuaucugaauguccaguacagaauaaacggcuuggggguuacgauggacgugcucucgcaaaaucagaagcugaucgccaacgcuuuuaauaacgcacuauaugccauucaggagggauucgaugcuaccaacucagcccugguaaagauccaagcaguggucaaugcgaacgccgaagcucucaauaaccugcuucagcaguugucuaauagguucggcgccauuagugcaucccugcaggagaucuuaagccgucucgacgcucuggaagccgaggcacaaauagaucggcuuauuaacgggcgacugacugcccuaaaugcuuacgugucucagcagcucagcgacuccacacugguuaaauuuucagcggcccaggcaauggagaaggugaacgaaugugucaaaagucaaagcucuagaaucaauuucugcggaaacggcaaucauaucauuuccuuggugcagaacgcuccauauggucuguacuuuauccacuucucauauguuccuaccaaguacgugacagccagggucagucccggguuauguauugccggagaccgcggcauagcuccaaaaagcgguuacuuuguaaaugugaacaauacuuggauguauaccggcuccggguacuauuacccggagccuaucacggaaaacaacguuguggucaugucuacaugcgcagugaauuauaccaaggcccccuacguaaugcucaacacuucgauuccaaaucugcccgauuucaaagaggagcuugaccagugguuuaagaaccagaccagcguggcgccugaucugucauuggacuauaucaaugucacauuccucgaucugcaaguugaaaugaaccggcuacaggaggcuauuaaggugcugaaucaguccuacaucaaccuuaaagacauaggaacuuacgaauauuacgugaaguggccaugguaugucuggcuccugaucuguuuggccggcguggcaaugcugguuuuacucuuuuucauuugcuguugcaccggguguggaacaaguugcuuuaaaaagugcggcgguuguugcgaugacuacacgggguaucaagagcugguaaucaaaaccucucacgaugacuga

SEQ ID NO: 15004 - RNA, 4062 nt, Artificial Sequence
  HCoV/OC43__P36334.1 spike protein CDS human (1-1353)(A1070P_L1071P)
auguuccugauccuccuuauuagccugcccaccgccuuugcugugauaggcgacuugaagugcacauccgauaacaucaaugacaaagauacugggccuccaccgauuucuacggacaccgucgauguuacaaacggauuagguacuuacuaugugcuggacagaguauaccuaaauaccacacucuuccugaacggcuauuaccccaccucagggaguacuuauaggaauauggcacuuaagggaagcgugcuguugucccggcucugguuuaaaccuccauuccugucugauuuuaucaacggcauuuucgccaaggucaaaaauacaaaggugaucaaggaccgcguuauguacucggaguuucccgcgauaaccaucgguucaacguucgugaacacuagcuauagugucgugguacagccucgaaccauuaauuccacacaagauggggacaacaaacugcagggacucuuagaaguuucugugugucaguacaauaugugcgaguacccacagacuaucugucaccccaaccugggcaaucaucguaaggaacuuuggcacuuggauaccggcgucgugagcugccuguauaaaagaaacuuuacauacgacgugaaugcugauuaucuauacuuccauuuuuaucaagaagggggaaccuucuacgccuauuuuacggacacuggugucguuacaaaguuccucuucaacguguaccugggcauggcacuuucccacuacuauguaaugccucugaccuguaacucaaaauugacucucgaguacugggugacaccacugaccaguaggcaguauuuacuggccuuuaaucaggacgggauuaucuucaacgcugaggauugcaugagcgacuuuaugucugagauaaaguguaagacgcaguccauugcaccgcccaccggagucuacgaacucaauggcuauacagugcaaccuaucgccgauguuuaccggcgcaaaccaaaccuucccaauugcaacauugaggcuuggcugaaugacaagucagugccuagcccauugaacugggaaagaaaaacuuucaguaauuguaacuuuaauaugucuucccuaaugagcuucauccaggccgauucguuuaccugcaacaauaucgacgcggcaaagauuuaugguauguguuucucuuccauaacaaucgauaaauuugccauucccaacgggaggaaggucgaccugcagcucggaaaucugggcuaccuucagucauucaacuaccggaucgauacuaccgcuacaaguugccaacuguauuacaacuugccggccgcaaaugugagcguaucccgcuuuaacccuucuaccuggaauaaacgauucggcuuuauagaggacagcguuuucaagcccagaccagcuggggugcucacuaaccaugaugucguguaugcccagcacugcuucaaggcgccuaaaaauuuuugucccugcaagcugaacggaucaugugucgguaguggcccagggaaaaauaacggaauuggcacgugccccgccgguacaaauuacuuaaccugugacaaccugugcacuccugacccaaucaccuucacagggaccuauaaguguccgcagacuaaaucccuagugggcaucggagagcacugcagcggccucgcaguuaagucugauuacugugggggaaauucaugcacauguaggccccaagcguuucuggguuggagugccgacagcugccuucagggcgauaagugcaacauuuucgcuaauuuuaucuugcaugacgugaacuccgggcugacguguucuaccgaucuccagaaagccaauacugacauuauacugggaguaugcgucaacuaugaucuuuacggcauccugggucaggggauuuucguggaaguuaacgcaacauacuauaauucguggcaaaacuugcucuacgacagcaauggcaaccuguauggauuucgggauuacaucaucaaucguaccuucaugauucgcuccuguuauucaggcagagugagugccgcuuuucacgcgaacucuagcgagccugcauuacuguucaggaauauaaagugcaacuacgucuuuaauaacucccuaacacggcagcuccagccaaucaauuauuucgacucauaccuggggugugugguaaacgccuacaauagcacugcuauuucugugcagaccugcgaucuuacgguuggauccgguuauugugucgacuacaguaaaaaccgacgcagcagaggcgccaucaccacaggguauagguuuacuaauuucgaacccuucaccgugaacucugugaacgauuccuuggagccugucggaggccuguacgaaauucaaaucccaucagaguuuacaauagguaauaugguugaguucauccagacuucuagccccaaggugaccauugacugcgcagccuuuguguguggggacuaugcugccugcaaaucgcagcucguagaauacggcuccuucugugauaacaucaaugcaauucugacggaggucaacgaauuacuggacacaacccagcuucaaguggcuaauucuuugaugaacggaguuacucucagcacaaagcugaaggauggcgugaauuuuaacgucgacgauaucaauuucucaccggugcuagggugccugggaagugagugcuccaaagcuaguagccgguccgccauagaagaccuccuguuugauaagguuaaacuuucagacgugggcuucguagaggcauauaacaauuguaccgguggggccgagauucgcgauuugaucugcguccagagcuacaagggaauuaaagugcugccuccauuacucagugaaaaccagaucucuggcuacacucuggcugccaccuccgcaagccuuuuucccccuuggacagcugccgcgggugugcccuucuaucugaauguccaguacagaauaaacggcuuggggguuacgauggacgugcucucgcaaaaucagaagcugaucgccaacgcuuuuaauaacgcacuauaugccauucaggagggauucgaugcuaccaacucagcccugguaaagauccaagcaguggucaaugcgaacgccgaagcucucaauaaccugcuucagcaguugucuaauagguucggcgccauuagugcaucccugcaggagaucuuaagccgucucgacccaccugaagcugaggcccaaauagaucggcugauuaacgggcgacuuacugcacugaaugccuacgugucucagcagcuaagcgacuccacacucguuaaauuuucagcugcgcaggccauggagaaggugaacgaaugugucaaaagucaaagcucuagaaucaauuucugcggaaacggcaaucauaucauuucccuggugcagaacgcacccuaugguuuguacuuuauccacuucucauauguuccaaccaaguacgugacagcuagggucaguccggggcuguguauugccggagaccgcggcauagccccuaaaagcgguuacuuuguaaaugugaacaauacuuggauguauaccggcuccggguacuauuaccccgagccaaucacggaaaacaacguuguggucaugucuacaugcgcugugaauuauaccaaggcacccuacguaauguuaaacacuucgauuccuaaucucccagauuucaaagaggagcuggaccagugguuuaagaaccagaccagcguggcccccgaucuuucacuggacuauaucaaugucacauucuuggaucuccaaguugaaaugaaccggcugcaggaggcgauuaaggugcuaaaucaguccuacaucaaccugaaagacauaggaacuuacgaauauuacgugaaguggccuugguaugucuggcuucucaucugucuggcuggcguggccauguugguucuguuauuuuucauuugcuguugcaccggguguggaacaaguugcuuuaaaaagugcggcgguuguugcgaugacuacacgggguaucaagagcucguaaucaaaaccucucacgaugacuga

SEQ ID NO: 15005 - RNA, 4089 nt, Artificial Sequence
  HCoV/OC43/1783A_10__AIL49484.1 spike protein CDS human (1-1362)
auguuccugauccuccuuauuagccugcccaccgccuuugcugugauaggcgacuugaagugcccuuuagauuccagaacagggucucugaacaauaucgacacuggaccaccgucaauuaguacggcaaccgucgauguuacaaacggucuaggcacuuacuaugugcucgacaggguauaccugaauaccacacuuuuccugaacggguauuaccccaccagcggauccacuuaucggaauauggccuugaaaggcacagauaagcucucuacccugugguuuaaaccuccauuccugucggacuuuaucaacgguauuuucgcgaaggugaaaaauacgaaggucuuuaaggauggggugauguacucagaguuccccgcuaucacuauaggaagcaccuuuguuaacacaaguuauuccguggucgugcagccucgcacuaucaauucuacccaagacggcguaaacaaacuccagggcuuacuggaaguuagcgugugucaguacaauaugugcgaguacccacacacaauuugucaucccaaacuugggaaccacuucaaggaauuguggcauauggauaccggagucguguccugccuguauaagcgaaauuuuacguacgacgugaacgccacuuaucuauacuuccacuuuuaucaggaggguggcacauucuacgcauauuucaccgauacuggggucguuacaaaauuucucuucaauguguaccugggaauggcccuuucacauuacuauguaaugccucugaccuguaucagucguagagacauuggcuuuacguuggaauacugggugaccccacucacaagcaggcaauaucuguuagcuuucaaccaggaugguaucauauuuaacgcagucgacugcaugucugacuucauguccgagauuaaguguaagacucagucaaucgccccgcccaccgggguguacgagcugaauggauauacaguucagccuauugcugauguguaccggcgcaaaccagaccuccccaacugcaauaucgaagccuggcuuaacgauaagagcgucccuaguccacugaauugggagagaaaaacuuuuucuaacuguaauuucaacauguccagcuugaugucguuuauccaagcggacucuuuuaccugcaauaacauugaugcagccaagauauauggcauguguuucuccucaaucacaauugacaaauucgcuauccccaauggcaggaagguggaucuacagcuggggaaccucggauaccugcagaguuuuaauuaccggauagacaccacugccacgagcugccagcuuuauuacaaccugccggcagcuaauguauccguuucucgcuucaacccuagcacauggaacaaacgauucgguuuuauugaaaauucaguguucaagccccaaccagccggcgucuugaccaaccacgauguggucuaugcgcagcacugcuuuaaggccccuaaaaauuucugucccugcaagcucaacaguucccuguguguggggagcggaccaggcaaaaauaacgguaucgggacuugccccgcaggcaccaauuacuuaacaugucauaaccugugcaauccugacccaaucaccuuuacuggaccguauaaguguccccagacaaaaucucuaguuggcauuggggagcacugcucaggacucgcugugaagagugauuacugugguggcaacccuugcacgugucaaccacaggccuuccugggguggagcgcugacuccugccuucagggagacaagugcaauaucuuugccaacuugauucugcaugauguaaauucuggccucaccuguucgacugaccugcagaaagcaaacacagauauaaaacuuggugucugcgugaauuaugaccuguacgggaucagcggccaaggaauuuucguugaggugaacgccaccuacuauaacuccuggcagaauuugcucuacgauucaaacggcaaucuguauggguuuagagacuacaucacaaacaggacuuucaugauccggaguuguuauucuggacgugucagcgcugcguuucacgcaaauuccucagaacccgccuuacuguuccgcaacauuaagugcaauuacguguuuaacaauagccuaauaagacagcuccagccuaucaacuauuucgauucuuaccuggguuguguagugaaugcuuacaacuccaccgccauuaguguucaaacgugcgaccuuaccgucggcagcggguauuguguggauuacucuaagaauaggcggucccgacgcgcaaucacaacuggauauagauucaccaacuuugagccauucacagugaauagcgucaacgacaguuuggaacccguuggcggucuguacgagauucagaucccgagcgaauuuacuauagggaacauggaggaguucauccagaccucguccccuaaagugacgauugauugcgccgcuuuuguguguggcgacuaugccgcaugcaagucucagcucguagaauacggaucauucugugauaauaucaacgcgauucugacagaggucaaugaauuacuggacaccacucaacuucagguggcuaacucauugaugaauggcguuacacucaguaccaagcugaaagacggggugaacuuuaaugucgaugacaucaacuucuccucugugcuaggaugccugggcagcgagugcuccaaggccucaagcaggagugcaauagaagaucuccuguuugacaaaguuaaacuuucugauguggguuucguagccgcuuauaauaacuguacugggggagccgagauucgggacuugaucugcguccaguccuacaagggcauuaaggugcugccacccuuacucagcgagaaucagaucucggguuacacccuggcagcuacaucagccucucuuuuuccucccuggacggcggccgcuggcgugccauucuaucugaacguccaauaccgcauaaauggguugggaguuaccauggaugugcucagucagaaccagaagcugaucgcaaaugccuucaacaaugcucuagacgccauucaagaaggcuuugaugcaacuaacuccgcgcugguaaaaauccaggccguggucaacgcuaaugccgaggcacucaacaaucugcuucagcaguugagcaacagauucggggcuauuucuagcucccugcaagaaaucuuaucaaggcucgacgcccuggaggcagaagcccagauagaucgucuuauuaauggacggcugacagcucuaaacgcguaugugagucagcagcucagcgacucuacccugguuaaguuuuccgccgcacaagcuauggagaaagugaaugagugugucaagucacagaguagccgaaucaacuucugcggcaaugguaaccacaucauuuccuuggugcagaaugccccuuacgggcuguauuuuauccauuucucuuacguucccacaaaauaugugacugccaaggucucgccaggauuauguauugcuggcgauagagguauagcaccgaaaagcggcuacuuuguaaacgugaauaacaccuggauguacacggggucaggauauuacuauccugaacccaucacagagaauaacguuguggucaugaguaccugcgccgugaacuacacuaaggcgccauauguaaugcucaauaccuccacacccaaccugccugacuucagggaggaacuugaccagugguuuaagaaucaaacuucuguggcuccagaucugagcuuggacuacauuaacgucaccuuccucgaucugcagguugagaugaaucgccuacaggaagccaucaaagugcugaaccaauccuauauuaaucuuaaggacaucggcacauacgaguacuaugugaaauggcccugguacgucuggcuccugauaggguuggcaggaguggccaugcugguuuuacucuuuuucaucuguugcuguacgggcugcgguaccucauguuuuaagaaaugcgggggaugcugugaugacuauacuggcuaccaggaacugguaauuaagacaucucacgaugacuga

SEQ ID NO: 15006 - RNA, 4089 nt, Artificial Sequence
  HCoV/OC43/1783A_10__AIL49484.1 spike protein CDS human (1-1362)(A1079P_L1080P)
auguuccugauccuccuuauuagccugcccaccgccuuugcugugauaggcgacuugaagugcccuuuagauuccagaacagggucucugaacaauaucgacacuggaccaccgucaauuaguacggcaaccgucgauguuacaaacggucuaggcacuuacuaugugcucgacaggguauaccugaauaccacacuuuuccugaacggguauuaccccaccagcggauccacuuaucggaauauggccuugaaaggcacagauaagcucucuacccugugguuuaaaccuccauuccugucggacuuuaucaacgguauuuucgcgaaggugaaaaauacgaaggucuuuaaggauggggugauguacucagaguuccccgcuaucacuauaggaagcaccuuuguuaacacaaguuauuccguggucgugcagccucgcacuaucaauucuacccaagacggcguaaacaaacuccagggcuuacuggaaguuagcgugugucaguacaauaugugcgaguacccacacacaauuugucaucccaaacuugggaaccacuucaaggaauuguggcauauggauaccggagucguguccugccuguauaagcgaaauuuuacguacgacgugaacgccacuuaucuauacuuccacuuuuaucaggaggguggcacauucuacgcauauuucaccgauacuggggucguuacaaaauuucucuucaauguguaccugggaauggcccuuucacauuacuauguaaugccucugaccuguaucagucguagagacauuggcuuuacguuggaauacugggugaccccacucacaagcaggcaauaucuguuagcuuucaaccaggaugguaucauauuuaacgcagucgacugcaugucugacuucauguccgagauuaaguguaagacucagucaaucgccccgcccaccgggguguacgagcugaauggauauacaguucagccuauugcugauguguaccggcgcaaaccagaccuccccaacugcaauaucgaagccuggcuuaacgauaagagcgucccuaguccacugaauugggagagaaaaacuuuuucuaacuguaauuucaacauguccagcuugaugucguuuauccaagcggacucuuuuaccugcaauaacauugaugcagccaagauauauggcauguguuucuccucaaucacaauugacaaauucgcuauccccaauggcaggaagguggaucuacagcuggggaaccucggauaccugcagaguuuuaauuaccggauagacaccacugccacgagcugccagcuuuauuacaaccugccggcagcuaauguauccguuucucgcuucaacccuagcacauggaacaaacgauucgguuuuauugaaaauucaguguucaagccccaaccagccggcgucuugaccaaccacgauguggucuaugcgcagcacugcuuuaaggccccuaaaaauuucugucccugcaagcucaacaguucccuguguguggggagcggaccaggcaaaaauaacgguaucgggacuugccccgcaggcaccaauuacuuaacaugucauaaccugugcaauccugacccaaucaccuuuacuggaccguauaaguguccccagacaaaaucucuaguuggcauuggggagcacugcucaggacucgcugugaagagugauuacugugguggcaacccuugcacgugucaaccacaggccuuccugggguggagcgcugacuccugccuucagggagacaagugcaauaucuuugccaacuugauucugcaugauguaaauucuggccucaccuguucgacugaccugcagaaagcaaacacagauauaaaacuuggugucugcgugaauuaugaccuguacgggaucagcggccaaggaauuuucguugaggugaacgccaccuacuauaacuccuggcagaauuugcucuacgauucaaacggcaaucuguauggguuuagagacuacaucacaaacaggacuuucaugauccggaguuguuauucuggacgugucagcgcugcguuucacgcaaauuccucagaacccgccuuacuguuccgcaacauuaagugcaauuacguguuuaacaauagccuaauaagacagcuccagccuaucaacuauuucgauucuuaccuggguuguguagugaaugcuuacaacuccaccgccauuaguguucaaacgugcgaccuuaccgucggcagcggguauuguguggauuacucuaagaauaggcggucccgacgcgcaaucacaacuggauauagauucaccaacuuugagccauucacagugaauagcgucaacgacaguuuggaacccguuggcggucuguacgagauucagaucccgagcgaauuuacuauagggaacauggaggaguucauccagaccucguccccuaaagugacgauugauugcgccgcuuuuguguguggcgacuaugccgcaugcaagucucagcucguagaauacggaucauucugugauaauaucaacgcgauucugacagaggucaaugaauuacuggacaccacucaacuucagguggcuaacucauugaugaauggcguuacacucaguaccaagcugaaagacggggugaacuuuaaugucgaugacaucaacuucuccucugugcuaggaugccugggcagcgagugcuccaaggccucaagcaggagugcaauagaagaucuccuguuugacaaaguuaaacuuucugauguggguuucguagccgcuuauaauaacuguacugggggagccgagauucgggacuugaucugcguccaguccuacaagggcauuaaggugcugccacccuuacucagcgagaaucagaucucggguuacacccuggcagcuacaucagccucucuuuuuccucccuggacggcggccgcuggcgugccauucuaucugaacguccaauaccgcauaaauggguugggaguuaccauggaugugcucagucagaaccagaagcugaucgcaaaugccuucaacaaugcucuagacgccauucaagaaggcuuugaugcaacuaacuccgcgcugguaaaaauccaggccguggucaacgcuaaugccgaggcacucaacaaucugcuucagcaguugagcaacagauucggggcuauuucuagcucccugcaagaaaucuuaucaaggcucgacccucccgaggccgaagcacagauagaucgucugauuaauggacggcuuacagcccugaacgcuuaugugagucagcagcuaagcgacucuacccucguuaaguuuuccgcggcccaagcaauggagaaagugaaugagugugucaagucacagaguagccgaaucaacuucugcggcaaugguaaccacaucauuucccuggugcagaaugcuccauacggguuguauuuuauccauuucucuuacguuccgacaaaauaugugacugccaaggucucgccuggacuguguauugccggcgauagagguauagcucccaaaagcggcuacuuuguaaacgugaauaacaccuggauguacacggggucaggauauuacuauccagaacccaucacagagaauaacguuguggucaugaguaccugcgcagugaacuacacuaaggccccuuauguaauguuaaauaccuccacaccaaaccuccccgacuucagggaggaacuggaccagugguuuaagaaucaaacuucuguggcgccugaucuuagccuggacuacauuaacgucaccuucuuggaucuccagguugagaugaaucgccugcaggaagcuaucaaagugcuaaaccaauccuauauuaaucugaaggacaucggcacauacgaguacuaugugaaauggccgugguacgucuggcuucucauagggcuggccggaguggcaauguugguucuguuauuuuucaucuguugcuguacgggcugcgguaccucauguuuuaagaaaugcgggggaugcugugaugacuauacuggcuaccaggaacucguaauuaagacaucucacgaugacuga

SEQ ID NO: 15007 - RNA, 3864 nt, Artificial Sequence
  HCoV/OC43/1783A_10__AIL49484.1 spike protein CDS human (variant)
auguuccugauccuccuuauuagccugcccaccgccuuugcugugauaggcgacuugaagugcccuuuagauuccagaacagggucucugaacaauaucgacacuggaccaccgucaauuaguacggcaaccgucgauguuacaaacggucuaggcacuuacuaugugcucgacaggguauaccugaauaccacacuuuuccugaacggguauuaccccaccagcggauccacuuaucggaauauggccuugaaaggcacagauaagcucucuacccugugguuuaaaccuccauuccugucggacuuuaucaacgguauuuucgcgaaggugaaaaauacgaaggucuuuaaggauggggugauguacucagaguuccccgcuaucacuauaggaagcaccuuuguuaacacaaguuauuccguggucgugcagccucgcacuaucaauucuacccaagacggcguaaacaaacuccagggcuuacuggaaguuagcgugugucaguacaauaugugcgaguacccacacacaauuugucaucccaaacuugggaaccacuucaaggaauuguggcauauggauaccggagucguguccugccuguauaagcgaaauuuuacguacgacgugaacgccacuuaucuauacuuccacuuuuaucaggaggguggcacauucuacgcauauuucaccgauacuggggucguuacaaaauuucucuucaauguguaccugggaauggcccuuucacauuacuauguaaugccucugaccuguaucagucguagagacauuggcuuuacguuggaauacugggugaccccacucacaagcaggcaauaucuguuagcuuucaaccaggaugguaucauauuuaacgcagucgacugcaugucugacuucauguccgagauuaaguguaagacucagucaaucgccccgcccaccgggguguacgagcugaauggauauacaguucagccuauugcugauguguaccggcgcaaaccagaccuccccaacugcaauaucgaagccuggcuuaacgauaagagcgucccuaguccacugaauugggagagaaaaacuuuuucuaacuguaauuucaacauguccagcuugaugucguuuauccaagcggacucuuuuaccugcaauaacauugaugcagccaagauauauggcauguguuucuccucaaucacaauugacaaauucgcuauccccaauggcaggaagguggaucuacagcuggggaaccucggauaccugcagaguuuuaauuaccggauagacaccacugccacgagcugccagcuuuauuacaaccugccggcagcuaauguauccguuucucgcuucaacccuagcacauggaacaaacgauucgguuuuauugaaaauucaguguucaagccccaaccagccggcgucuugaccaaccacgauguggucuaugcgcagcacugcuuuaaggccccuaaaaauuucugucccugcaagcucaacaguucccuguguguggggagcggaccaggcaaaaauaacgguaucgggacuugccccgcaggcaccaauuacuuaacaugucauaaccugugcaauccugacccaaucaccuuuacuggaccguauaaguguccccagacaaaaucucuaguuggcauuggggagcacugcucaggacucgcugugaagagugauuacugugguggcaacccuugcacgugucaaccacaggccuuccugggguggagcgcugacuccugccuucagggagacaagugcaauaucuuugccaacuugauucugcaugauguaaauucuggccucaccuguucgacugaccugcagaaagcaaacacagauauaaaacuuggugucugcgugaauuaugaccuguacgggaucagcggccaaggaauuuucguugaggugaacgccaccuacuauaacuccuggcagaauuugcucuacgauucaaacggcaaucuguauggguuuagagacuacaucacaaacaggacuuucaugauccggaguuguuauucuggacgugucagcgcugcguuucacgcaaauuccucagaacccgccuuacuguuccgcaacauuaagugcaauuacguguuuaacaauagccuaauaagacagcuccagccuaucaacuauuucgauucuuaccuggguuguguagugaaugcuuacaacuccaccgccauuaguguucaaacgugcgaccuuaccgucggcagcggguauuguguggauuacucuaagaauggaggcuccgguucagcaaucacaacuggguauagguucaccaacuuugagccauucacagugaauagugucaacgacagcuuggaacccguuggcggacuguacgagauucagaucccgucggaauuuacuauaggcaacauggaggaguucauccagaccuccucuccuaaagugacgauugauugcgccgcuuuuguguguggggacuaugccgcaugcaagagccagcucguagaauacggaucauucugugauaauaucaacgcgauucugacagaggucaaugaauuacuggacaccacucaacuucagguggcuaacaguuugaugaauggcguuacacucuccaccaagcugaaagacggugugaacuuuaaugucgaugacaucaacuucucuagcgugcuagggugccugggauccgagugcucaaaggccagcagucggucugcaauagaagaucuccuguuugacaaaguuaaacuuuccgaugugggcuucguagccgcuuauaauaacuguacugguggcgccgagauucgagacuugaucugcguccagagcuacaaggggauuaaggugcugccacccuuacucucggagaaucagaucucaggauacacccuggcagcuacaucugccagucuuuuuccucccuggacggcggccgcuggcgugccauucuaucugaacguccaauaccgcauaaauggguugggaguuaccauggaugugcucucccagaaccagaagcugaucgcaaaugccuucaacaaugcucuagacgccauucaagaaggcuuugaugcaacuaacagcgcgcugguaaaaauccaggccguggucaacgcuaaugccgaggcacucaacaaucugcuucagcaguugucuaacagauucggugcuauuagcuccucacugcaagaaaucuuaaguaggcucgacccucccgaggccgaagcacagauagaucggcugauuaaugggcgccuuacagcccugaacgcuuaugugagccagcagcuaucugacuccacccucguuaaguuuucagcggcccaagcaauggagaaagugaaugagugugucaagagucagagcuccagaaucaacuucugcggaaauggcaaccacaucauuucucuggugcagaaugcuccauacgguuuguauuuuauccauuucucguacguuccgacaaaauaugugacugccaaggucagcccuggccuguguauugccggggauaggggaauagcucccaaaucaggcuacuuuguaaacgugaauaacaccuggauguacacgggguccggauauuacuauccagaacccaucacagagaauaacguuguggucaugaguaccugcgcagugaacuacacuaaggccccuuauguaauguuaaauaccucuacaccaaaccuccccgacuuccgugaggaacuggaccagugguuuaagaaucaaacuagcguggcgccugaucuuucccuggacuacauuaacgucaccuucuuggaucuccagguugagaugaaucggcugcaggaagcuaucaaagugcuaaacuga

SEQ ID NO: 15008 - RNA, 3945 nt, Artificial Sequence
  HCoV/OC43/1783A_10__AIL49484.1 spike protein CDS human (variant)
auguuccugauccuccuuauuagccugcccaccgccuuugcugugauaggcgacuugaagugcccuuuagauuccagaacagggucucugaacaauaucgacacuggaccaccgucaauuaguacggcaaccgucgauguuacaaacggucuaggcacuuacuaugugcucgacaggguauaccugaauaccacacuuuuccugaacggguauuaccccaccagcggauccacuuaucggaauauggccuugaaaggcacagauaagcucucuacccugugguuuaaaccuccauuccugucggacuuuaucaacgguauuuucgcgaaggugaaaaauacgaaggucuuuaaggauggggugauguacucagaguuccccgcuaucacuauaggaagcaccuuuguuaacacaaguuauuccguggucgugcagccucgcacuaucaauucuacccaagacggcguaaacaaacuccagggcuuacuggaaguuagcgugugucaguacaauaugugcgaguacccacacacaauuugucaucccaaacuugggaaccacuucaaggaauuguggcauauggauaccggagucguguccugccuguauaagcgaaauuuuacguacgacgugaacgccacuuaucuauacuuccacuuuuaucaggaggguggcacauucuacgcauauuucaccgauacuggggucguuacaaaauuucucuucaauguguaccugggaauggcccuuucacauuacuauguaaugccucugaccuguaucagucguagagacauuggcuuuacguuggaauacugggugaccccacucacaagcaggcaauaucuguuagcuuucaaccaggaugguaucauauuuaacgcagucgacugcaugucugacuucauguccgagauuaaguguaagacucagucaaucgccccgcccaccgggguguacgagcugaauggauauacaguucagccuauugcugauguguaccggcgcaaaccagaccuccccaacugcaauaucgaagccuggcuuaacgauaagagcgucccuaguccacugaauugggagagaaaaacuuuuucuaacuguaauuucaacauguccagcuugaugucguuuauccaagcggacucuuuuaccugcaauaacauugaugcagccaagauauauggcauguguuucuccucaaucacaauugacaaauucgcuauccccaauggcaggaagguggaucuacagcuggggaaccucggauaccugcagaguuuuaauuaccggauagacaccacugccacgagcugccagcuuuauuacaaccugccggcagcuaauguauccguuucucgcuucaacccuagcacauggaacaaacgauucgguuuuauugaaaauucaguguucaagccccaaccagccggcgucuugaccaaccacgauguggucuaugcgcagcacugcuuuaaggccccuaaaaauuucugucccugcaagcucaacaguucccuguguguggggagcggaccaggcaaaaauaacgguaucgggacuugccccgcaggcaccaauuacuuaacaugucauaaccugugcaauccugacccaaucaccuuuacuggaccguauaaguguccccagacaaaaucucuaguuggcauuggggagcacugcucaggacucgcugugaagagugauuacugugguggcaacccuugcacgugucaaccacaggccuuccugggguggagcgcugacuccugccuucagggagacaagugcaauaucuuugccaacuugauucugcaugauguaaauucuggccucaccuguucgacugaccugcagaaagcaaacacagauauaaaacuuggugucugcgugaauuaugaccuguacgggaucagcggccaaggaauuuucguugaggugaacgccaccuacuauaacuccuggcagaauuugcucuacgauucaaacggcaaucuguauggguuuagagacuacaucacaaacaggacuuucaugauccggaguuguuauucuggacgugucagcgcugcguuucacgcaaauuccucagaacccgccuuacuguuccgcaacauuaagugcaauuacguguuuaacaauagccuaauaagacagcuccagccuaucaacuauuucgauucuuaccuggguuguguagugaaugcuuacaacuccaccgccauuaguguucaaacgugcgaccuuaccgucggcagcggguauuguguggauuacucuaagaauggaggcuccgguucagcaaucacaacuggguauagguucaccaacuuugagccauucacagugaauagugucaacgacagcuuggaacccguuggcggacuguacgagauucagaucccgucggaauuuacuauaggcaacauggaggaguucauccagaccuccucuccuaaagugacgauugauugcgccgcuuuuguguguggggacuaugccgcaugcaagagccagcucguagaauacggaucauucugugauaauaucaacgcgauucugacagaggucaaugaauuacuggacaccacucaacuucagguggcuaacaguuugaugaauggcguuacacucuccaccaagcugaaagacggugugaacuuuaaugucgaugacaucaacuucucuagcgugcuagggugccugggauccgagugcucaaaggccagcagucggucugcaauagaagaucuccuguuugacaaaguuaaacuuuccgaugugggcuucguagccgcuuauaauaacuguacugguggcgccgagauucgagacuugaucugcguccagagcuacaaggggauuaaggugcugccacccuuacucucggagaaucagaucucaggauacacccuggcagcuacaucugccagucuuuuuccucccuggacggcggccgcuggcgugccauucuaucugaacguccaauaccgcauaaauggguugggaguuaccauggaugugcucucccagaaccagaagcugaucgcaaaugccuucaacaaugcucuagacgccauucaagaaggcuuugaugcaacuaacagcgcgcugguaaaaauccaggccguggucaacgcuaaugccgaggcacucaacaaucugcuucagcaguugucuaacagauucggugcuauuagcuccucacugcaagaaaucuuaaguaggcucgacccucccgaggccgaagcacagauagaucggcugauuaaugggcgccuuacagcccugaacgcuuaugugagccagcagcuaucugacuccacccucguuaaguuuucagcggcccaagcaauggagaaagugaaugagugugucaagagucagagcuccagaaucaacuucugcggaaauggcaaccacaucauuucucuggugcagaaugcuccauacgguuuguauuuuauccauuucucguacguuccgacaaaauaugugacugccaaggucagcccuggccuguguauugccggggauaggggaauagcucccaaaucaggcuacuuuguaaacgugaauaacaccuggauguacacgggguccggauauuacuauccagaacccaucacagagaauaacguuguggucaugaguaccugcgcagugaacuacacuaaggccccuuauguaauguuaaauaccucuacaccaaaccuccccgacuuccgugaggaacuggaccagugguuuaagaaucaaacuagcguggcgccugaucuuucccuggacuacauuaacgucaccuucuuggaucuccagguugagaugaaucggcugcaggaagcuaucaaagugcuaaacggcgguuauauuccggaggccccacgagacgggcaagcauacgugagaaaggauggagaauggguccugcuuucaacauuuuga

SEQ ID NO: 15009 - RNA, 4056 nt, Artificial Sequence
  HCoV/HKU1/N5__Q0ZME7.1 spike protein CDS human (1-1351)
auguuccugaucauuuuuauacuccccaccacacuugccgugaucggcgacuucaacugcacuaauagcuuuauuaacgauuacaauaagacgaucccuagaauuuccgaggacgucguugaugugucucugggguugggaaccuauuacguauuaaacaggguguaucugaauacaacucuacucuucaccgguuacuuuccaaaaucaggcgcuaacuuccgggaccuggcacuuaaggggaguaucuaucugagcacauugugguacaaaccgcccuuucucuccgauuucaauaacggaauauuuucuaaggucaaaaauaccaagcuguaugugaacaauacucuguacucggaguucucaacaaucguuauuggcagcguguuugucaacaccaguuacacgaucgugguacagccucacaaugguauucucgaaaucacugccugucaauauaccaugugcgaauacccacauacaguuuguaaguccaaagggucuauacgcaacgagagcuggcacauugacuccucagaacccuuaugccuguucaagaaaaauuuuacuuauaacgugagugcggauuggcuuuacuuccauuucuaucaggagcgaggagucuuuuacgcuuauuacgccgacgugggcaugccuaccacauucuuguuuagccuguaccuaggcaccauccucucucacuauuacgugaugccacugacguguaacgcaauuuccucaaauacugauaacgagacacuugaauauugggucacuccccugagccguagacaguacuugcucaauuucgacgagcaugggguuaucaccaacgccguggauugcaguucuuccuuucugagcgaaauccaguguaagacacaaucguucgcuccuaauaccggaguauaugacuuaucugguuuuacggugaaaccagucgcaaccguguacaggcggauuccgaaccugcccgauugcgacauagacaauuggcucaacaauguuuccgugccuucaccacuuaacugggagcgcagaaucuucaguaauuguaacuuuaaucugagcacauugcuaaggcugguccacguggauuccuucucuugcaacaaucucgacaagagcaagauuuuuggcucauguuucaacaguaucacuguagauaaauuugccauacccaaccggcgccgagacgaucugcagcuuggguccagcggauuccugcagucuucaaauuauaagauugacaucaguagcuccucuugccaguuguacuacucgcucccucugguuaacgugaccaucaauaacuucaauccaagcuccuggaacagaagguauggcuuugguucauucaauuuaaguucuuacgaugucguguauagcgaccacugcuuuuccgucaacucagauuucugucccugcgcugacccgagcgugguuaauucuugugccaaauccaagccucccagugcgauuugcccagcagggacaaaauaccggcauugugaucuggacacuacccuauaugugaagaacuggugccguuguagcugccucccugaccccaucucuacauacuccccaaauaccuguccccaaaagaagguagucgugggaauuggcgagcacugcccuggccuggggauaaacgaagagaaguguggaacucagcuuaaucauucaaguugcuuuugcagcccagaugccuucuuggguuggucguuugacuccuguaucucuaacaaucgcugcaacauuuucagcaacuuuaucuucaauggcaucaacucagggacgacauguaguaaugaucugcucuauuccaacaccgaaauuucuacuggaguuugcgugaauuacgaccuguacggcauaaccggucaggggaucuuuaaagaggucagcgcugccuauuacaacaauuggcagaaccuucuguaugauuccaauggcaacauuaucggauucaaggacuuuuugacaaauaaaaccuacacuauucucccguguuauucaggcagagugagcgcagcuuucuaccaaaacaguucuucccccgcccuguuauauaggaaucugaagugcagcuacguacuaaacaauaucucguucauaucacagccuuuuuacuucgauucuuaucucgggugugugcugaacgcgguuaaccuuacaaguuacuccgucagcucuugcgacuugcggaugggaagcgguuuuuguaucgauuaugcccugccauccucacgacgcaaaagaaggggcauuaguagccccuaccgguucgugacguuugaaccuuucaaugugucuuuugucaacgacuccguugagaccguagggggacucuucgagauccagauuccaacuaauuuuacaaucgcaggccacgaagaguucauacaaaccucaagucccaaggugacaauugauugcagcgcuuuuguguguuccaacuaugccgcuugccacgaccuguuaucugaauacgguacuuucugcgauaauaucaacucgauucugaaugaggucaacgaccuuuuggacaucacccagcuccagguggccaaugcacugaugcaggggguuacgcuaagcucaaaccugaauaccaaccuccauuccgauguggacaauauagauuucaagagucugcuuggcuguuugggaucucaaugcggcagcuccucacgcucucuguuagaagaccuccuguuuaacaaagucaaacuuagcgaugugggguucguugaggccuauaauaacuguacaggagguagugagaucagagaccuguugugcgugcaguccuuuaauggcauuaaaguacucccgccuauccugagcgaaacucagauuucuggguacaccacagcugcgacugucgcagccauguucccacccuggucagcugccgcaggagugccuuuuucccuaaacgugcaguacaggaucaacggccugggugucaccauggauguucucaauaagaaccaaaaacugauagccaaugcuuucaacaaggcccuuuugaguauucagaauggguuuacggcaacaaacagcgcgcuggcuaagauccagucggugguaaaugccaacgcacaggccuuaaauucucuccugcaacagcuuuucaacaaauuuggcgcuaucuccagcucacugcaggagauucuaagucgucucgacaaucuggaagcccaggugcaaaucgaucgguugauuaacggacgacugaccgcauuaaaugcuuaugucucucagcagcucuccgacauaacucugaucaaggccggcgcgagcagagccauugagaaagugaacgaauguguuaagucacaaagucccaggaucaauuucugcgggaacggaaaccacauucuuagccuggugcagaaugcuccauacggcuugcucuuuauccauuucuccuauaaaccuacaucuuuuaagaccguccuggugagccccggucuaugucuguccggggaucgcggaauagcaccaaagcagggcuacuucaucaaacagaacgacucauggauguucacugguucuaguuauuacuauccggagccuauuucggauaagaauguuguguuuaugaacagcugcuccgucaauuucaccaaagcccccuuuaucuaccuuaacaauucuauuccaaaccucucagacuucgaggcugaacugagcuugugguuuaagaaucacacauccaucgcccccaaccugacguucaauagucauauaaacgcaaccuuuuuagaccucuacuaugagaugaauguaauucaagaaucuaucaaaagccugaacucauccuucaucaaucuuaaggagauuggcacuuacgagauguaugugaaauggccuugguacauauggcuguugaucguuauucucuuuaucauuuuccugaugauccuauuuuucauauguugcuguacagggugcggaagugcgugcuuuagcaagugucacaacugcugugaugaauauggcgggcacaacgacuucgugaucaaggccucucaugaugacuga

SEQ ID NO: 15010 - RNA, 4056 nt, Artificial Sequence
  HCoV/HKU1/N5__Q0ZME7.1 spike protein CDS human (1-1351)(N1067P_L1068P)
auguuccugaucauuuuuauacuccccaccacacuugccgugaucggcgacuucaacugcacuaauagcuuuauuaacgauuacaauaagacgaucccuagaauuuccgaggacgucguugaugugucucugggguugggaaccuauuacguauuaaacaggguguaucugaauacaacucuacucuucaccgguuacuuuccaaaaucaggcgcuaacuuccgggaccuggcacuuaaggggaguaucuaucugagcacauugugguacaaaccgcccuuucucuccgauuucaauaacggaauauuuucuaaggucaaaaauaccaagcuguaugugaacaauacucuguacucggaguucucaacaaucguuauuggcagcguguuugucaacaccaguuacacgaucgugguacagccucacaaugguauucucgaaaucacugccugucaauauaccaugugcgaauacccacauacaguuuguaaguccaaagggucuauacgcaacgagagcuggcacauugacuccucagaacccuuaugccuguucaagaaaaauuuuacuuauaacgugagugcggauuggcuuuacuuccauuucuaucaggagcgaggagucuuuuacgcuuauuacgccgacgugggcaugccuaccacauucuuguuuagccuguaccuaggcaccauccucucucacuauuacgugaugccacugacguguaacgcaauuuccucaaauacugauaacgagacacuugaauauugggucacuccccugagccguagacaguacuugcucaauuucgacgagcaugggguuaucaccaacgccguggauugcaguucuuccuuucugagcgaaauccaguguaagacacaaucguucgcuccuaauaccggaguauaugacuuaucugguuuuacggugaaaccagucgcaaccguguacaggcggauuccgaaccugcccgauugcgacauagacaauuggcucaacaauguuuccgugccuucaccacuuaacugggagcgcagaaucuucaguaauuguaacuuuaaucugagcacauugcuaaggcugguccacguggauuccuucucuugcaacaaucucgacaagagcaagauuuuuggcucauguuucaacaguaucacuguagauaaauuugccauacccaaccggcgccgagacgaucugcagcuuggguccagcggauuccugcagucuucaaauuauaagauugacaucaguagcuccucuugccaguuguacuacucgcucccucugguuaacgugaccaucaauaacuucaauccaagcuccuggaacagaagguauggcuuugguucauucaauuuaaguucuuacgaugucguguauagcgaccacugcuuuuccgucaacucagauuucugucccugcgcugacccgagcgugguuaauucuugugccaaauccaagccucccagugcgauuugcccagcagggacaaaauaccggcauugugaucuggacacuacccuauaugugaagaacuggugccguuguagcugccucccugaccccaucucuacauacuccccaaauaccuguccccaaaagaagguagucgugggaauuggcgagcacugcccuggccuggggauaaacgaagagaaguguggaacucagcuuaaucauucaaguugcuuuugcagcccagaugccuucuuggguuggucguuugacuccuguaucucuaacaaucgcugcaacauuuucagcaacuuuaucuucaauggcaucaacucagggacgacauguaguaaugaucugcucuauuccaacaccgaaauuucuacuggaguuugcgugaauuacgaccuguacggcauaaccggucaggggaucuuuaaagaggucagcgcugccuauuacaacaauuggcagaaccuucuguaugauuccaauggcaacauuaucggauucaaggacuuuuugacaaauaaaaccuacacuauucucccguguuauucaggcagagugagcgcagcuuucuaccaaaacaguucuucccccgcccuguuauauaggaaucugaagugcagcuacguacuaaacaauaucucguucauaucacagccuuuuuacuucgauucuuaucucgggugugugcugaacgcgguuaaccuuacaaguuacuccgucagcucuugcgacuugcggaugggaagcgguuuuuguaucgauuaugcccugccauccucacgacgcaaaagaaggggcauuaguagccccuaccgguucgugacguuugaaccuuucaaugugucuuuugucaacgacuccguugagaccguagggggacucuucgagauccagauuccaacuaauuuuacaaucgcaggccacgaagaguucauacaaaccucaagucccaaggugacaauugauugcagcgcuuuuguguguuccaacuaugccgcuugccacgaccuguuaucugaauacgguacuuucugcgauaauaucaacucgauucugaaugaggucaacgaccuuuuggacaucacccagcuccagguggccaaugcacugaugcaggggguuacgcuaagcucaaaccugaauaccaaccuccauuccgauguggacaauauagauuucaagagucugcuuggcuguuugggaucucaaugcggcagcuccucacgcucucuguuagaagaccuccuguuuaacaaagucaaacuuagcgaugugggguucguugaggccuauaauaacuguacaggagguagugagaucagagaccuguugugcgugcaguccuuuaauggcauuaaaguacucccgccuauccugagcgaaacucagauuucuggguacaccacagcugcgacugucgcagccauguucccacccuggucagcugccgcaggagugccuuuuucccuaaacgugcaguacaggaucaacggccugggugucaccauggauguucucaauaagaaccaaaaacugauagccaaugcuuucaacaaggcccuuuugaguauucagaauggguuuacggcaacaaacagcgcgcuggcuaagauccagucggugguaaaugccaacgcacaggccuuaaauucucuccugcaacagcuuuucaacaaauuuggcgcuaucuccagcucacugcaggagauucuaagucgucucgaucccccagaagcccaggugcaaaucgaccggcugauuaauggacgauugaccgcacugaacgcuuaugucucucagcaguuauccgacauaacucucaucaaggccggcgcgagcagagccauugagaaagugaaugaauguguuaagucacaaaguccuaggaucaacuucugcgggaauggaaaccacauucugagccuugugcagaacgcucccuacggccuguuguuuauccauuucuccuauaaaccaacaucuuuuaagaccguccucgugagcccgggucugugucuauccggggaucgcggaauagcaccuaagcagggcuacuucaucaaacagaaugacucauggauguucacugguucuaguuauuacuaucccgagccaauuucggauaagaacguuguguuuaugaauagcugcuccgucaacuucaccaaagcccccuuuaucuaccugaauaacucuauuccuaaucuuucagacuucgaggcugaacucagccugugguuuaagaaccacacauccaucgccccaaauuugacguucaacagucauauaaaugcaaccuuucuggacuuauacuaugagaugaacguaauucaagaaucuaucaaaagccucaauucauccuucaucaaccugaaggagauuggcacuuacgagauguaugugaaauggcccugguacauauggcuucugaucguuauuuuguuuaucauuuuccucaugauccuguuuuucauauguugcuguacagggugcggaagugcgugcuuuagcaagugucacaauugcugugaugaauauggcgggcacaacgacuucgugaucaaggccucucaugaugacuga

SEQ ID NO: 15011 - RNA, 3831 nt, Artificial Sequence
  HCoV/HKU1/N5__Q0ZME7.1 spike protein CDS human (variant)
auguuccugaucauuuuuauacuccccaccacacuugccgugaucggcgacuucaacugcacuaauagcuuuauuaacgauuacaauaagacgaucccuagaauuuccgaggacgucguugaugugucucugggguugggaaccuauuacguauuaaacaggguguaucugaauacaacucuacucuucaccgguuacuuuccaaaaucaggcgcuaacuuccgggaccuggcacuuaaggggaguaucuaucugagcacauugugguacaaaccgcccuuucucuccgauuucaauaacggaauauuuucuaaggucaaaaauaccaagcuguaugugaacaauacucuguacucggaguucucaacaaucguuauuggcagcguguuugucaacaccaguuacacgaucgugguacagccucacaaugguauucucgaaaucacugccugucaauauaccaugugcgaauacccacauacaguuuguaaguccaaagggucuauacgcaacgagagcuggcacauugacuccucagaacccuuaugccuguucaagaaaaauuuuacuuauaacgugagugcggauuggcuuuacuuccauuucuaucaggagcgaggagucuuuuacgcuuauuacgccgacgugggcaugccuaccacauucuuguuuagccuguaccuaggcaccauccucucucacuauuacgugaugccacugacguguaacgcaauuuccucaaauacugauaacgagacacuugaauauugggucacuccccugagccguagacaguacuugcucaauuucgacgagcaugggguuaucaccaacgccguggauugcaguucuuccuuucugagcgaaauccaguguaagacacaaucguucgcuccuaauaccggaguauaugacuuaucugguuuuacggugaaaccagucgcaaccguguacaggcggauuccgaaccugcccgauugcgacauagacaauuggcucaacaauguuuccgugccuucaccacuuaacugggagcgcagaaucuucaguaauuguaacuuuaaucugagcacauugcuaaggcugguccacguggauuccuucucuugcaacaaucucgacaagagcaagauuuuuggcucauguuucaacaguaucacuguagauaaauuugccauacccaaccggcgccgagacgaucugcagcuuggguccagcggauuccugcagucuucaaauuauaagauugacaucaguagcuccucuugccaguuguacuacucgcucccucugguuaacgugaccaucaauaacuucaauccaagcuccuggaacagaagguauggcuuugguucauucaauuuaaguucuuacgaugucguguauagcgaccacugcuuuuccgucaacucagauuucugucccugcgcugacccgagcgugguuaauucuugugccaaauccaagccucccagugcgauuugcccagcagggacaaaauaccggcauugugaucuggacacuacccuauaugugaagaacuggugccguuguagcugccucccugaccccaucucuacauacuccccaaauaccuguccccagaaaaagguagucgugggaauuggcgagcacugcccuggccuggggauaaacgaagagaaguguggaacucaacuuaaucauucaaguugcuuuugcagcccagaugccuucuuggguuggucguuugacuccuguaucucuaacaaucgcugcaacauuuucagcaacuuuaucuucaauggcaucaacucagggacgacauguaguaaugaucugcucuauuccaacaccgaaauuucuacuggaguuugcgugaauuacgaccuguacggcauaaccggucaggggaucuuuaaagaggucagcgcugccuauuacaacaauuggcagaaccuucuguaugauuccaauggcaacauuaucggauucaaggacuuuuugacaaauaaaaccuacacuauucucccguguuauucaggcagagugagcgcagcuuucuaccaaaacaguucuucccccgcccuguuauauaggaaucugaagugcagcuacguacuaaacaauaucucguucauaucacagccuuuuuacuucgauucuuaucucgggugugugcugaacgcgguuaaccuuacaaguuacuccgucagcucuugcgacuugcggaugggaagcgguuuuuguaucgauuaugcccugccauccucaggcgggaguggaagcggcauuucuucccccuaccgauucgugacguuugaaccuuucaaugugucauuugucaacgacaguguugagaccguggguggccucuucgagauccagauuccaacuaauuuuacaaucgcagggcacgaagaguucauacaaaccagcucccccaaagugacaauugauugcucugcuuuuguauguucgaacuaugccgcuugccacgaccuguuaagcgaauacggaacuuucugcgauaauaucaacucaauucugaaugaggucaacgaccuuuuggacaucacccagcuccagguggccaaugcacugaugcagggcguuacgcuauccaguaaccugaauaccaaccuccauucugauguggacaauauagauuucaagagccugcuuggguguuugggaucccaaugcgguucaucuagccgcagucuguuagaagaccuccuguuuaacaaggucaaacuuuccgaugugggcuucguugaggccuauaauaacuguacagggggaagcgagaucagagaccuguugugcgugcagucuuuuaauggcauuaagguacucccgccuauccugucagaaacucagauuuccgguuacaccacagcugcgacugucgcagccauguucccacccuggagugcugccgcaggggugccuuuuagccuaaacgugcaguacaggaucaacggccugggagucaccauggauguucucaauaaaaaccaaaagcugauagccaaugcuuucaacaaagcccuuuugucgauucagaauggcuuuacggcaacaaacucugcgcuggcuaagauccaguccgugguaaaugccaacgcacaggccuuaaauagccuccugcaacagcuuuucaacaaguuuggggcuaucucaaguucucugcaggagauucuaucccggcucgaucccccagaagcccaggugcaaaucgaccgccugauuaauggaagauugaccgcacugaacgcuuaugucagccagcaguuaucagacauaacucucaucaaagccggcgcgaguagggccauugagaaggugaaugaauguguuaaaagccaauccccucguaucaacuucugcgguaaugggaaccacauucugucucuugugcagaacgcucccuacggacuguuguuuauccauuucagcuauaagccaacauccuuuaaaaccguccucgugucaccgggccugugucuaucuggugaucggggcauagcaccuaagcagggguacuucaucaagcagaaugacaguuggauguucacuggaucgagcuauuacuaucccgagccaauuuccgauaaaaacguuguguuuaugaacucuugcucagucaauuucaccaaggcccccuuuaucuaccugaauaacagcauuccuaaucuuuccgacuucgaggcugaacucagucugugguuuaaaaaccacacaucuaucgccccaaauuugacguucaacagccauauaaaugcaaccuuucuggacuuauacuaugagaugaacguaauucaagaaucaaucaagucccucaauuga

SEQ ID NO: 15012 - RNA, 3912 nt, Artificial Sequence
  HCoV/HKU1/N5__Q0ZME7.1 spike protein CDS human (variant)
auguuccugaucauuuuuauacuccccaccacacuugccgugaucggcgacuucaacugcacuaauagcuuuauuaacgauuacaauaagacgaucccuagaauuuccgaggacgucguugaugugucucugggguugggaaccuauuacguauuaaacaggguguaucugaauacaacucuacucuucaccgguuacuuuccaaaaucaggcgcuaacuuccgggaccuggcacuuaaggggaguaucuaucugagcacauugugguacaaaccgcccuuucucuccgauuucaauaacggaauauuuucuaaggucaaaaauaccaagcuguaugugaacaauacucuguacucggaguucucaacaaucguuauuggcagcguguuugucaacaccaguuacacgaucgugguacagccucacaaugguauucucgaaaucacugccugucaauauaccaugugcgaauacccacauacaguuuguaaguccaaagggucuauacgcaacgagagcuggcacauugacuccucagaacccuuaugccuguucaagaaaaauuuuacuuauaacgugagugcggauuggcuuuacuuccauuucuaucaggagcgaggagucuuuuacgcuuauuacgccgacgugggcaugccuaccacauucuuguuuagccuguaccuaggcaccauccucucucacuauuacgugaugccacugacguguaacgcaauuuccucaaauacugauaacgagacacuugaauauugggucacuccccugagccguagacaguacuugcucaauuucgacgagcaugggguuaucaccaacgccguggauugcaguucuuccuuucugagcgaaauccaguguaagacacaaucguucgcuccuaauaccggaguauaugacuuaucugguuuuacggugaaaccagucgcaaccguguacaggcggauuccgaaccugcccgauugcgacauagacaauuggcucaacaauguuuccgugccuucaccacuuaacugggagcgcagaaucuucaguaauuguaacuuuaaucugagcacauugcuaaggcugguccacguggauuccuucucuugcaacaaucucgacaagagcaagauuuuuggcucauguuucaacaguaucacuguagauaaauuugccauacccaaccggcgccgagacgaucugcagcuuggguccagcggauuccugcagucuucaaauuauaagauugacaucaguagcuccucuugccaguuguacuacucgcucccucugguuaacgugaccaucaauaacuucaauccaagcuccuggaacagaagguauggcuuugguucauucaauuuaaguucuuacgaugucguguauagcgaccacugcuuuuccgucaacucagauuucugucccugcgcugacccgagcgugguuaauucuugugccaaauccaagccucccagugcgauuugcccagcagggacaaaauaccggcauugugaucuggacacuacccuauaugugaagaacuggugccguuguagcugccucccugaccccaucucuacauacuccccaaauaccuguccccagaaaaagguagucgugggaauuggcgagcacugcccuggccuggggauaaacgaagagaaguguggaacucaacuuaaucauucaaguugcuuuugcagcccagaugccuucuuggguuggucguuugacuccuguaucucuaacaaucgcugcaacauuuucagcaacuuuaucuucaauggcaucaacucagggacgacauguaguaaugaucugcucuauuccaacaccgaaauuucuacuggaguuugcgugaauuacgaccuguacggcauaaccggucaggggaucuuuaaagaggucagcgcugccuauuacaacaauuggcagaaccuucuguaugauuccaauggcaacauuaucggauucaaggacuuuuugacaaauaaaaccuacacuauucucccguguuauucaggcagagugagcgcagcuuucuaccaaaacaguucuucccccgcccuguuauauaggaaucugaagugcagcuacguacuaaacaauaucucguucauaucacagccuuuuuacuucgauucuuaucucgggugugugcugaacgcgguuaaccuuacaaguuacuccgucagcucuugcgacuugcggaugggaagcgguuuuuguaucgauuaugcccugccauccucaggcgggaguggaagcggcauuucuucccccuaccgauucgugacguuugaaccuuucaaugugucauuugucaacgacaguguugagaccguggguggccucuucgagauccagauuccaacuaauuuuacaaucgcagggcacgaagaguucauacaaaccagcucccccaaagugacaauugauugcucugcuuuuguauguucgaacuaugccgcuugccacgaccuguuaagcgaauacggaacuuucugcgauaauaucaacucaauucugaaugaggucaacgaccuuuuggacaucacccagcuccagguggccaaugcacugaugcagggcguuacgcuauccaguaaccugaauaccaaccuccauucugauguggacaauauagauuucaagagccugcuuggguguuugggaucccaaugcgguucaucuagccgcagucuguuagaagaccuccuguuuaacaaggucaaacuuuccgaugugggcuucguugaggccuauaauaacuguacagggggaagcgagaucagagaccuguugugcgugcagucuuuuaauggcauuaagguacucccgccuauccugucagaaacucagauuuccgguuacaccacagcugcgacugucgcagccauguucccacccuggagugcugccgcaggggugccuuuuagccuaaacgugcaguacaggaucaacggccugggagucaccauggauguucucaauaaaaaccaaaagcugauagccaaugcuuucaacaaagcccuuuugucgauucagaauggcuuuacggcaacaaacucugcgcuggcuaagauccaguccgugguaaaugccaacgcacaggccuuaaauagccuccugcaacagcuuuucaacaaguuuggggcuaucucaaguucucugcaggagauucuaucccggcucgaucccccagaagcccaggugcaaaucgaccgccugauuaauggaagauugaccgcacugaacgcuuaugucagccagcaguuaucagacauaacucucaucaaagccggcgcgaguagggccauugagaaggugaaugaauguguuaaaagccaauccccucguaucaacuucugcgguaaugggaaccacauucugucucuugugcagaacgcucccuacggacuguuguuuauccauuucagcuauaagccaacauccuuuaaaaccguccucgugucaccgggccugugucuaucuggugaucggggcauagcaccuaagcagggguacuucaucaagcagaaugacaguuggauguucacuggaucgagcuauuacuaucccgagccaauuuccgauaaaaacguuguguuuaugaacucuugcucagucaauuucaccaaggcccccuuuaucuaccugaauaacagcauuccuaaucuuuccgacuucgaggcugaacucagucugugguuuaaaaaccacacaucuaucgccccaaauuugacguucaacagccauauaaaugcaaccuuucuggacuuauacuaugagaugaacguaauucaagaaucaaucaagucccucaauggcggguacauccccgaggcgccucgagauggacaggccuaugugagaaaagacggcgaguggguucugcuuaguacuuucuga

SEQ ID NO: 15013 - RNA, 3516 nt, Artificial Sequence
  HCoV/229E/BN1/GER/2015__AOG74783.1 spike protein CDS human (1-1171)
auguucgugcugcucgucgccuacgcacuucugcacaucgcuggcugccagaccacaaacgggacuaauacgagccauuccguuuguaacggaugcgugggucacucugagaauguauuugccguggaaucaggcggguauauucccaguaacuucgcguuuaauaacugguucuuguuaaccaauacaagcuccgucguggacggaguugugagaucuuuucaaccucugcuacucaacugucuguggucggucucaggcagccaguucacuaccgguuuuguguacuucaaugggacaggaaggggcgcuugcaagggcuuuuauaguaacgccuccucugauguaauacgguacaauaucaacuucgaggaaaaucuucgccgagggaccauucuguuuaaaacuagcuauggagcaguuguguucuacuguacaaacaauaccuuggucuccggugacgcccauaucccaucaggcacggugcucgggaacuuuuauugcuucgugaacacuaccauuggaaaugagacaacuagcgcuuucgucggcgcacugccgaagaccguucgugaauuugugaucagcagaacaggucacuucuacauaaacggguacagguauuuuucucugggagauguagaggccgugaauuucaacgucaccaaugcugccacgacuguguguacaguugcgcucgcauccuacgccgacguguuagucaacgugucacagaccgcuaucgccaauauuaucuauugcaacagcguaauuaaucggcugcgcugugaucagcuuaguuuugacguucccgauggcuucuacucuacuuccccuauccaaccaguggaguugcccgucagcauagugucgcugccugucuaucauaaacacacauuuauugugcuauacguuaacuucgaacacagaaggggcccagggaagugcuauaauugucggcccgcagugaucaacauuacccucgcuaauuuuaacgagacgaaaggaccucugugcguagacaccucucauuucacaacucaguuugucgauaaugugaaguuggcccgcugguccgcgucaaucaacaccgguaacugcccauucaguuuuggcaagguuaauaacuucgugaaauucgggagcgucuguuuuucccugaaggacaucccgggaggcugcgccaugcccauuauggcaaauuuggugaacucuaaaagccacaauauagguucacucuacguaaguugguccgauggggacgugaucacaggcguuccuaagccagucgaaggagugagcucuuucaugaacgugacucugaauaaauguaccaaguacaacauuuaugaugucucaggcguuggggugauccgaauaaguaaugacacauuuuuaaacggaauuaccuacacuagcacguccgguaaucugcucggcuucaaggacgugacaaacgggaccaucuauucuaucacucccugcaauccuccagaucagcuuguagucuaccagcaagcugugguuggagccaugcugucggagaacuuuaccagcuauggcuucuccaauguggucgagaugcccaaauuuuucuacgcuucaaacgguacauauaacuguaccgacgccguguugacuuacaguucuuuugggguuugcgcagauggcagcauuaucgccgugcagccgagaaauguauccuacgacucagucagcgcuauugugacagcgaaccuaucuauaccuuucaauuggacgaccuccgugcaggucgaauaucugcagaucacaaguacucccauuguuguggauuguagcaccuacguaugcaacggaaaugugaggugugucgagcuccugaagcaauauacaucugcaugcaaaacuaucgaagacgcccuucggaacuccgcuaugcuggagucagccgaugugagugaaauguugaccuuugacaagaaagcauucacgcucgccaauguuagcucguuuggcgauuacaaccuguccucugugaucccaaguuuaccucguucagggagucgcgucgcuggaagauccgccauugaggacauacuguucucuaagcuagugaccagcggucucggcacaguugaugcagacuauaaaaaguguacuaaggggcuguccaucgcggaccuugcuugcgcccaguacuauaauggaauuaugguguugcccggcgucgcagaugccgagaggauggcuauguacaccgguucacugaucgggggcauugcccucggaggccugacaagcgcagcuaguaucccauucucucuugccauacagucccggcugaacuacguagcguugcaaacugacgugcuccaggaaaaucagcgaauccuggccgcuagcuuuaacaaagcaaugaccaauauuguugaugccuucacgggggugaacgacgcuaucacacagaccucgcaagccuuacagacugucgcaacagcgcugaauaagauucaggaugugguaaaccagcaaggaaacucacuaaaucaucucaccucucagcugcgccagaacuuucaggccaucaguuccagcauacaagcuauuuaugacagacuugauaucauucaggccgaccaacagguggauagguugaucacuggccggcuggcagcucucaaugucuucguuucucacacccugacaaaauacacggaggugcgcgccagcagacaguuagcacagcagaaggugaacgaaugcgucaaaucccaaucaaagagguaugguuuuugugggaauggaacccacauauucagucuggugaacgccgcucccgagggccuuguuuuucuucauacuguacuccugccuacacaguacaaggacguggaagcguggagcggucuaugcgucgauggcaucaauggguaugugcugcgucagccaaaccucgcccuguacaaagagggaaauuauuaccggauuaccucucgaaucauguucgagccgaggauucccacaaucgcagacuuuguucagauagaaaacuguaaugugacuuucgucaacauuuccagaucagagcuucaaaccaucgugccugaauacaucgauguaaauaagacguugcaggagcugaguuauaaauuaccaaacuacacaguccccgaccucgugguugaacaguauaaucagaccauucugaaccuuacuagcgagaucuccacccuggagaauaagucugcugaauugaacuacacagugcaaaaacuccagacucugauugacaacauaaauucgacccuagucgaucugaaguggcucaaccgcguggagacauauaucaaguggccuugguggguuuggcugugcauuagcgugguccuuaucuuugugguaucaauguugcuguuauguugcuguuccacgggcugcuguggguucuucaguugcuuugccucuagcauucggggauguugcgaauccaccaaacucccauacuaugacguggagaagauccacauacaguga

SEQ ID NO: 15014 - RNA, 3516 nt, Artificial Sequence
  HCoV/229E/BN1/GER/2015__AOG74783.1 spike protein CDS human (1-1171)(I869P_I870P)
auguucgugcugcucgucgccuacgcacuucugcacaucgcuggcugccagaccacaaacgggacuaauacgagccauuccguuuguaacggaugcgugggucacucugagaauguauuugccguggaaucaggcggguauauucccaguaacuucgcguuuaauaacugguucuuguuaaccaauacaagcuccgucguggacggaguugugagaucuuuucaaccucugcuacucaacugucuguggucggucucaggcagccaguucacuaccgguuuuguguacuucaaugggacaggaaggggcgcuugcaagggcuuuuauaguaacgccuccucugauguaauacgguacaauaucaacuucgaggaaaaucuucgccgagggaccauucuguuuaaaacuagcuauggagcaguuguguucuacuguacaaacaauaccuuggucuccggugacgcccauaucccaucaggcacggugcucgggaacuuuuauugcuucgugaacacuaccauuggaaaugagacaacuagcgcuuucgucggcgcacugccgaagaccguucgugaauuugugaucagcagaacaggucacuucuacauaaacggguacagguauuuuucucugggagauguagaggccgugaauuucaacgucaccaaugcugccacgacuguguguacaguugcgcucgcauccuacgccgacguguuagucaacgugucacagaccgcuaucgccaauauuaucuauugcaacagcguaauuaaucggcugcgcugugaucagcuuaguuuugacguucccgauggcuucuacucuacuuccccuauccaaccaguggaguugcccgucagcauagugucgcugccugucuaucauaaacacacauuuauugugcuauacguuaacuucgaacacagaaggggcccagggaagugcuauaauugucggcccgcagugaucaacauuacccucgcuaauuuuaacgagacgaaaggaccucugugcguagacaccucucauuucacaacucaguuugucgauaaugugaaguuggcccgcugguccgcgucaaucaacaccgguaacugcccauucaguuuuggcaagguuaauaacuucgugaaauucgggagcgucuguuuuucccugaaggacaucccgggaggcugcgccaugcccauuauggcaaauuuggugaacucuaaaagccacaauauagguucacucuacguaaguugguccgauggggacgugaucacaggcguuccuaagccagucgaaggagugagcucuuucaugaacgugacucugaauaaauguaccaaguacaacauuuaugaugucucaggcguuggggugauccgaauaaguaaugacacauuuuuaaacggaauuaccuacacuagcacguccgguaaucugcucggcuucaaggacgugacaaacgggaccaucuauucuaucacucccugcaauccuccagaucagcuuguagucuaccagcaagcugugguuggagccaugcugucggagaacuuuaccagcuauggcuucuccaauguggucgagaugcccaaauuuuucuacgcuucaaacgguacauauaacuguaccgacgccguguugacuuacaguucuuuugggguuugcgcagauggcagcauuaucgccgugcagccgagaaauguauccuacgacucagucagcgcuauugugacagcgaaccuaucuauaccuuucaauuggacgaccuccgugcaggucgaauaucugcagaucacaaguacucccauuguuguggauuguagcaccuacguaugcaacggaaaugugaggugugucgagcuccugaagcaauauacaucugcaugcaaaacuaucgaagacgcccuucggaacuccgcuaugcuggagucagccgaugugagugaaauguugaccuuugacaagaaagcauucacgcucgccaauguuagcucguuuggcgauuacaaccuguccucugugaucccaaguuuaccucguucagggagucgcgucgcuggaagauccgccauugaggacauacuguucucuaagcuagugaccagcggucucggcacaguugaugcagacuauaaaaaguguacuaaggggcuguccaucgcggaccuugcuugcgcccaguacuauaauggaauuaugguguugcccggcgucgcagaugccgagaggauggcuauguacaccgguucacugaucgggggcauugcccucggaggccugacaagcgcagcuaguaucccauucucucuugccauacagucccggcugaacuacguagcguugcaaacugacgugcuccaggaaaaucagcgaauccuggccgcuagcuuuaacaaagcaaugaccaauauuguugaugccuucacgggggugaacgacgcuaucacacagaccucgcaagccuuacagacugucgcaacagcgcugaauaagauucaggaugugguaaaccagcaaggaaacucacuaaaucaucucaccucucagcugcgccagaacuuucaggccaucaguuccagcauacaagcuauuuaugacagacuugaucccccucaggccgaccaacagguggauagguugaucacuggccggcuggcagcucucaaugucuucguuucucacacccugacaaaauacacggaggugcgcgccagcagacaguuagcacagcagaaggugaacgaaugcgucaaaucccaaucaaagagguaugguuuuugugggaauggaacccacauuuucagucuggugaacgccgcuccagagggccuuguuuuucuucauacuguacuccugccgacacaguacaaggacguggaagcguggagcggucuaugcgucgauggcaucaauggguaugugcugcgucagcccaaccucgcccuguacaaagagggaaauuauuaccggauaaccucucgaaucauguucgagccuaggauuccaacaaucgcagacuuuguucagauugaaaacuguaaugugacuuucgucaacaucuccagaucagagcuucaaaccauagugcccgaauacauugauguaaauaagacguugcaggagcugaguuauaaauuaccuaacuacacagucccagaccucgugguugaacaguauaaucagaccauccugaaccuuacuagcgagaucuccacccuggagaauaagucugcugaauugaacuacacagugcaaaaacuccagacucugauugacaacaucaauucgacccuagucgaucugaaguggcucaaccgcguggagacauauauuaaguggcccugguggguuuggcugugcauaagcgugguccuuaucuuugugguaucaauguugcuguuauguugcuguuccacgggcugcuguggguucuucaguugcuuugccucuagcauucggggauguugcgaauccaccaaacucccguacuaugacguggagaagauccacauucaguga

SEQ ID NO: 15015 - RNA, 3327 nt, Artificial Sequence
  HCoV/229E/BN1/GER/2015__AOG74783.1 spike protein CDS human (variant)
auguucgugcugcucgucgccuacgcacuucugcacaucgcuggcugccagaccacaaacgggacuaauacgagccauuccguuuguaacggaugcgugggucacucugagaauguauuugccguggaaucaggcggguauauucccaguaacuucgcguuuaauaacugguucuuguuaaccaauacaagcuccgucguggacggaguugugagaucuuuucaaccucugcuacucaacugucuguggucggucucaggcagccaguucacuaccgguuuuguguacuucaaugggacaggaaggggcgcuugcaagggcuuuuauaguaacgccuccucugauguaauacgguacaauaucaacuucgaggaaaaucuucgccgagggaccauucuguuuaaaacuagcuauggagcaguuguguucuacuguacaaacaauaccuuggucuccggugacgcccauaucccaucaggcacggugcucgggaacuuuuauugcuucgugaacacuaccauuggaaaugagacaacuagcgcuuucgucggcgcacugccgaagaccguucgugaauuugugaucagcagaacaggucacuucuacauaaacggguacagguauuuuucucugggagauguagaggccgugaauuucaacgucaccaaugcugccacgacuguguguacaguugcgcucgcauccuacgccgacguguuagucaacgugucacagaccgcuaucgccaauauuaucuauugcaacagcguaauuaaucggcugcgcugugaucagcuuaguuuugacguucccgauggcuucuacucuacuuccccuauccaaccaguggaguugcccgucagcauagugucgcugccugucuaucauaaacacacauuuauugugcuauacguuaacuucgaacacagaaggggcccagggaagugcuauaauugucggcccgcagugaucaacauuacccucgcuaauuuuaacgagacgaaaggaccucugugcguagacaccucucauuucacaacucaguuugucgauaaugugaaguuggcccgcugguccgcgucaaucaacaccgguaacugcccauucaguuuuggcaagguuaauaacuucgugaaauucgggagcgucuguuuuucccugaaggacaucccgggaggcugcgccaugcccauuauggcaaauuuggugaacucuaaaagccacaauauagguucacucuacguaaguugguccgauggggacgugaucacaggcguuccuaagccagucgaaggagugagcucuuucaugaacgugacucugaauaaauguaccaaguacaacauuuaugaugucucaggcguuggggugauccgaauaaguaaugacacauuuuuaaacggaauuaccuacacuagcacguccgguaaucugcucggcuucaaggacgugacaaacgggaccaucuauucuaucacucccugcaauccuccagaucagcuuguagucuaccagcaagcugugguuggagccaugcugucggagaacuuuaccagcuauggcuucuccaauguggucgagaugcccaaauuuuucuacgcuucaaacgguacauauaacuguaccgacgccguguugacuuacaguucuuuugggguuugcgcagauggcagcauuaucgccgugcagccgagaaauguauccuacgacucagucagcgcuauugugacagcgaaccuaucuauaccuuucaauuggacgaccuccgugcaggucgaauaucugcagaucacaaguacucccauuguuguggauuguagcaccuacguaugcaacggaaaugugaggugugucgagcuccugaagcaauauacaucugcaugcaaaacuaucgaagacgcccuucggaacuccgcuaugcuggagucagccgaugugagugaaauguugaccuuugacaagaaagcauucacgcucgccaauguuagcucguuuggcgauuacaaccuguccucugugaucccaaguuuaccucguucagggagucgcgucgcuggaagauccgccauugaggacauacuguucucuaagcuagugaccagcggucucggcacaguugaugcagacuauaaaaaguguacuaaggggcuguccaucgcggaccuugcuugcgcccaguacuauaauggaauuaugguguugcccggcgucgcagaugccgagaggauggcuauguacaccgguucacugaucgggggcauugcccucggaggccugacaagcgcagcuaguaucccauucucucuugccauacagucccggcugaacuacguagcguugcaaacugacgugcuccaggaaaaucagcgaauccuggccgcuagcuuuaacaaagcaaugaccaauauuguugaugccuucacgggggugaacgacgcuaucacacagaccucgcaagccuuacagacugucgcaacagcgcugaauaagauucaggaugugguaaaccagcaaggaaacucacuaaaucaucucaccucucagcugcgccagaacuuucaggccaucaguuccagcauacaagcuauuuaugacagacuugaucccccucaggccgaccaacagguggauagguugaucacuggccggcuggcagcucucaaugucuucguuucucacacccugacaaaauacacggaggugcgcgccagcagacaguuagcacagcagaaggugaacgaaugcgucaaaucccaaucaaagagguaugguuuuugugggaauggaacccacauuuucagucuggugaacgccgcuccagagggccuuguuuuucuucauacuguacuccugccgacacaguacaaggacguggaagcguggagcggucuaugcgucgauggcaucaauggguaugugcugcgucagcccaaccucgcccuguacaaagagggaaauuauuaccggauaaccucucgaaucauguucgagccuaggauuccaacaaucgcagacuuuguucagauugaaaacuguaaugugacuuucgucaacaucuccagaucagagcuucaaaccauagugcccgaauacauugauguaaauaagacguugcaggagcugaguuauaaauuaccuaacuacacagucccagaccucgugguugaacaguauaaucagaccauccugaaccuuacuagcgagaucuccacccuggagaauaagucugcugaauugaacuacacagugcaaaaacuccagacucugauugacaacaucaauucgacccuagucgaucugaaguggcucaaccgcguggagacauga

SEQ ID NO: 15016 - RNA, 3408 nt, Artificial Sequence
  HCoV/229E/BN1/GER/2015__AOG74783.1 spike protein CDS human (variant)
auguucgugcugcucgucgccuacgcacuucugcacaucgcuggcugccagaccacaaacgggacuaauacgagccauuccguuuguaacggaugcgugggucacucugagaauguauuugccguggaaucaggcggguauauucccaguaacuucgcguuuaauaacugguucuuguuaaccaauacaagcuccgucguggacggaguugugagaucuuuucaaccucugcuacucaacugucuguggucggucucaggcagccaguucacuaccgguuuuguguacuucaaugggacaggaaggggcgcuugcaagggcuuuuauaguaacgccuccucugauguaauacgguacaauaucaacuucgaggaaaaucuucgccgagggaccauucuguuuaaaacuagcuauggagcaguuguguucuacuguacaaacaauaccuuggucuccggugacgcccauaucccaucaggcacggugcucgggaacuuuuauugcuucgugaacacuaccauuggaaaugagacaacuagcgcuuucgucggcgcacugccgaagaccguucgugaauuugugaucagcagaacaggucacuucuacauaaacggguacagguauuuuucucugggagauguagaggccgugaauuucaacgucaccaaugcugccacgacuguguguacaguugcgcucgcauccuacgccgacguguuagucaacgugucacagaccgcuaucgccaauauuaucuauugcaacagcguaauuaaucggcugcgcugugaucagcuuaguuuugacguucccgauggcuucuacucuacuuccccuauccaaccaguggaguugcccgucagcauagugucgcugccugucuaucauaaacacacauuuauugugcuauacguuaacuucgaacacagaaggggcccagggaagugcuauaauugucggcccgcagugaucaacauuacccucgcuaauuuuaacgagacgaaaggaccucugugcguagacaccucucauuucacaacucaguuugucgauaaugugaaguuggcccgcugguccgcgucaaucaacaccgguaacugcccauucaguuuuggcaagguuaauaacuucgugaaauucgggagcgucuguuuuucccugaaggacaucccgggaggcugcgccaugcccauuauggcaaauuuggugaacucuaaaagccacaauauagguucacucuacguaaguugguccgauggggacgugaucacaggcguuccuaagccagucgaaggagugagcucuuucaugaacgugacucugaauaaauguaccaaguacaacauuuaugaugucucaggcguuggggugauccgaauaaguaaugacacauuuuuaaacggaauuaccuacacuagcacguccgguaaucugcucggcuucaaggacgugacaaacgggaccaucuauucuaucacucccugcaauccuccagaucagcuuguagucuaccagcaagcugugguuggagccaugcugucggagaacuuuaccagcuauggcuucuccaauguggucgagaugcccaaauuuuucuacgcuucaaacgguacauauaacuguaccgacgccguguugacuuacaguucuuuugggguuugcgcagauggcagcauuaucgccgugcagccgagaaauguauccuacgacucagucagcgcuauugugacagcgaaccuaucuauaccuuucaauuggacgaccuccgugcaggucgaauaucugcagaucacaaguacucccauuguuguggauuguagcaccuacguaugcaacggaaaugugaggugugucgagcuccugaagcaauauacaucugcaugcaaaacuaucgaagacgcccuucggaacuccgcuaugcuggagucagccgaugugagugaaauguugaccuuugacaagaaagcauucacgcucgccaauguuagcucguuuggcgauuacaaccuguccucugugaucccaaguuuaccucguucagggagucgcgucgcuggaagauccgccauugaggacauacuguucucuaagcuagugaccagcggucucggcacaguugaugcagacuauaaaaaguguacuaaggggcuguccaucgcggaccuugcuugcgcccaguacuauaauggaauuaugguguugcccggcgucgcagaugccgagaggauggcuauguacaccgguucacugaucgggggcauugcccucggaggccugacaagcgcagcuaguaucccauucucucuugccauacagucccggcugaacuacguagcguugcaaacugacgugcuccaggaaaaucagcgaauccuggccgcuagcuuuaacaaagcaaugaccaauauuguugaugccuucacgggggugaacgacgcuaucacacagaccucgcaagccuuacagacugucgcaacagcgcugaauaagauucaggaugugguaaaccagcaaggaaacucacuaaaucaucucaccucucagcugcgccagaacuuucaggccaucaguuccagcauacaagcuauuuaugacagacuugaucccccucaggccgaccaacagguggauagguugaucacuggccggcuggcagcucucaaugucuucguuucucacacccugacaaaauacacggaggugcgcgccagcagacaguuagcacagcagaaggugaacgaaugcgucaaaucccaaucaaagagguaugguuuuugugggaauggaacccacauuuucagucuggugaacgccgcuccagagggccuuguuuuucuucauacuguacuccugccgacacaguacaaggacguggaagcguggagcggucuaugcgucgauggcaucaauggguaugugcugcgucagcccaaccucgcccuguacaaagagggaaauuauuaccggauaaccucucgaaucauguucgagccuaggauuccaacaaucgcagacuuuguucagauugaaaacuguaaugugacuuucgucaacaucuccagaucagagcuucaaaccauagugcccgaauacauugauguaaauaagacguugcaggagcugaguuauaaauuaccuaacuacacagucccagaccucgugguugaacaguauaaucagaccauccugaaccuuacuagcgagaucuccacccuggagaauaagucugcugaauugaacuacacagugcaaaaacuccagacucugauugacaacaucaauucgacccuagucgaucugaaguggcucaaccgcguggagacaggcggguauauucccgaagccccgcgggacggacaggccuacguuagaaaggauggcgagugggugcugcuuagcacguuuuga

SEQ ID NO: 15017 - RNA, 4071 nt, Artificial Sequence
  HCoV/NL63/RPTEC/2004__AFV53148.1 spike protein CDS human (1-1356)
augaagcuguuccucauccuucugguguugcccuuagccagcugcuuuuucaccuguaacuccaaugcuaaccugucuaugcuacagcucggcgucccugacaauucaaguacaauuguuacugggcugcuuccaacgcacugguuuugcgcaaaccaaagcaccuccguguacucugccaauggauucuuuuauauagauguagguaaccauagaucggcguucgcucugcacacaggcuacuaugacgccaaucaguacuauaucuacgugacuaacgagauuggguugaaugcaucagucacccucaaaaucuguaaguuuagcaggaacacaaccuucgauuuucugaguaaugccuccucuagcuucgacugcauugugaaccugcucuuuacugaacaguuaggagcuccgcugggcaucacaauauccggugagaccguucggcuucauuuguauaaugugacgcgcacuuucuacguccccgcagccuacaaacugaccaagcuaucagugaaauguuauuuuaacuacaguugcguauucagcguugugaaugcuacagucacugugaacgugaccacacacaacgggcgagucguuaauuauaccgugugugaugacugcaacggauacacggauaauaucuucucuguacagcaagacggccguauuccuaacggcuuuccauucaauaacugguuucuccugacuaauggguccacacuuguggauggagucucaagacuguaucagcccuugaggcucaccugucuguggccugugccagguuuaaagagcaguacuggcuucguuuacuuuaacgccacagggucugacgugaauugcaacggauaucagcauaauuccgucguggauguaaugcgguacaaccugaauuucagcgcgaacucgcucgacaaucuuaagucuggcguuaucguguuuaaaacccugcaguacgaugucuuguucuauuguuccaacucaaguagcggugugcuagacacgaccauucccuuugggccuuccucucaaccauacuauugcuucaucaacagcacaauaaauacuacccacgucucaacauuugugggcauucugccgcccacuguucgcgaaaucgugguagcaagaaccggacaguucuacauuaacggcuuuaaguauuucgaccucggguucaucgaggccgucaauuuuaacgugacaaccgcuagugccacugauuucuggacgguugcauuugcuacauucguggacguccuggugaauguauccgccaccaacauccagaaucuucuguacugcgauagcccuuuugaaaaauugcagugugagcaccuccaauucggacugcaggacgguuuuuauucugcgaacuucuuagaugacaaugugcugccagagacuuacguugcccuacccauuuacuaucagcauaccgauauaaacuuuacagcaaccgcuucauucggcgggaguugcuacgucuguaagccucaccaagugaauaucagccucaacggaaauacuuccgugugcgucaggacaucucauuuuucgauucgguauaucuacaaccgcguuaaaagcggcuccccaggugacucaaguuggcacauauaucugaagucugggacgugucccuucagcuuuuccaaacuuaauaacuuccagaaguucaagaccauuugcuuuucaacuguggaagugccgggcagcuguaacuucccuuuggaggccacauggcacuacaccucuuauacaaucguaggagcucuguacgucacuugguccgaaggcaauaguaucaccggggugcccuacccaguuagcgguauucgagaguuuucuaaccucgugcugaauaacugcacgaaauauaauaucuacgauuaugucggaaccggcauuauaagauccucaaaccagagucuugccgggggaaucacauacgugagcaauucgggcaaccuguuggguuucaagaauguuuccacugggaacauuuuuaucgugaccccuuguaaucagcccgaccaaguagcagucuaucagcagucuaucauuggcgccaugacagcugugaacgagagcagguacggacuccagaaucuguuacaacugccaaacuucuauuacgugucaaauggcgggaacaacugcacuaccgcggucaugacguacaguaauuuuggaauaugugcagaugguucccuaauccccguucggccucguaacucuagcgacaauggcauuuccgccaucauuacagcuaaccucucaaucccaagcaauuggaccacaagugugcagguagaauaucugcagauaacuucuaccccgaucguggucgacugcgccacuuacgugugcaacgggaauccccgcuguaaaaaccuuuugaagcaguauaccuccgcaugcaaaacaauugaggaugcccugagacucagcgcucaucuggaaacgaaugacguuucgucaauguuaaccuucgauucuaacgccuuuagucuggcaaaugugacuuccuucggagacuacaaccuuagcucugucuugccucaaaggaauauccggagcucccgaauugcgggccgcucagcucucgaggaucugcuauuuaguaaggugguuacaagcggucuggggaccguggacgucgauuauaagucuuguacaaaaggccucuccaucgccgaccuggcaugcgcccaguacuauaacggaauaaugguacuuccaggcguggcugaugccgaaagaauggcaauguacacugggucauugauuggaggcaugguucuggguggguuaaccagugcugccgcgauccccuucagccucgcccugcaggcuaggcuuaauuacguggcacugcagacggacgucuugcaagagaaccagaagauucucgccgcuuccuucaauaaagccaucaacaacauaguggcaucuuuuucgagcguaaaugaugcgaucacacagaccgccgaggcuauucacacugugaccaucgcccugaacaagauucaagacgucguuaaucagcagggaucagcacuaaaccaucugacaucccagcuccggcacaauuuccaagcuaucaguaacucuauacaggccauuuaugaucgccuggacagcauccaggcagaccagcaaguggauagacuuaucacuggcagguuggccgcucugaaugcguuugugucccaggucuuaaacaaauacaccgaagugcgugguucacggcgacucgcccagcagaagauuaaugaguguguuaagucucaaagcaacagauauggcuucugcgggaauggaacacauaucuuuaguauuguaaacuccgcaccugacggccugcuuuuccugcacacggugcuacucccaaccgauuacaaaaaugucaaggcuuggagcgggauauguguggacggaaucuauggcuacguucugaggcagcccaacuuggugcuguauucugauaauggugucuuucgcgugacuucacggauuauguuccagccgagauuaccuguacucuccgacuuuguccaaaucuacaacugcaacgugacauucguuaauauuaguaggguggaacugcacaccgucaucccagauuacguggacguuaacaaaacucuucaggaguuugcccagaaucugcccaaguaugugaaaccuaacuucgauuugacacccuuuaaucucaccuaccugaaccuaagcucggaacugaagcagcuugaggccaagacggcuucucucuuccaaacuaccgucgagcugcagggguugauagaccagaucaauuccacauauguggaucugaaauuacucaaccgcuucgaaaauuacauuaaguggccaugguggguauggcugaucauuagcgugguuuuugucgugcuucugucauugcucguguucuguugccugaguaccggauguugcggcugcuguaacugccuaacuucuuccaugcgagguuguugcgacuguggcagcacaaaacugccuuauuacgaguuugaaaagguccauguacaguga

SEQ ID NO: 15018 - RNA, 4071 nt, Artificial Sequence
  HCoV/NL63/RPTEC/2004__AFV53148.1 spike protein CDS human (1-1356)(S1052P_I1053P)
augaagcuguuccucauccuucugguguugcccuuagccagcugcuuuuucaccuguaacuccaaugcuaaccugucuaugcuacagcucggcgucccugacaauucaaguacaauuguuacugggcugcuuccaacgcacugguuuugcgcaaaccaaagcaccuccguguacucugccaauggauucuuuuauauagauguagguaaccauagaucggcguucgcucugcacacaggcuacuaugacgccaaucaguacuauaucuacgugacuaacgagauuggguugaaugcaucagucacccucaaaaucuguaaguuuagcaggaacacaaccuucgauuuucugaguaaugccuccucuagcuucgacugcauugugaaccugcucuuuacugaacaguuaggagcuccgcugggcaucacaauauccggugagaccguucggcuucauuuguauaaugugacgcgcacuuucuacguccccgcagccuacaaacugaccaagcuaucagugaaauguuauuuuaacuacaguugcguauucagcguugugaaugcuacagucacugugaacgugaccacacacaacgggcgagucguuaauuauaccgugugugaugacugcaacggauacacggauaauaucuucucuguacagcaagacggccguauuccuaacggcuuuccauucaauaacugguuucuccugacuaauggguccacacuuguggauggagucucaagacuguaucagcccuugaggcucaccugucuguggccugugccagguuuaaagagcaguacuggcuucguuuacuuuaacgccacagggucugacgugaauugcaacggauaucagcauaauuccgucguggauguaaugcgguacaaccugaauuucagcgcgaacucgcucgacaaucuuaagucuggcguuaucguguuuaaaacccugcaguacgaugucuuguucuauuguuccaacucaaguagcggugugcuagacacgaccauucccuuugggccuuccucucaaccauacuauugcuucaucaacagcacaauaaauacuacccacgucucaacauuugugggcauucugccgcccacuguucgcgaaaucgugguagcaagaaccggacaguucuacauuaacggcuuuaaguauuucgaccucggguucaucgaggccgucaauuuuaacgugacaaccgcuagugccacugauuucuggacgguugcauuugcuacauucguggacguccuggugaauguauccgccaccaacauccagaaucuucuguacugcgauagcccuuuugaaaaauugcagugugagcaccuccaauucggacugcaggacgguuuuuauucugcgaacuucuuagaugacaaugugcugccagagacuuacguugcccuacccauuuacuaucagcauaccgauauaaacuuuacagcaaccgcuucauucggcgggaguugcuacgucuguaagccucaccaagugaauaucagccucaacggaaauacuuccgugugcgucaggacaucucauuuuucgauucgguauaucuacaaccgcguuaaaagcggcuccccaggugacucaaguuggcacauauaucugaagucugggacgugucccuucagcuuuuccaaacuuaauaacuuccagaaguucaagaccauuugcuuuucaacuguggaagugccgggcagcuguaacuucccuuuggaggccacauggcacuacaccucuuauacaaucguaggagcucuguacgucacuugguccgaaggcaauaguaucaccggggugcccuacccaguuagcgguauucgagaguuuucuaaccucgugcugaauaacugcacgaaauauaauaucuacgauuaugucggaaccggcauuauaagauccucaaaccagagucuugccgggggaaucacauacgugagcaauucgggcaaccuguuggguuucaagaauguuuccacugggaacauuuuuaucgugaccccuuguaaucagcccgaccaaguagcagucuaucagcagucuaucauuggcgccaugacagcugugaacgagagcagguacggacuccagaaucuguuacaacugccaaacuucuauuacgugucaaauggcgggaacaacugcacuaccgcggucaugacguacaguaauuuuggaauaugugcagaugguucccuaauccccguucggccucguaacucuagcgacaauggcauuuccgccaucauuacagcuaaccucucaaucccaagcaauuggaccacuucggugcagguagaauaucugcagauaacaucuaccccgaucguggucgacugcgccacuuacgugugcaacgggaauccccgcuguaaaaaccuuuugaagcaguauaccuccgcaugcaaaacaauugaggaugcccugagacucagcgcucaucuggaaacgaaugacguuucgucaauguuaaccuucgauucuaacgccuuuagucuggcaaaugugacuuccuucggagacuacaaccuuagcucugucuugccucaaaggaauauccggagcucccgaauugcgggccgcucagcucucgaggaucugcuauuuaguaaggugguuacaagcggucuggggaccguggacgucgauuauaagucuuguacaaaaggccucuccaucgccgaccuggcaugcgcccaguacuauaacggaauaaugguacuuccaggcguggcugaugccgaaagaauggcaauguacacugggucauugauuggaggcaugguucuggguggguuaaccagugcugccgcgauccccuucagccucgcccugcaggcuaggcuuaauuacguggcacugcagacggacgucuugcaagagaaccagaagauucucgccgcuuccuucaauaaagccaucaacaacauaguggcaucuuuuucgagcguaaaugaugcgaucacacagaccgccgaggcuauucacacugugaccaucgcccugaacaagauucaagacgucguuaaucagcagggaucagcacuaaaccaucugacaucccagcuccggcacaauuuccaagcuaucaguaacucuauacaggccauuuaugaucgccuggacccuccacaggcagaccagcaaguggauagacuuaucacuggcagguuggccgcucugaaugcguuugugagccaggucuuaaacaaauacaccgaagugcgugguucccggcgacucgcccagcagaagaucaaugaguguguuaagucacaaucuaacagauauggcuucugcgggaauggaacacauauuuuuagcaucguaaacagugcacccgacggccugcuuuuccugcacacggugcuacucccgaccgauuacaaaaaugucaaggcuugguccgggauuuguguggacggaauauauggcuacguucugaggcagccuaacuuggugcuguauagcgauaauggugucuuucgcgugacuucucggaucauguuccagccaagauuacccguacucucagacuuuguccaaauuuacaacugcaacgugacauucguuaauaucuccaggguggaacugcacaccgucauuccugauuacguggacguuaacaaaacucuucaggaguuugcccagaaucugcccaaguaugugaaaccaaacuucgauuugacaccuuuuaaucucaccuaccugaaccuaaguagcgaacugaagcagcuugaggccaagacggcuagucucuuccaaacuaccgucgagcugcagggguugaucgaccagauaaauucuacauauguggaucugaaauuacucaaccgcuucgaaaauuacaucaaguggcccugguggguauggcugauuaucuccgugguuuuugucgugcuucugagcuugcucguguucuguugccugucaaccggauguugcggcugcuguaacugccuaacaaguucuaugcgagguuguugcgacuguggcuccacuaaacugccauauuacgaguuugaaaagguccauguacaguga

SEQ ID NO: 15019 - RNA, 3876 nt, Artificial Sequence
  HCoV/NL63/RPTEC/2004__AFV53148.1 spike protein CDS human (variant)
augaagcuguuccucauccuucugguguugcccuuagccagcugcuuuuucaccuguaacuccaaugcuaaccugucuaugcuacagcucggcgucccugacaauucaaguacaauuguuacugggcugcuuccaacgcacugguuuugcgcaaaccaaagcaccuccguguacucugccaauggauucuuuuauauagauguagguaaccauagaucggcguucgcucugcacacaggcuacuaugacgccaaucaguacuauaucuacgugacuaacgagauuggguugaaugcaucagucacccucaaaaucuguaaguuuagcaggaacacaaccuucgauuuucugaguaaugccuccucuagcuucgacugcauugugaaccugcucuuuacugaacaguuaggagcuccgcugggcaucacaauauccggugagaccguucggcuucauuuguauaaugugacgcgcacuuucuacguccccgcagccuacaaacugaccaagcuaucagugaaauguuauuuuaacuacaguugcguauucagcguugugaaugcuacagucacugugaacgugaccacacacaacgggcgagucguuaauuauaccgugugugaugacugcaacggauacacggauaauaucuucucuguacagcaagacggccguauuccuaacggcuuuccauucaauaacugguuucuccugacuaauggguccacacuuguggauggagucucaagacuguaucagcccuugaggcucaccugucuguggccugugccagguuuaaagagcaguacuggcuucguuuacuuuaacgccacagggucugacgugaauugcaacggauaucagcauaauuccgucguggauguaaugcgguacaaccugaauuucagcgcgaacucgcucgacaaucuuaagucuggcguuaucguguuuaaaacccugcaguacgaugucuuguucuauuguuccaacucaaguagcggugugcuagacacgaccauucccuuugggccuuccucucaaccauacuauugcuucaucaacagcacaauaaauacuacccacgucucaacauuugugggcauucugccgcccacuguucgcgaaaucgugguagcaagaaccggacaguucuacauuaacggcuuuaaguauuucgaccucggguucaucgaggccgucaauuuuaacgugacaaccgcuagugccacugauuucuggacgguugcauuugcuacauucguggacguccuggugaauguauccgccaccaacauccagaaucuucuguacugcgauagcccuuuugaaaaauugcagugugagcaccuccaauucggacugcaggacgguuuuuauucugcgaacuucuuagaugacaaugugcugccagagacuuacguugcccuacccauuuacuaucagcauaccgauauaaacuuuacagcaaccgcuucauucggcgggaguugcuacgucuguaagccucaccaagugaauaucagccucaacggaaauacuuccgugugcgucaggacaucucauuuuucgauucgguauaucuacaaccgcguuaaaagcggcuccccaggugacucaaguuggcacauauaucugaagucugggacgugucccuucagcuuuuccaaacuuaauaacuuccagaaguucaagaccauuugcuuuucaacuguggaagugccgggcagcuguaacuucccuuuggaggccacauggcacuacaccucuuauacaaucguaggagcucuguacgucacuugguccgaaggcaauaguaucaccggggugcccuacccaguuagcgguauucgagaguuuucuaaccucgugcugaauaacugcacgaaauauaauaucuacgauuaugucggaaccggcauuauaagauccucaaaccagagucuugccgggggaaucacauacgugagcaauucgggcaaccuguuggguuucaagaauguuuccacugggaacauuuuuaucgugaccccuuguaaucagcccgaccaaguagcagucuaucagcagucuaucauuggcgccaugacagcugugaacgagagcagguacggacuccagaaucuguuacaacugccaaacuucuauuacgugucaaauggcgggaacaacugcacuaccgcggucaugacguacaguaauuuuggaauaugugcagaugguucccuaauccccguucggccucguaacucuagcgacaauggcauuuccgccaucauuacagcuaaccucucaaucccaagcaauuggaccacuucggugcagguagaauaucugcagauaacaucuaccccgaucguggucgacugcgccacuuacgugugcaacgggaauccccgcuguaaaaaccuuuugaagcaguauaccuccgcaugcaaaacaauugaggaugcccugagacucagcgcucaucuggaaacgaaugacguuucgucaauguuaaccuucgauucuaacgccuuuagucuggcaaaugugacuuccuucggagacuacaaccuuagcucugucuugccucaaaggaauauccggagcucccgaauugcgggccgcucagcucucgaggaucugcuauuuaguaaggugguuacaagcggucuggggaccguggacgucgauuauaagucuuguacaaaaggccucuccaucgccgaccuggcaugcgcccaguacuauaacggaauaaugguacuuccaggcguggcugaugccgaaagaauggcaauguacacugggucauugauuggaggcaugguucuggguggguuaaccagugcugccgcgauccccuucagccucgcccugcaggcuaggcuuaauuacguggcacugcagacggacgucuugcaagagaaccagaagauucucgccgcuuccuucaauaaagccaucaacaacauaguggcaucuuuuucgagcguaaaugaugcgaucacacagaccgccgaggcuauucacacugugaccaucgcccugaacaagauucaagacgucguuaaucagcagggaucagcacuaaaccaucugacaucccagcuccggcacaauuuccaagcuaucaguaacucuauacaggccauuuaugaucgccuggacccuccacaggcagaccagcaaguggauagacuuaucacuggcagguuggccgcucugaaugcguuugugagccaggucuuaaacaaauacaccgaagugcgugguucccggcgacucgcccagcagaagaucaaugaguguguuaagucacaaucuaacagauauggcuucugcgggaauggaacacauauuuuuagcaucguaaacagugcacccgacggccugcuuuuccugcacacggugcuacucccgaccgauuacaaaaaugucaaggcuugguccgggauuuguguggacggaauauauggcuacguucugaggcagccuaacuuggugcuguauagcgauaauggugucuuucgcgugacuucucggaucauguuccagccaagauuacccguacucucagacuuuguccaaauuuacaacugcaacgugacauucguuaauaucuccaggguggaacugcacaccgucauuccugauuacguggacguuaacaaaacucuucaggaguuugcccagaaucugcccaaguaugugaaaccaaacuucgauuugacaccuuuuaaucucaccuaccugaaccuaaguagcgaacugaagcagcuugaggccaagacggcuagucucuuccaaacuaccgucgagcugcagggguugaucgaccagauaaauucuacauauguggaucugaaauuacucaaccgcuucgaaaauuga

SEQ ID NO: 15020 - RNA, 3957 nt, Artificial Sequence
  HCoV/NL63/RPTEC/2004__AFV53148.1 spike protein CDS human (variant)
augaagcuguuccucauccuucugguguugcccuuagccagcugcuuuuucaccuguaacuccaaugcuaaccugucuaugcuacagcucggcgucccugacaauucaaguacaauuguuacugggcugcuuccaacgcacugguuuugcgcaaaccaaagcaccuccguguacucugccaauggauucuuuuauauagauguagguaaccauagaucggcguucgcucugcacacaggcuacuaugacgccaaucaguacuauaucuacgugacuaacgagauuggguugaaugcaucagucacccucaaaaucuguaaguuuagcaggaacacaaccuucgauuuucugaguaaugccuccucuagcuucgacugcauugugaaccugcucuuuacugaacaguuaggagcuccgcugggcaucacaauauccggugagaccguucggcuucauuuguauaaugugacgcgcacuuucuacguccccgcagccuacaaacugaccaagcuaucagugaaauguuauuuuaacuacaguugcguauucagcguugugaaugcuacagucacugugaacgugaccacacacaacgggcgagucguuaauuauaccgugugugaugacugcaacggauacacggauaauaucuucucuguacagcaagacggccguauuccuaacggcuuuccauucaauaacugguuucuccugacuaauggguccacacuuguggauggagucucaagacuguaucagcccuugaggcucaccugucuguggccugugccagguuuaaagagcaguacuggcuucguuuacuuuaacgccacagggucugacgugaauugcaacggauaucagcauaauuccgucguggauguaaugcgguacaaccugaauuucagcgcgaacucgcucgacaaucuuaagucuggcguuaucguguuuaaaacccugcaguacgaugucuuguucuauuguuccaacucaaguagcggugugcuagacacgaccauucccuuugggccuuccucucaaccauacuauugcuucaucaacagcacaauaaauacuacccacgucucaacauuugugggcauucugccgcccacuguucgcgaaaucgugguagcaagaaccggacaguucuacauuaacggcuuuaaguauuucgaccucggguucaucgaggccgucaauuuuaacgugacaaccgcuagugccacugauuucuggacgguugcauuugcuacauucguggacguccuggugaauguauccgccaccaacauccagaaucuucuguacugcgauagcccuuuugaaaaauugcagugugagcaccuccaauucggacugcaggacgguuuuuauucugcgaacuucuuagaugacaaugugcugccagagacuuacguugcccuacccauuuacuaucagcauaccgauauaaacuuuacagcaaccgcuucauucggcgggaguugcuacgucuguaagccucaccaagugaauaucagccucaacggaaauacuuccgugugcgucaggacaucucauuuuucgauucgguauaucuacaaccgcguuaaaagcggcuccccaggugacucaaguuggcacauauaucugaagucugggacgugucccuucagcuuuuccaaacuuaauaacuuccagaaguucaagaccauuugcuuuucaacuguggaagugccgggcagcuguaacuucccuuuggaggccacauggcacuacaccucuuauacaaucguaggagcucuguacgucacuugguccgaaggcaauaguaucaccggggugcccuacccaguuagcgguauucgagaguuuucuaaccucgugcugaauaacugcacgaaauauaauaucuacgauuaugucggaaccggcauuauaagauccucaaaccagagucuugccgggggaaucacauacgugagcaauucgggcaaccuguuggguuucaagaauguuuccacugggaacauuuuuaucgugaccccuuguaaucagcccgaccaaguagcagucuaucagcagucuaucauuggcgccaugacagcugugaacgagagcagguacggacuccagaaucuguuacaacugccaaacuucuauuacgugucaaauggcgggaacaacugcacuaccgcggucaugacguacaguaauuuuggaauaugugcagaugguucccuaauccccguucggccucguaacucuagcgacaauggcauuuccgccaucauuacagcuaaccucucaaucccaagcaauuggaccacuucggugcagguagaauaucugcagauaacaucuaccccgaucguggucgacugcgccacuuacgugugcaacgggaauccccgcuguaaaaaccuuuugaagcaguauaccuccgcaugcaaaacaauugaggaugcccugagacucagcgcucaucuggaaacgaaugacguuucgucaauguuaaccuucgauucuaacgccuuuagucuggcaaaugugacuuccuucggagacuacaaccuuagcucugucuugccucaaaggaauauccggagcucccgaauugcgggccgcucagcucucgaggaucugcuauuuaguaaggugguuacaagcggucuggggaccguggacgucgauuauaagucuuguacaaaaggccucuccaucgccgaccuggcaugcgcccaguacuauaacggaauaaugguacuuccaggcguggcugaugccgaaagaauggcaauguacacugggucauugauuggaggcaugguucuggguggguuaaccagugcugccgcgauccccuucagccucgcccugcaggcuaggcuuaauuacguggcacugcagacggacgucuugcaagagaaccagaagauucucgccgcuuccuucaauaaagccaucaacaacauaguggcaucuuuuucgagcguaaaugaugcgaucacacagaccgccgaggcuauucacacugugaccaucgcccugaacaagauucaagacgucguuaaucagcagggaucagcacuaaaccaucugacaucccagcuccggcacaauuuccaagcuaucaguaacucuauacaggccauuuaugaucgccuggacccuccacaggcagaccagcaaguggauagacuuaucacuggcagguuggccgcucugaaugcguuugugagccaggucuuaaacaaauacaccgaagugcgugguucccggcgacucgcccagcagaagaucaaugaguguguuaagucacaaucuaacagauauggcuucugcgggaauggaacacauauuuuuagcaucguaaacagugcacccgacggccugcuuuuccugcacacggugcuacucccgaccgauuacaaaaaugucaaggcuugguccgggauuuguguggacggaauauauggcuacguucugaggcagccuaacuuggugcuguauagcgauaauggugucuuucgcgugacuucucggaucauguuccagccaagauuacccguacucucagacuuuguccaaauuuacaacugcaacgugacauucguuaauaucuccaggguggaacugcacaccgucauuccugauuacguggacguuaacaaaacucuucaggaguuugcccagaaucugcccaaguaugugaaaccaaacuucgauuugacaccuuuuaaucucaccuaccugaaccuaaguagcgaacugaagcagcuugaggccaagacggcuagucucuuccaaacuaccgucgagcugcagggguugaucgaccagauaaauucuacauauguggaucugaaauuacucaaccgcuucgaaaauggaggcuacauccccgaggcaccacgagacggucaggccuauguacggaaggauggcgaaugggugcugcuuuccaccuuuuga

SEQ ID NO: 15021 - RNA, 3771 nt, Artificial Sequence
  Bat SARS-like CoV/WIV1__AGZ48828.1 spike protein CDS human (1-1256)
augaagcugcucgugcuugucuucgccacccugguuagcuccuacacaaucgagaaaugcuuggacuuugaugacagaacucccccugcuaacacgcaguucuuaucuucacacaggggcguguauuacccagaugacauuuuucggaguaauguacugcaucuagugcaagaucacuuccucccguuugacagcaacgucacccgcuucauaacauuugggcugaauuucgauaaccccaucauuccuuuuaaggacggaaucuauuucgcagccacugaaaaauccaaugugauucgagguuggguuuuuggcucuaccaugaacaauaagucgcagucagugaucauaaugaacaauagcacaaaccuugucauccgugcguguaauuucgagcugugcgauaacccauuuuucgugguauugaaaaguaauaacacccagauucccuccuacaucuucaauaacgcuuuuaacuguacuuucgaauauguuucuaaggacuuuaaucucgaucugggggagaagccuggaaacuucaaagaccugagagaauuuguguucaggaauaaggauggcuuucuccaugucuacagcgguuaucagccaauuuccgccgcaucaggguuacccacaggauucaacgcccugaaaccuaucuuuaagcuaccauugggcauaaauauuaccaacuuccggacgcugcuaacugcuuuuccgccccgcccugacuacuggggcaccagugcagccgcuuacuucgugggguaucucaaaccaacaacuuuuaugcugaaguacgacgagaauggaaccaucacagaugccguggacugcagccaaaacccccuugcggagcugaaguguucugucaaauccuucgaaauugauaaggguaucuaucagaccucaaauuucagaguugcaccuagcaaagaggugguaagguuuccaaacaucacgaauuugugccccuucggcgaaguguuuaacgccacuacauucccgagugucuacgcuugggagcggaagcgcauuucuaauuguguggccgacuauuccguucucuacaacagcaccucguuuucuacuuucaaaugcuaugggguguccgcaacaaagcugaaugauuuauguuuuucaaacgucuacgcugacaguuucgugguaaaaggagaugacguucgacagauagccccuggccagaccggugugaucgcggauuacaacuauaagcugcccgacgauuuuacggggugcguccucgccuggaauaccagaaacauugacgcaacacaaacuggaaauuacaacuauaaguacaggagccuucggcacggcaaacugcguccauucgagcgcgacaucuccaaugugccuuuuucucccgauggcaagccauguacacccccugcuuucaacugcuauuggccauugaaugacuacggguuuuauauaaccaacggaauugguuaccagccguacagagucgugguucuuagcuucgaacugcucaaugcccccgcuacugugugcggcccuaaacugucaaccgaucuuaucaagaaccaguguguaaauuucaacuuuaaugggcugacaggaaccggcgucuugacuccaaguuccaaaagguuccagcccuuucaacaguucggucgggacgugagcgauuuuacggacucuguucgagauccuaagacaucagagauccucgacauuaguccaugcagcuucgggggcguguccgucaucacccccggaacuaacaccucuucggaaguggccguacuguaucaggaugugaauuguacagacguuccggucgcaauucaugccgaucaauuaaccccuagcuggcgcgugcacuccacuggcaacaacguguuucagacacaggcugggugccugauaggagcggagcacgucgacacgucauacgaaugugauaucccaauuggugcaggcaucugcgccaguuaucauaccguuucuagccuaagauccacuucacaaaagagcaucguggcuuacacaaugucucucggggccgacuccaguauugcauauagcaauaacaccauagccauccccacaaauuucucuauuuccaucacuaccgaggugaugccuguaucaauggcuaaaacgagugucgacuguaacauguacauuugcggagauagcaccgagugugccaaucugcuuuugcaguauggcucguuuugcacacagcugaacagggcacucuccgguaucgcgguggaacaggaccggaauacucgcgagguuuucgcucaggugaagcaaauguacaaaacccccacacugaaggauuuugggggcuucaacuucucucagauacuuccagacccucugaaacccacuaagagauccuuuaucgaagaucuucucuucaauaaggucacccuggccgacgcaggauuuaugaaacaguacggcgaguguuuaggggauauuaacgccagggaccugaucugcgcucagaaguucaauggacuaacggugcucccaccgcugcuuacagaugacaugauugccgcauauaccgcugccuugguuucagguacugcgacagccggcuggaccuuuggggcuggagcagcccugcaaaucccuuucgcuaugcagauggccuaccguuuuaacggcauaggugugacucagaauguacucuaugaaaaccagaaacaaauugcaaaucaguucaacaaggcgaucagucagauucaagagucccugaccacaacgucuaccgccuuagggaaacugcaggaugucgugaaccagaaugcucaggcccuuaacacuuuggugaagcaacucagcuccaauuuuggcgcaaucucaagcguccugaacgacauacuaagucggcuggauaagguugaggcugaagugcagaucgaccgacucauuacaggaagacugcagucucuucagaccuacguaacacaacaguugaucagggccgcagagauucgcgccuccgcuaaucuggcggccacuaaaaugagcgaaugcguguuaggccagucgaagcgggucgacuucugugggaaaggauaucaccucaugucauuuccccaggcagcuccacauggcgugguuuuccugcacgugaccuacguccccucucaagagagaaacuuuacgacagccccugccaucugccacgaagguaaggcuuauuucccaagggaggggguguucguuuuuaauggaaccaguugguucauaacucagcgcaacuuuuucagcccccagauuaucaccacagauaauacuuuugugagcggcucuugugacgucguaaucgguauuaucaacaauaccguguacgauccucuucaaccggagcuggacagcuucaaagaagaguuggauaaguacuuuaaaaaccauacauccccagacguugaucucggcgacauuucagggauaaaugcaaguguggucaacauccagaaggaaauugaucgacugaaugagguggccaagaaccuaaaugagagccugaucgaccuccaggaacugggaaaauaugagcaguacauuaaguggcccugguauguauggcuuggcuucaucgcgggguugauagcuaucgugauggucacgauucuguuaugcuguaugaccucuugcuguuccugccucaaaggagccuguucaugcggcaguuguugcaaguuugaugaagacgacagcgagccuguucugaaaggugugaaguugcacuacacuuga

SEQ ID NO: 15022 - RNA, 3771 nt, Artificial Sequence
  Bat SARS-like CoV/WIV1__AGZ48828.1 spike protein CDS human (1-1256)(K969P_V970P)
augaagcugcucgugcuugucuucgccacccugguuagcuccuacacaaucgagaaaugcuuggacuuugaugacagaacucccccugcuaacacgcaguucuuaucuucacacaggggcguguauuacccagaugacauuuuucggaguaauguacugcaucuagugcaagaucacuuccucccguuugacagcaacgucacccgcuucauaacauuugggcugaauuucgauaaccccaucauuccuuuuaaggacggaaucuauuucgcagccacugaaaaauccaaugugauucgagguuggguuuuuggcucuaccaugaacaauaagucgcagucagugaucauaaugaacaauagcacaaaccuugucauccgugcguguaauuucgagcugugcgauaacccauuuuucgugguauugaaaaguaauaacacccagauucccuccuacaucuucaauaacgcuuuuaacuguacuuucgaauauguuucuaaggacuuuaaucucgaucugggggagaagccuggaaacuucaaagaccugagagaauuuguguucaggaauaaggauggcuuucuccaugucuacagcgguuaucagccaauuuccgccgcaucaggguuacccacaggauucaacgcccugaaaccuaucuuuaaacuuccauugggcauaaauauuaccaacuuccggacgcugcuaacugcuuuuccgccccgcccugacuacuggggcaccagugcagccgcuuacuucgugggguaucucaaaccaacaacuuuuaugcugaaguacgacgagaauggaaccaucacagaugccguggacugcagccaaaacccccuugcggagcugaaguguucugucaaauccuucgaaauugauaaggguaucuaucagaccucaaauuucagaguugcaccuagcaaagaggugguaagguuuccaaacaucacgaauuugugccccuucggcgaaguguuuaacgccacuacauucccgagugucuacgcuugggagcggaagcgcauuucuaauuguguggccgacuauuccguucucuacaacagcaccucguuuucuacuuucaaaugcuaugggguguccgcaacaaagcugaaugauuuauguuuuucaaacgucuacgcugacaguuucgugguaaaaggagaugacguucgacagauagccccuggccagaccggugugaucgcggauuacaacuauaagcugcccgacgauuuuacggggugcguccucgccuggaauaccagaaacauugacgcaacacaaacuggaaauuacaacuauaaguacaggagccuucggcacggcaaacugcguccauucgagcgcgacaucuccaaugugccuuuuucucccgauggcaagccauguacacccccugcuuucaacugcuauuggccauugaaugacuacggguuuuauauaaccaacggaauugguuaccagccguacagagucgugguuuugagcuucgaacugcucaaugcccccgcuacugugugcggcccuaaacugucaaccgaucuuaucaagaaccaguguguaaauuucaacuuuaaugggcugacaggaaccggcgucuugacuccaaguuccaaaagguuccagcccuuucaacaguucggucgggacgugagcgauuuuacggacucuguucgagauccuaagacaucagagauccucgacauuaguccaugcagcuucgggggcguguccgucaucacccccggaacuaacaccucuucggaaguggccguacuguaucaggaugugaauuguacagacguuccggucgcaauucaugccgaucaauuaaccccuagcuggcgcgugcacuccacuggcaacaacguguuucagacacaggcugggugccugauaggagcggagcacgucgacacgucauacgaaugugauaucccaauuggugcaggcaucugcgccaguuaucauaccguuucuagccuaagauccacuucacaaaagagcaucguggcuuacacaaugucucucggggccgacuccaguauugcauauagcaauaacaccauagccauccccacaaauuucucuauuuccaucacuaccgaggugaugccuguaucaauggcuaaaacgagugucgacuguaacauguacauuugcggagauagcaccgagugugccaaucugcuuuugcaguauggcucguuuugcacacagcugaacagggcacucuccgguaucgcgguggaacaggaccggaauacucgcgagguuuucgcucaggugaagcaaauguacaaaacccccacacugaaggauuuugggggcuucaacuucucucagauacuuccagacccucugaaacccacuaagaggagcuuuaucgaagaucuacucuucaauaaggucacccuggccgacgcaggauuuaugaaacaguacggcgaguguuuaggggauauuaacgccagagaccugaucugcgcucagaaguucaauggacuaacggugcucccaccgcugcuuacagaugacaugauugccgcauauaccgcugccuugguuucagguacugcgacagccggcuggaccuuuggggcuggagcagcccugcaaaucccuuucgcuaugcagauggccuaccguuuuaacggcauaggugugacucagaauguacucuaugaaaaccagaaacaaauugcaaaucaguucaacaaggcgaucagucagauucaagagucccugaccacaacgucuaccgccuuagggaaacugcaggaugucgugaaccagaaugcucaggcccuuaacacuuuggugaagcaacucagcuccaauuuuggcgcaaucucaagcguccugaacgacauacuaagucggcuggaucccccagaggcugaaguucagaucgaccgacucauuacaggaagacugcagucucuucagaccuacgugacacaacaguugaucagggccgcagagauucgcgccuccgcuaaucuggcggccacuaagaugagcgaaugcguauuaggccagucgaaacggguggacuucugugggaagggauaucaccucaugucauuuccccaggcagcuccucauggcgucguguuccugcacguuaccuacgugccaucucaagagagaaacuuuacgacagcccccgccaucugccacgaagguaaggcuuauuucccuagggagggggucuucguguuuaauggaaccaguugguucauaacucagcgcaacuuuuucuccccgcagauuaucaccacagauaauacuuuuguuagcggcucuugugacguggucaucgguauuaucaacaauaccguauacgauccacuucaacccgagcuggacagcuucaaggaagaguuggauaaauacuuuaagaaccauacauccccugacguggaucucggcgacauuucagggauaaaugcaaguguugugaacauccagaaagaaauugaucgacugaaugaggucgccaagaaccuaaaugagagccugaucgaccuccaggaacugggaaaguaugagcaguacauuaaauggccaugguauguguggcuuggcuucaucgcgggguugauagcuaucguaauggugacgauucuguuaugcuguaugaccucuugcuguuccugccucaagggagccuguucaugcggcaguuguugcaaauuugaugaagacgacagcgagcccguccugaaggguguuaaacuucacuacacuuga

SEQ ID NO: 15023 - RNA, 3576 nt, Artificial Sequence
  Bat SARS-like CoV/WIV1__AGZ48828.1 spike protein CDS human (variant)
augaagcugcucgugcuugucuucgccacccugguuagcuccuacacaaucgagaaaugcuuggacuuugaugacagaacucccccugcuaacacgcaguucuuaucuucacacaggggcguguauuacccagaugacauuuuucggaguaauguacugcaucuagugcaagaucacuuccucccguuugacagcaacgucacccgcuucauaacauuugggcugaauuucgauaaccccaucauuccuuuuaaggacggaaucuauuucgcagccacugaaaaauccaaugugauucgagguuggguuuuuggcucuaccaugaacaauaagucgcagucagugaucauaaugaacaauagcacaaaccuugucauccgugcguguaauuucgagcugugcgauaacccauuuuucgugguauugaaaaguaauaacacccagauucccuccuacaucuucaauaacgcuuuuaacuguacuuucgaauauguuucuaaggacuuuaaucucgaucugggggagaagccuggaaacuucaaagaccugagagaauuuguguucaggaauaaggauggcuuucuccaugucuacagcgguuaucagccaauuuccgccgcaucaggguuacccacaggauucaacgcccugaaaccuaucuuuaaacuuccauugggcauaaauauuaccaacuuccggacgcugcuaacugcuuuuccgccccgcccugacuacuggggcaccagugcagccgcuuacuucgugggguaucucaaaccaacaacuuuuaugcugaaguacgacgagaauggaaccaucacagaugccguggacugcagccaaaacccccuugcggagcugaaguguucugucaaauccuucgaaauugauaaggguaucuaucagaccucaaauuucagaguugcaccuagcaaagaggugguaagguuuccaaacaucacgaauuugugccccuucggcgaaguguuuaacgccacuacauucccgagugucuacgcuugggagcggaagcgcauuucuaauuguguggccgacuauuccguucucuacaacagcaccucguuuucuacuuucaaaugcuaugggguguccgcaacaaagcugaaugauuuauguuuuucaaacgucuacgcugacaguuucgugguaaaaggagaugacguucgacagauagccccuggccagaccggugugaucgcggauuacaacuauaagcugcccgacgauuuuacggggugcguccucgccuggaauaccagaaacauugacgcaacacaaacuggaaauuacaacuauaaguacaggagccuucggcacggcaaacugcguccauucgagcgcgacaucuccaaugugccuuuuucucccgauggcaagccauguacacccccugcuuucaacugcuauuggccauugaaugacuacggguuuuauauaaccaacggaauugguuaccagccguacagagucgugguuuugagcuucgaacugcucaaugcccccgcuacugugugcggcccuaaacugucaaccgaucuuaucaagaaccaguguguaaauuucaacuuuaaugggcugacaggaaccggcgucuugacuccaaguuccaaaagguuccagcccuuucaacaguucggucgggacgugagcgauuuuacggacucuguucgagauccuaagacaucagagauccucgacauuaguccaugcagcuucgggggcguguccgucaucacccccggaacuaacaccucuucggaaguggccguacuguaucaggaugugaauuguacagacguuccggucgcaauucaugccgaucaauuaaccccuagcuggcgcgugcacuccacuggcaacaacguguuucagacacaggcugggugccugauaggagcggagcacgucgacacgucauacgaaugugauaucccaauuggugcaggcaucugcgccaguuaucauaccguuucuagccuaagauccacuucacaaaagagcaucguggcuuacacaaugucucucggggccgacuccaguauugcauauagcaauaacaccauagccauccccacaaauuucucuauuuccaucacuaccgaggugaugccuguaucaauggcuaaaacgagugucgacuguaacauguacauuugcggagauagcaccgagugugccaaucugcuuuugcaguauggcucguuuugcacacagcugaacagggcacucuccgguaucgcgguggaacaggaccggaauacucgcgagguuuucgcucaggugaagcaaauguacaaaacccccacacugaaggauuuugggggcuucaacuucucucagauacuuccagacccucugaaacccacuaagaggagcuuuaucgaagaucuacucuucaauaaggucacccuggccgacgcaggauuuaugaaacaguacggcgaguguuuaggggauauuaacgccagagaccugaucugcgcucagaaguucaauggacuaacggugcucccaccgcugcuuacagaugacaugauugccgcauauaccgcugccuugguuucagguacugcgacagccggcuggaccuuuggggcuggagcagcccugcaaaucccuuucgcuaugcagauggccuaccguuuuaacggcauaggugugacucagaauguacucuaugaaaaccagaaacaaauugcaaaucaguucaacaaggcgaucagucagauucaagagucccugaccacaacgucuaccgccuuagggaaacugcaggaugucgugaaccagaaugcucaggcccuuaacacuuuggugaagcaacucagcuccaauuuuggcgcaaucucaagcguccugaacgacauacuaagucggcuggaucccccagaggcugaaguucagaucgaccgacucauuacaggaagacugcagucucuucagaccuacgugacacaacaguugaucagggccgcagagauucgcgccuccgcuaaucuggcggccacuaagaugagcgaaugcguauuaggccagucgaaacggguggacuucugugggaagggauaucaccucaugucauuuccccaggcagcuccucauggcgucguguuccugcacguuaccuacgugccaucucaagagagaaacuuuacgacagcccccgccaucugccacgaagguaaggcuuauuucccuagggagggggucuucguguuuaauggaaccaguugguucauaacucagcgcaacuuuuucuccccgcagauuaucaccacagauaauacuuuuguuagcggcucuugugacguggucaucgguauuaucaacaauaccguauacgauccacuucaacccgagcuggacagcuucaaggaagaguuggauaaauacuuuaagaaccauacauccccugacguggaucucggcgacauuucagggauaaaugcaaguguugugaacauccagaaagaaauugaucgacugaaugaggucgccaagaaccuaaaugagagccugaucgaccuccaggaacugggaaaguaugagcaguga

SEQ ID NO: 15024 - RNA, 3657 nt, Artificial Sequence
  Bat SARS-like CoV/WIV1__AGZ48828.1 spike protein CDS human (variant)
augaagcugcucgugcuugucuucgccacccugguuagcuccuacacaaucgagaaaugcuuggacuuugaugacagaacucccccugcuaacacgcaguucuuaucuucacacaggggcguguauuacccagaugacauuuuucggaguaauguacugcaucuagugcaagaucacuuccucccguuugacagcaacgucacccgcuucauaacauuugggcugaauuucgauaaccccaucauuccuuuuaaggacggaaucuauuucgcagccacugaaaaauccaaugugauucgagguuggguuuuuggcucuaccaugaacaauaagucgcagucagugaucauaaugaacaauagcacaaaccuugucauccgugcguguaauuucgagcugugcgauaacccauuuuucgugguauugaaaaguaauaacacccagauucccuccuacaucuucaauaacgcuuuuaacuguacuuucgaauauguuucuaaggacuuuaaucucgaucugggggagaagccuggaaacuucaaagaccugagagaauuuguguucaggaauaaggauggcuuucuccaugucuacagcgguuaucagccaauuuccgccgcaucaggguuacccacaggauucaacgcccugaaaccuaucuuuaaacuuccauugggcauaaauauuaccaacuuccggacgcugcuaacugcuuuuccgccccgcccugacuacuggggcaccagugcagccgcuuacuucgugggguaucucaaaccaacaacuuuuaugcugaaguacgacgagaauggaaccaucacagaugccguggacugcagccaaaacccccuugcggagcugaaguguucugucaaauccuucgaaauugauaaggguaucuaucagaccucaaauuucagaguugcaccuagcaaagaggugguaagguuuccaaacaucacgaauuugugccccuucggcgaaguguuuaacgccacuacauucccgagugucuacgcuugggagcggaagcgcauuucuaauuguguggccgacuauuccguucucuacaacagcaccucguuuucuacuuucaaaugcuaugggguguccgcaacaaagcugaaugauuuauguuuuucaaacgucuacgcugacaguuucgugguaaaaggagaugacguucgacagauagccccuggccagaccggugugaucgcggauuacaacuauaagcugcccgacgauuuuacggggugcguccucgccuggaauaccagaaacauugacgcaacacaaacuggaaauuacaacuauaaguacaggagccuucggcacggcaaacugcguccauucgagcgcgacaucuccaaugugccuuuuucucccgauggcaagccauguacacccccugcuuucaacugcuauuggccauugaaugacuacggguuuuauauaaccaacggaauugguuaccagccguacagagucgugguuuugagcuucgaacugcucaaugcccccgcuacugugugcggcccuaaacugucaaccgaucuuaucaagaaccaguguguaaauuucaacuuuaaugggcugacaggaaccggcgucuugacuccaaguuccaaaagguuccagcccuuucaacaguucggucgggacgugagcgauuuuacggacucuguucgagauccuaagacaucagagauccucgacauuaguccaugcagcuucgggggcguguccgucaucacccccggaacuaacaccucuucggaaguggccguacuguaucaggaugugaauuguacagacguuccggucgcaauucaugccgaucaauuaaccccuagcuggcgcgugcacuccacuggcaacaacguguuucagacacaggcugggugccugauaggagcggagcacgucgacacgucauacgaaugugauaucccaauuggugcaggcaucugcgccaguuaucauaccguuucuagccuaagauccacuucacaaaagagcaucguggcuuacacaaugucucucggggccgacuccaguauugcauauagcaauaacaccauagccauccccacaaauuucucuauuuccaucacuaccgaggugaugccuguaucaauggcuaaaacgagugucgacuguaacauguacauuugcggagauagcaccgagugugccaaucugcuuuugcaauauggcucguuuugcacacagcugaacagggcacucuccgguaucgcgguggaacaggaccggaauacucgcgagguuuucgcucaggugaagcaaauguacaaaacccccacacugaaggauuuugggggcuucaacuucucucagauacuuccagacccucugaaacccacuaagaggagcuuuaucgaagaucuacucuucaauaaggucacccuggccgacgcaggauuuaugaaacaguacggcgaguguuuaggggauauuaacgccagagaccugaucugcgcucagaaguucaauggacuaacggugcucccaccgcugcuuacagaugacaugauugccgcauauaccgcugccuugguuucagguacugcgacagccggcuggaccuuuggggcuggagcagcccugcaaaucccuuucgcuaugcagauggccuaccguuuuaacggcauaggugugacucagaauguacucuaugaaaaccagaaacaaauugcaaaucaguucaacaaggcgaucagucagauucaagagucccugaccacaacgucuaccgccuuagggaaacugcaggaugucgugaaccagaaugcucaggcccuuaacacuuuggugaagcaacucagcuccaauuuuggcgcaaucucaagcguccugaacgacauacuaagucggcuggaucccccagaggcugaaguucagaucgaccgacucauuacaggaagacugcagucucuucagaccuacgugacacaacaguugaucagggccgcagagauucgcgccuccgcuaaucuggcggccacuaagaugagcgaaugcguauuaggccagucgaaacggguggacuucugugggaagggauaucaccucaugucauuuccccaggcagcuccucauggcgucguguuccugcacguuaccuacgugccaucucaagagagaaacuuuacgacagcccccgccaucugccacgaagguaaggcuuauuucccuagggagggggucuucguguuuaauggaaccaguugguucauaacucagcgcaacuuuuucuccccgcagauuaucaccacagauaauacuuuuguuagcggcucuugugacguggucaucgguauuaucaacaauaccguauacgauccacuucaacccgagcuggacagcuucaaggaagaguuggauaaauacuuuaagaaccauacauccccugacguggaucucggcgacauuucagggauaaaugcaaguguugugaacauccagaaagaaauugaucgacugaaugaggucgccaagaaccuaaaugagagccugaucgaccuccaggaacugggaaaguaugagcagggcggguacauuccagaagcgccccgggauggacaggcuuaugugcguaaagacggcgaguggguacuuuugucuacguucuga

SEQ ID NO: 15025 - RNA, 3825 nt, Artificial Sequence
  BatCoV/HKU9-1 BF_005I__YP_001039971.1 spike protein CDS human (1-1274)
augcugcucauccuugugcugggcgucagcuuggccgcugcauccagacccgagugcuucaacccuagguuuaccuuaacaccacugaaucacacucuaaacuacacgucuauuaaggccaaaguuucaaaugugcuccugccggaccccuauauagcguacagugggcagacccuucggcaaaaccuguucauggcugauaugagcaauacaaucuuguauccuguaacuccacccgccaacggagcaaaugguggcuuuauuuacaacaccuccaucauuccugugucugccggacucuucgucaauacauggauguaucgccagccagcuucgucacgagcauacugucaggaacccuuugggguggccuucggcgacaccuuugagaacgaucguaucgcuauacugaucauggccccugacaaucuggguagcuggagugcgguugcaccaagaaaccagacuaauauuuaucucuuagugugcuccaacgccacacuguguaucaauccgggguucaacagguggggacccgcuggcucuuuuauugccccugaugcacuugucgaccauagcaacuccugcuucgugaauaacaccuuuucaguaaauaucaguacgagccggauaucuuuggcuuuccuguuuaaggauggcgaccuacucauuuaccacuccggguggcugccaacuucaaacuucgaacauggauucagccgcgguagucaccccaugaccuacuuuaugucucuuccuguuggcgggaaucugccaagagcccaauucuuucaguccaucgugaggagcaacgcgauugauaaaggagacggcauguguacaaauuucgaugucaacuugcauguggcccaccucaucaaucgggaccuguuagugucguauuuuaacaaugguucugucgcaaacgcugccgauugcgcugacuccgccgcagaggaacuguacuguguuacugggucauucgaucccccgaccggaguguauccucucagucgcuaccgagcccagguagcuggcuuugugagagucacacagaggggcagcuauugcacgcccccauacuccgugcuucaagacccuccccagccaguuguguggcggcguuauaugcuguacgacugugucuucgauuuuaccgugguaguugacucuuugcccacucaccagcuacagugcuacggggugagcccucgcagacuggcgucaauguguuauggaagugucacacucgaugugaugaggaucaaugagacccaucugaacaaucuuuucaaccgggucccagacacuuuuucccuguacaacuaugcauugccggauaauuucuacgguugccuccacgccuuuuaucugaacagcacagcucccuacgccguggcaaaucgauucccuauuaagccaggcgggcgccaaucuaacucagccuucauagacaccguuaucaaugcugcccauuauagucccuuuagcuacguguacggauuagcaguaauuacgcugaaaccugcggcuggcuccaagcuagucugcccaguggccaacgauaccguugugaucacagacagauguguccaguauaaucucuacgguuauacugggaccggcgugcugucuaagaacacaucgcuuguaauacccgauggaaaaguguucacugcaagcuccaccggcacaauuaucgggguuucaaucaauaguaccacuuacucuauuaugccgugcgucacggugccugugagcgucggauaucacccaaacuuugagagggccuugcuguucaauggucucuccuguucacagcggagccgcgcuguuacagaacccgugucugugcugugguccgccagugcaaccgcucaagacgccuuugacacuccuagcggcugcguagucaacguggagcuuagaaauaccacaaucguuaacaccugugcgaugcccauuggaaauucucugugcuucauaaacggguccaucgccacugcuaacgcagauucauugccaaggcuccagcuggugaauuacgacccuuuauaugauaacaguacagccacgcccaugaccccagucuacugggugaagguuccgacuaauuuuacacugagcgcuaccgaagaguacauucagacaacugccccuaaaaucaccaucgacugugcacguuaucuaugcggcgauucgucccggugucucaacgugcugcuucacuacgguacguucugcaaugacauuaacaaggcguugucucgaguaagcaccauacuggauucagcccuccugaguuuagucaaagagcuguccaucaauacaagagacgaagugacuaccuuuucuuucgauggggacuauaacuuuacaggccuuaugggauguuugggccccaauugcggggcuacuaccuacaggagcgccuucuccgaucuccuguaugacaaggugcgcauuacggauccaggauuuaugcagucauaccaaaagugcaucgacagccagugggguggcaguauucgggaccuacuguguacacagaccuauaacgggaucgcaguccugcccccuauaguuucuccagcuaugcaggcccucuacacuucccuuuuggugggagcaguagccagcucgggcuacacauucgguaucaccucagcuggggugauucccuucgcgacucaacugcaguuuagauuaaauggcaucggagucaccacacaggugcucguugagaaccagaaacugauugccucuaguuucaauaacgcacuugugaauauccaaaagggcuuuacggaaaccuccauagcucugagcaaaaugcaggaugucauuaaccagcaugccgcccaguugcacacucucgugguucaacuggggaacucuuucggagcuaucagcuccucaauuaaugagaucuuuaguaggcuagaaggccuggcagccaacgcggagguggaccgccucauaaauggucgaaugaugguccugaacacauauguaacccagcuuuugauccaggcuagcgaggccaaggcacaaaaugcccuggcugcacagaaaauuucugaaugcgugaaggcccaguccuuacggaacgauuucugugggaauggaacacauguucucucaaucccucagcuggcgccgaacggcgugcuuuuuauucacuacgcuuauacuccaaccgaguacgccuucguccaaacgagugcaggucugugccauaauggcacaggguaugcuccccgucagggaauguuugugcuaccuaacaauaccaacauguggcacuucacuaccaugcaguuuuacaauccaguaaacaucagcgccuccaauacacaggugcucacuucuuguucggucaacuauaccagcguuaauuacacagugcuggaacccucagugccuggcgacuacgauuuccaaaaagaguucgacaaguuuuauaagaacuuguccacgauauucaacaauaccuuuaacccgaaugauuucaacuuuaguacugucgacgugacagcccagauuaaaucucugcacgauguuguaaaucaguuaaaccagagcuucaucgaccucaagaaacugaauguguacgaaaagaccaucaaauggcccugguaugucuggcuugcaaugauugcugggaucgugggacugguuuuggccgugauuaugcucaugugcaugacuaacuguugcuccuguuuuaagggcaugugcgauuguagaaggugcugcgguucauacgacucuuaugaugacgucuacccagcggugcgcguaaauaagaaacggacagucuga

SEQ ID NO: 15026 - RNA, 3825 nt, Artificial Sequence
  BatCoV/HKU9-1 BF_005I__YP_001039971.1 spike protein CDS human (1-1274)(G983P_L984P)
augcugcucauccuugugcugggcgucagcuuggccgcugcauccagacccgagugcuucaacccuagguuuaccuuaacaccacugaaucacacucuaaacuacacgucuauuaaggccaaaguuucaaaugugcuccugccggaccccuauauagcguacagugggcagacccuucggcaaaaccuguucauggcugauaugagcaauacaaucuuguauccuguaacuccacccgccaacggagcaaaugguggcuuuauuuacaacaccuccaucauuccugugucugccggacucuucgucaauacauggauguaucgccagccagcuucgucacgagcauacugucaggaacccuuugggguggccuucggcgacaccuuugagaacgaucguaucgcuauacugaucauggccccugacaaucuggguagcuggagugcgguugcaccaagaaaccagacuaauauuuaucucuuagugugcuccaacgccacacuguguaucaauccgggguucaacagguggggacccgcuggcucuuuuauugccccugaugcacuugucgaccauagcaacuccugcuucgugaauaacaccuuuucaguaaauaucaguacgagccggauaucuuuggcuuuccuguuuaaggauggcgaccuacucauuuaccacuccggguggcugccaacuucaaacuucgaacauggauucagccgcgguagucaccccaugaccuacuuuaugucucuuccuguuggcgggaaucugccaagagcccaauucuuucaguccaucgugaggagcaacgcgauugauaaaggagacggcauguguacaaauuucgaugucaacuugcauguggcccaccucaucaaucgggaccuguuagugucguauuuuaacaaugguucugucgcaaacgcugccgauugcgcugacuccgccgcagaggaacuguacuguguuacugggucauucgaucccccgaccggaguguauccucucagucgcuaccgagcccagguagcuggcuuugugagagucacacagaggggcagcuauugcacgcccccauacuccgugcuucaagacccuccccagccaguuguguggcggcguuauaugcuguacgacugugucuucgauuuuaccgugguaguugacucuuugcccacucaccagcuacagugcuacggggugagcccucgcagacuggcgucaauguguuauggaagugucacacucgaugugaugaggaucaaugagacccaucugaacaaucuuuucaaccgggucccagacacuuuuucccuguacaacuaugcauugccggauaauuucuacgguugccuccacgccuuuuaucugaacagcacagcucccuacgccguggcaaaucgauucccuauuaagccaggcgggcgccaaucuaacucagccuucauagacaccguuaucaaugcugcccauuauagucccuuuagcuacguguacggauuagcaguaauuacgcugaaaccugcggcuggcuccaagcuagucugcccaguggccaacgauaccguugugaucacagacagauguguccaguauaaucucuacgguuauacugggaccggcgugcugucuaagaacacaucgcuuguaauacccgauggaaaaguguucacugcaagcuccaccggcacaauuaucgggguuucaaucaauaguaccacuuacucuauuaugccgugcgucacggugccugugagcgucggauaucacccaaacuuugagagggccuugcuguucaauggucucuccuguucacagcggagccgcgcuguuacagaacccgugucugugcugugguccgccagugcaaccgcucaagacgccuuugacacuccuagcggcugcguagucaacguggagcuuagaaauaccacaaucguuaacaccugugcgaugcccauuggaaauucucugugcuucauaaacggguccaucgccacugcuaacgcagauucauugccaaggcuccagcuggugaauuacgacccuuuauaugauaacaguacagccacgcccaugaccccagucuacugggugaagguuccgacuaauuuuacacugagcgcuaccgaagaguacauucagacaacugccccuaaaaucaccaucgacugugcacguuaucuaugcggcgauucgucccggugucucaacgugcugcuucacuacgguacguucugcaaugacauuaacaaggcguugucucgaguaagcaccauacuggauucagcccuccugaguuuagucaaagagcuguccaucaauacaagagacgaagugacuaccuuuucuuucgauggggacuauaacuuuacaggccuuaugggauguuugggccccaauugcggggcuacuaccuacaggagcgccuucuccgaucuccuguaugacaaggugcgcauuacggauccaggauuuaugcagucauaccaaaagugcaucgacagccagugggguggcaguauucgggaccuacuguguacacagaccuauaacgggaucgcaguccugcccccuauaguuucuccagcuaugcaggcccucuacacuucccuuuuggugggagcaguagccagcucgggcuacacauucgguaucaccucagcuggggugauucccuucgcgacucaacugcaguuuagauuaaauggcaucggagucaccacacaggugcucguugagaaccagaaacugauugccucuaguuucaauaacgcacuugugaauauccaaaagggcuuuacggaaaccuccauagcucugagcaaaaugcaggaugucauuaaccagcaugccgcccaguugcacacucucgugguucaacuggggaacucuuucggagcuaucagcuccucaauuaaugagaucuuuaguaggcuagaaccuccggcagccaacgcggagguggaccgccugauaaauggccgaaugaugguccucaacacauauguaacccagcugcuuauccaggcuagcgaggccaaggcacaaaaugccuuggcugcacagaaaauuucugaaugcgugaaggcccagucccugcggaacgauuucugugguaaugggacacauguuuuaucaaucccacagcucgcgcccaacggagugcuguuuauucacuacgcuuauacuccuaccgaguacgccuucguccaaacgagugcaggccuuugccauaaugguacaggcuaugccccacgucaggggauguuugugcugcccaacaauaccaacauguggcacuucacuaccaugcaguuuuacaauccuguaaacaucagcgcuuccaauacacaggugcuaacuucuuguucggucaacuauaccagcguuaauuacacagugcucgaaccgucagugcccggagacuacgauuuccaaaaagaguucgacaaguuuuauaagaaccuguccacgauauucaacaauaccuuuaacccaaaugauuucaacuuuaguacugucgacgugacagcccagauuaaaucuuugcacgauguuguaaaucagcugaaccagagcuucaucgacuuaaagaaacucaauguguacgaaaagaccaucaaauggccuugguaugucuggcuggcaaugauugcuggcaucguggggcuuguucuggccgugauuauguugaugugcaugacuaacuguugcuccuguuuuaagggaaugugcgauuguagaaggugcugcggcucauacgacucuuaugaugacgucuaccccgcggugcgcguaaauaagaaacggacagucuga

SEQ ID NO: 15027 - RNA, 3624 nt, Artificial Sequence
  BatCoV/HKU9-1 BF_005I__YP_001039971.1 spike protein CDS human (variant)
augcugcucauccuugugcugggcgucagcuuggccgcugcauccagacccgagugcuucaacccuagguuuaccuuaacaccacugaaucacacucuaaacuacacgucuauuaaggccaaaguuucaaaugugcuccugccggaccccuauauagcguacagugggcagacccuucggcaaaaccuguucauggcugauaugagcaauacaaucuuguauccuguaacuccacccgccaacggagcaaaugguggcuuuauuuacaacaccuccaucauuccugugucugccggacucuucgucaauacauggauguaucgccagccagcuucgucacgagcauacugucaggaacccuuugggguggccuucggcgacaccuuugagaacgaucguaucgcuauacugaucauggccccugacaaucuggguagcuggagugcgguugcaccaagaaaccagacuaauauuuaucucuuagugugcuccaacgccacacuguguaucaauccgggguucaacagguggggacccgcuggcucuuuuauugccccugaugcacuugucgaccauagcaacuccugcuucgugaauaacaccuuuucaguaaauaucaguacgagccggauaucuuuggcuuuccuguuuaaggauggcgaccuacucauuuaccacuccggguggcugccaacuucaaacuucgaacauggauucagccgcgguagucaccccaugaccuacuuuaugucucuuccuguuggcgggaaucugccaagagcccaauucuuucaguccaucgugaggagcaacgcgauugauaaaggagacggcauguguacaaauuucgaugucaacuugcauguggcccaccucaucaaucgggaccuguuagugucguauuuuaacaaugguucugucgcaaacgcugccgauugcgcugacuccgccgcagaggaacuguacuguguuacugggucauucgaucccccgaccggaguguauccucucagucgcuaccgagcccagguagcuggcuuugugagagucacacagaggggcagcuauugcacgcccccauacuccgugcuucaagacccuccccagccaguuguguggcggcguuauaugcuguacgacugugucuucgauuuuaccgugguaguugacucuuugcccacucaccagcuacagugcuacggggugagcccucgcagacuggcgucaauguguuauggaagugucacacucgaugugaugaggaucaaugagacccaucugaacaaucuuuucaaccgggucccagacacuuuuucccuguacaacuaugcauugccggauaauuucuacgguugccuccacgccuuuuaucugaacagcacagcucccuacgccguggcaaaucgauucccuauuaagccaggcgggcgccaaucuaacucagccuucauagacaccguuaucaaugcugcccauuauagucccuuuagcuacguguacggauuagcaguaauuacgcugaaaccugcggcuggcuccaagcuagucugcccaguggccaacgauaccguugugaucacagacagauguguccaguauaaucucuacgguuauacugggaccggcgugcugucuaagaacacaucgcuuguaauacccgauggaaaaguguucacugcaagcuccaccggcacaauuaucgggguuucaaucaauaguaccacuuacucuauuaugccgugcgucacggugccugugagcgucggauaucacccaaacuuugagagggccuugcuguucaauggucucuccuguucacagcggagccgcgcuguuacagaacccgugucugugcugugguccgccagugcaaccgcucaagacgccuuugacacuccuagcggcugcguagucaacguggagcuuagaaauaccacaaucguuaacaccugugcgaugcccauuggaaauucucugugcuucauaaacggguccaucgccacugcuaacgcagauucauugccaaggcuccagcuggugaauuacgacccuuuauaugauaacaguacagccacgcccaugaccccagucuacugggugaagguuccgacuaauuuuacacugagcgcuaccgaagaguacauucagacaacugccccuaaaaucaccaucgacugugcacguuaucuaugcggcgauucgucccggugucucaacgugcugcuucacuacgguacguucugcaaugacauuaacaaggcguugucucgaguaagcaccauacuggauucagcccuccugaguuuagucaaagagcuguccaucaauacaagagacgaagugacuaccuuuucuuucgauggggacuauaacuuuacaggccuuaugggauguuugggccccaauugcggggcuacuaccuacaggagcgccuucuccgaucuccuguaugacaaggugcgcauuacggauccaggauuuaugcagucauaccaaaagugcaucgacagccagugggguggcaguauucgggaccuacuguguacacagaccuauaacgggaucgcaguccugcccccuauaguuucuccagcuaugcaggcccucuacacuucccuuuuggugggagcaguagccagcucgggcuacacauucgguaucaccucagcuggggugauucccuucgcgacucaacugcaguuuagauuaaauggcaucggagucaccacacaggugcucguugagaaccagaaacugauugccucuaguuucaauaacgcacuugugaauauccaaaagggcuuuacggaaaccuccauagcucugagcaaaaugcaggaugucauuaaccagcaugccgcccaguugcacacucucgugguucaacuggggaacucuuucggagcuaucagcuccucaauuaaugagaucuuuaguaggcuagaaccuccggcagccaacgcggagguggaccgccugauaaauggccgaaugaugguccucaacacauauguaacccagcugcuuauccaggcuagcgaggccaaggcacaaaaugccuuggcugcacagaaaauuucugaaugcgugaaggcccagucccugcggaacgauuucugugguaaugggacacauguuuuaucaaucccacagcucgcgcccaacggagugcuguuuauucacuacgcuuauacuccuaccgaguacgccuucguccaaacgagugcaggccuuugccauaaugguacaggcuaugccccacgucaggggauguuugugcugcccaacaauaccaacauguggcacuucacuaccaugcaguuuuacaauccuguaaacaucagcgcuuccaauacacaggugcuaacuucuuguucggucaacuauaccagcguuaauuacacagugcucgaaccgucagugcccggagacuacgauuuccaaaaagaguucgacaaguuuuauaagaaccuguccacgauauucaacaauaccuuuaacccaaaugauuucaacuuuaguacugucgacgugacagcccagauuaaaucuuugcacgauguuguaaaucagcugaaccagagcuucaucgacuuaaagaaacucaauguguacgaaaaguga

SEQ ID NO: 15028 - RNA, 3705 nt, Artificial Sequence
  BatCoV/HKU9-1 BF_005I__YP_001039971.1 spike protein CDS human (variant)
augcugcucauccuugugcugggcgucagcuuggccgcugcauccagacccgagugcuucaacccuagguuuaccuuaacaccacugaaucacacucuaaacuacacgucuauuaaggccaaaguuucaaaugugcuccugccggaccccuauauagcguacagugggcaaacccuucggcaaaaccuguucauggcugauaugagcaauacaaucuuguauccuguaacuccacccgccaacggagcaaaugguggcuuuauuuacaacaccuccaucauuccugugucugccggacucuucgucaauacauggauguaucgccagccagcuucgucacgagcauacugucaggaacccuuugggguggccuucggcgacaccuuugagaacgaucguaucgcuauacugaucauggccccugacaaucuggguagcuggagugcgguugcaccaagaaaccagacuaauauuuaucucuuagugugcuccaacgccacacuguguaucaauccgggguucaacagguggggacccgcuggcucuuuuauugccccugaugcacuugucgaccauagcaacuccugcuucgugaauaacaccuuuucaguaaauaucaguacgagccggauaucuuuggcuuuccuguuuaaggauggcgaccuacucauuuaccacuccggguggcugccaacuucaaacuucgaacauggauucagccgcgguagucaccccaugaccuacuuuaugucucuuccuguuggcgggaaucugccaagagcccaauucuuucaguccaucgugaggagcaacgcgauugauaaaggagacggcauguguacaaauuucgaugucaacuugcauguggcccaccucaucaaucgggaccuguuagugucguauuuuaacaaugguucugucgcaaacgcugccgauugcgcugacuccgccgcagaggaacuguacuguguuacugggucauucgaucccccgaccggaguguauccucucagucgcuaccgagcccagguagcuggcuuugugagagucacacagaggggcagcuauugcacgcccccauacuccgugcuucaagacccuccccagccaguuguguggcggcguuauaugcuguacgacugugucuucgauuuuaccgugguaguugacucuuugcccacucaccagcuacagugcuacggggugagcccucgcagacuggcgucaauguguuauggaagugucacacucgaugugaugaggaucaaugagacccaucugaacaaucuuuucaaccgggucccagacacuuuuucccuguacaacuaugcauugccggauaauuucuacgguugccuccacgccuuuuaucugaacagcacagcucccuacgccguggcaaaucgauucccuauuaagccaggcgggcgccaaucuaacucagccuucauagacaccguuaucaaugcugcccauuauagucccuuuagcuacguguacggauuagcaguaauuacgcugaaaccugcggcuggcuccaagcuagucugcccaguggccaacgauaccguugugaucacagacagauguguccaguauaaucucuacgguuauacugggaccggcgugcugucuaagaacacaucgcuuguaauacccgauggaaaaguguucacugcaagcuccaccggcacaauuaucgggguuucaaucaauaguaccacuuacucuauuaugccgugcgucacggugccugugagcgucggauaucacccaaacuuugagagggccuugcuguucaauggucucuccuguucacagcggagccgcgcuguuacagaacccgugucugugcugugguccgccagugcaaccgcucaagacgccuuugacacuccuagcggcugcguagucaacguggagcuuagaaauaccacaaucguuaacaccugugcgaugcccauuggaaauucucugugcuucauaaacggguccaucgccacugcuaacgcagauucauugccaaggcuccagcuggugaauuacgacccuuuauaugauaacaguacagccacgcccaugaccccagucuacugggugaagguuccgacuaauuuuacacugagcgcuaccgaagaguacauucagacaacugccccuaaaaucaccaucgacugugcacguuaucuaugcggcgauucgucccggugucucaacgugcugcuucacuacgguacguucugcaaugacauuaacaaggcguugucucgaguaagcaccauacuggauucagcccuccugaguuuagucaaagagcuguccaucaauacaagagacgaagugacuaccuuuucuuucgauggggacuauaacuuuacaggccuuaugggauguuugggccccaauugcggggcuacuaccuacaggagcgccuucuccgaucuccuguaugacaaggugcgcauuacggauccaggauuuaugcagucauaccaaaagugcaucgacagccagugggguggcaguauucgggaccuacuguguacacagaccuauaacgggaucgcaguccugcccccuauaguuucuccagcuaugcaggcccucuacacuucccuuuuggugggagcaguagccagcucgggcuacacauucgguaucaccucagcuggggugauucccuucgcgacucaacugcaguuuagauuaaauggcaucggagucaccacacaggugcucguugagaaccagaaacugauugccucuaguuucaauaacgcacuugugaauauccaaaagggcuuuacggaaaccuccauagcucugagcaaaaugcaggaugucauuaaccagcaugccgcccaguugcacacucucgugguucaacuggggaacucuuucggagcuaucagcuccucaauuaaugagaucuuuaguaggcuagaaccuccggcagccaacgcggagguggaccgccugauaaauggccgaaugaugguccucaacacauauguaacccagcugcuuauccaggcuagcgaggccaaggcacaaaaugccuuggcugcacagaaaauuucugaaugcgugaaggcccagucccugcggaacgauuucugugguaaugggacacauguuuuaucaaucccacagcucgcgcccaacggagugcuguuuauucacuacgcuuauacuccuaccgaguacgccuucguccaaacgagugcaggccuuugccauaaugguacaggcuaugccccacgucaggggauguuugugcugcccaacaauaccaacauguggcacuucacuaccaugcaguuuuacaauccuguaaacaucagcgcuuccaauacacaggugcuaacuucuuguucggucaacuauaccagcguuaauuacacagugcucgaaccgucagugcccggagacuacgauuuccaaaaagaguucgacaaguuuuauaagaaccuguccacgauauucaacaauaccuuuaacccaaaugauuucaacuuuaguacugucgacgugacagcccagauuaaaucuuugcacgauguuguaaaucagcugaaccagagcuucaucgacuuaaagaaacucaauguguacgaaaagggcggguauaucccugaggcacccagagauggacaggcuuacgucaggaaagacggcgagugggugcugcuuuccaccuuuuga

SEQ ID NO: 15029 - RNA, 3483 nt, Artificial Sequence
  PDCoV/Swine/Thailand/S5011/2015__AMN91621.1 spike protein CDS human (1-1160)
augcagagagcccugcucaucaugacccuucugugcuuggcuagggcaaaguucgccgacgauuuacuggaccuacucacauuucccggcgcgcaccgguuccugcauaaaccuacucgcaacgauagcauucuuuacucccgagcuaauaacaauuuugacguggggguccugccaggauauccgacgaagaacguuaauuuguucucuccccucaccaacucaacacugccuauaaauggucugcaccguaguuaccaaccacucauguuaaacugucugacuaaaaucaccaaucagacacuuagcauguauuugcagcccuccgagauucagaccuacucuugcggcggggccauggugaaguaucaaacucaugaugcaguaagaaucauucuggaccuaaucgccacagauaggauaucgguggaagucgugggacaggcuggcgagaacuacguuuuuguguguucagaccaguucaauuauaccacggcacuccacaacagcaccuuuuucagucuuaauucccagcuguacugcuuuacuaacaauacauaccuggguaucuugccuccagaucucacugacuucaccgucuaucggacagggcaauuuuacgccaacggauaucuguuaggcacccugcccauuacggugaacuacguacgccucuauagaggccagcuuucugcuaauagcgcccauuucgcgcuggcaaacuugacugauacacuaaucacccugacuaauacaaccauuucccagaucacguacugugacaaaucaguuguggauaguauagccugccagaggagcucucaccaagucgaagacggguuuuauuccgacccuaagucagcugugcgggcccgccagcgaaccauugugacacucccaaagcugccggagcuugaagucguucagcugaacaucagcgcacacauggauuucggagaggcuagauuggacagugugacuauuaaugguaacaccucuuacuguguaacaaaacccuacuucaggcucgagacuaauuuucugugccggggcuguaccaugaacuuacguacagauaccugcuccuucgaccugagcgccgugaauaacgggaugucguuuucucaauucugucuauccacugaaucaggagcgugcgagaugaagaucaucgucacguauguguggaauuaccuccugcgccagagacuuuauguuacagccguggaaggccagacccauacugguaccacaaguguccacgcaaccgauacuagcuccgugauuacagacguaugcacggauuacaccauauaugggguuucuggaacuggcaucauuaaaccuagcgacuugcugcuccauaacggcaucgcuuuuacaucaccaaccggggagcuguacgccuucaagaauauaacaacuggaaaaacccuucaggugcugcccugugagacgccuagucaauugauugucaucaacaauaccguggucggugcuaucacauccagcaacucuacugaaaacaauagguuuaccacaacuauugugaccccaacguucuuuuauucaacaaacgccaccacucucaauugcacaaagcccguucugaguuacggcccgaucagcguguguuccgauggggcaauugccggaaccucuacuuuacagaacacccggccuucgauaguaagccuguacgacggcgagaucgaaauucccuccgcuuucucacuaaguguccagacagaguaucuccaggugcaagcggaacagguuaucguggauugcccacaguacgucuguaaugguaacucucgaugccugcagcuuuuggcacaauauacgagcgccuguuccaauaucgagguggcucugcacucaagcgcccagcucgacucucgcgagauuauauccauguuuaagaccaguacucagagccugcaguuagcaaacaucacaaauuucaaaggggacuacaacuuuucuuccauucugaccucaagaguaggcggaaggagugccaucgaagaucuuuuguucaauaaggugguuacaagcggccucgggacugucgaccaagauuauaaaucgugcucccggaacauggcuauugccgaccugguguguucucaguacuauaauggaaucauggugcuaccuggugucguugaugcagagaagauggcgauguacaccggcagccugacgggggcuaugguguucggaggccucacagccgcagccgcuauacccuuugccaccgcagugcaggcucgccugaacuacguagcccuucaaacuaaugucuugcaggaaaaccagaaaauccuggcggagucauucaaccaggccguggguaauauuaguuuagcucucuccucuguuaacgacgcaauccaacagaccagcgaagcccugaauacaguggcuauugccaucaagaaaauacagacugucgugaaccagcaaggggaggcacuuucccaccugaccgcgcaguugucaaauaacuuucaggccauuagcacaaguauccaggauauuuauaauagacucgaggaaguugaggcuaaccaacagguggacaggcugaucaauggccgucuagccgcacugaacgcuuacguaacgcagcuccugaaucaaaugucucagauacggcagucccgacuuuuggcccagcaaaagaucaacgaaugcgucaagagccagucgccaagauauggauucuguggcaaugggacccauaucuuuucacugacucagacagcacccaacggaauuuucuuuaugcacgccguguuagugccuaauaaauucaccagggucaacgcuucugcggguauuugcguugauaacacucgcggcuacagucuccagccacaacugauccuuuaucaguuuaauaacuccuggcgggugacaccgagaaauauguacgagcccaggcugccucgccaggccgacuucauacagcuaaccgauugcagcguaacguuuuauaacacuaccgcagcuaaucucccaaacauuauccccgacgugaucgaugucaaucaaacagugucugacauuaucgacaaccugccuaccgccacuccaccccagugggauguugggauuuacaauaacacaauauugaaucugaccguggaaaucaacgacuuacaggagcgaagcaagaaucucucccagauugccgaucggcugcaaaacuacaucgacaaucuuaacaauacacuggucgauuuggaguggcucaaccguguggaaacuuaucugaaauggccgugguacauuuggcuagcuaucgcacuggcccuuauagcguucguuaccauccucauuacgaucuuucuguguacaggaugcuguggcgguugcuucggguguugcggcggauguuucggcuuguuuucaaagaaaaagagauauaccgacgaucagccuacuccaaguuucaaguuuaaagagugguga

SEQ ID NO: 15030 - RNA, 3483 nt, Artificial Sequence
  PDCoV/Swine/Thailand/S5011/2015__AMN91621.1 spike protein CDS human (1-1160)(E855P_V856P)
augcagagagcccugcucaucaugacccuucugugcuuggcuagggcaaaguucgccgacgauuuacuggaccuacucacauuucccggcgcgcaccgguuccugcauaaaccuacucgcaacgauagcauucuuuacucccgagcuaauaacaauuuugacguggggguccugccaggauauccgacgaagaacguuaauuuguucucuccccucaccaacucaacacugccuauaaauggucugcaccguaguuaccaaccacucauguuaaacugucugacuaaaaucaccaaucagacacuuagcauguauuugcagcccuccgagauucagaccuacucuugcggcggggccauggugaaguaucaaacucaugaugcaguaagaaucauucuggaccuaaucgccacagauaggauaucgguggaagucgugggacaggcuggcgagaacuacguuuuuguguguucagaccaguucaauuauaccacggcacuccacaacagcaccuuuuucagucuuaauucccagcuguacugcuuuacuaacaauacauaccuggguaucuugccuccagaucucacugacuucaccgucuaucggacagggcaauuuuacgccaacggauaucuguuaggcacccugcccauuacggugaacuacguacgccucuauagaggccagcuuucugcuaauagcgcccauuucgcgcuggcaaacuugacugauacacuaaucacccugacuaauacaaccauuucccagaucacguacugugacaaaucaguuguggauaguauagccugccagaggagcucucaccaagucgaagacggguuuuauuccgacccuaagucagcugugcgggcccgccagcgaaccauugugacacucccaaagcugccggagcuugaagucguucagcugaacaucagcgcacacauggauuucggagaggcuagauuggacagugugacuauuaaugguaacaccucuuacuguguaacaaaacccuacuucaggcucgagacuaauuuucugugccggggcuguaccaugaacuuacguacagauaccugcuccuucgaccugagcgccgugaauaacgggaugucguuuucucaauucugucuauccacugaaucaggagcgugcgagaugaagaucaucgucacguauguguggaauuaccuccugcgccagagacuuuauguuacagccguggaaggccagacccauacugguaccacaaguguccacgcaaccgauacuagcuccgugauuacagacguaugcacggauuacaccauauaugggguuucuggaacuggcaucauuaaaccuagcgacuugcugcuccauaacggcaucgcuuuuacaucaccaaccggggagcuguacgccuucaagaauauaacaacuggaaaaacccuucaggugcugcccugugagacgccuagucaauugauugucaucaacaauaccguggucggugcuaucacauccagcaacucuacugaaaacaauagguuuaccacaacuauugugaccccaacguucuuuuauucaacaaacgccaccacucucaauugcacaaagcccguucugaguuacggcccgaucagcguguguuccgauggggcaauugccggaaccucuacuuuacagaacacccggccuucgauaguaagccuguacgacggcgagaucgaaauucccuccgcuuucucacuaaguguccagacagaguaucuccaggugcaagcggaacagguuaucguggauugcccacaguacgucuguaaugguaacucucgaugccugcagcuuuuggcacaauauacgagcgccuguuccaauaucgagguggcucugcacucaagcgcccagcucgacucucgcgagauuauauccauguuuaagaccaguacucagagccugcaguuagcaaacaucacaaauuucaaaggggacuacaacuuuucuuccauucugaccucaagaguaggcggaaggagugccaucgaagaucuuuuguucaauaaggugguuacaagcggccucgggacugucgaccaagauuauaaaucgugcucccggaacauggcuauugccgaccugguguguucucaguacuauaauggaaucauggugcuaccuggugucguugaugcagagaagauggcgauguacaccggcagccugacgggggcuaugguguucggaggccucacagccgcagccgcuauacccuuugccaccgcagugcaggcucgccugaacuacguagcccuucaaacuaaugucuugcaggaaaaccagaaaauccuggcggagucauucaaccaggccguggguaauauuaguuuagcucucuccucuguuaacgacgcaauccaacagaccagcgaagcccugaauacaguggcuauugccaucaagaaaauacagacugucgugaaccagcaaggggaggcacuuucccaccugaccgcgcaguugucaaauaacuuucaggccauuagcacaaguauccaggauauuuauaauagacucgagccacccgaagcuaaccaacagguugacaggcugaucaauggccgucuagccgcacugaacgcuuacgugacgcagcuccugaaucaaaugucucagauacggcagucccgacuuuuggcccagcaaaagaucaacgagugcguaaagagccagucgccuagauauggauucuguggcaaugggacccauaucuuuucacugacucagacagcaccaaacggaauuuucuuuaugcacgccgucuuagugccgaauaaauucaccagggugaacgcuucugcggguauuugcgucgauaacacucgcggcuacagucuccagccccaacugauccuuuaucaguuuaauaacuccuggcggguuacaccuagaaauauguacgaaccaaggcugccccgccaggccgacuucauacagcuaaccgauugcagcgugacguuuuauaacacuaccgcagcuaaucucccuaacauuaucccagacguaaucgaugugaaucaaacagucucugacauuaucgacaaccugcccaccgccacuccgccucagugggauguggggauuuacaauaacacaauauugaaucugaccguugagaucaacgacuuacaggaacgaagcaagaaucucucccagauugccgaucggcugcaaaacuacaucgacaaucuuaacaauacacugguggauuuggaguggcucaaccgugucgagacuuaucugaaauggccaugguacauuuggcuagcuaucgcacuggcccuuauagcguucgugaccauccucauuacgaucuuucuguguacaggaugcuguggcgguugcuucggguguugcggcggauguuucggcuuguuuucaaagaaaaagagauauaccgacgaucagcccacuccuaguuucaaguuuaaagaaugguga

SEQ ID NO: 15031 - RNA, 3282 nt, Artificial Sequence
  PDCoV/Swine/Thailand/S5011/2015__AMN91621.1 spike protein CDS human (variant)
augcagagagcccugcucaucaugacccuucugugcuuggcuagggcaaaguucgccgacgauuuacuggaccuacucacauuucccggcgcgcaccgguuccugcauaaaccuacucgcaacgauagcauucuuuacucccgagcuaauaacaauuuugacguggggguccugccaggauauccgacgaagaacguuaauuuguucucuccccucaccaacucaacacugccuauaaauggucugcaccguaguuaccaaccacucauguuaaacugucugacuaaaaucaccaaucagacacuuagcauguauuugcagcccuccgagauucagaccuacucuugcggcggggccauggugaaguaucaaacucaugaugcaguaagaaucauucuggaccuaaucgccacagauaggauaucgguggaagucgugggacaggcuggcgagaacuacguuuuuguguguucagaccaguucaauuauaccacggcacuccacaacagcaccuuuuucagucuuaauucccagcuguacugcuuuacuaacaauacauaccuggguaucuugccuccagaucucacugacuucaccgucuaucggacagggcaauuuuacgccaacggauaucuguuaggcacccugcccauuacggugaacuacguacgccucuauagaggccagcuuucugcuaauagcgcccauuucgcgcuggcaaacuugacugauacacuaaucacccugacuaauacaaccauuucccagaucacguacugugacaaaucaguuguggauaguauagccugccagaggagcucucaccaagucgaagacggguuuuauuccgacccuaagucagcugugcgggcccgccagcgaaccauugugacacucccaaagcugccggagcuugaagucguucagcugaacaucagcgcacacauggauuucggagaggcuagauuggacagugugacuauuaaugguaacaccucuuacuguguaacaaaacccuacuucaggcucgagacuaauuuucugugccggggcuguaccaugaacuuacguacagauaccugcuccuucgaccugagcgccgugaauaacgggaugucguuuucucaauucugucuauccacugaaucaggagcgugcgagaugaagaucaucgucacguauguguggaauuaccuccugcgccagagacuuuauguuacagccguggaaggccagacccauacugguaccacaaguguccacgcaaccgauacuagcuccgugauuacagacguaugcacggauuacaccauauaugggguuucuggaacuggcaucauuaaaccuagcgacuugcugcuccauaacggcaucgcuuuuacaucaccaaccggggagcuguacgccuucaagaauauaacaacuggaaaaacccuucaggugcugcccugugagacgccuagucaauugauugucaucaacaauaccguggucggugcuaucacauccagcaacucuacugaaaacaauagguuuaccacaacuauugugaccccaacguucuuuuauucaacaaacgccaccacucucaauugcacaaagcccguucugaguuacggcccgaucagcguguguuccgauggggcaauugccggaaccucuacuuuacagaacacccggccuucgauaguaagccuguacgacggcgagaucgaaauucccuccgcuuucucacuaaguguccagacagaguaucuccaggugcaagcggaacagguuaucguggauugcccacaguacgucuguaaugguaacucucgaugccugcagcuuuuggcacaauauacgagcgccuguuccaauaucgagguggcucugcacucaagcgcccagcucgacucucgcgagauuauauccauguuuaagaccaguacucagagccugcaguuagcaaacaucacaaauuucaaaggggacuacaacuuuucuuccauucugaccucaagaguaggcggaaggagugccaucgaagaucuuuuguucaauaaggugguuacaagcggccucgggacugucgaccaagauuauaaaucgugcucccggaacauggcuauugccgaccugguguguucucaguacuauaauggaaucauggugcuaccuggugucguugaugcagagaagauggcgauguacaccggcagccugacgggggcuaugguguucggaggccucacagccgcagccgcuauacccuuugccaccgcagugcaggcucgccugaacuacguagcccuucaaacuaaugucuugcaggaaaaccagaaaauccuggcggagucauucaaccaggccguggguaauauuaguuuagcucucuccucuguuaacgacgcaauccaacagaccagcgaagcccugaauacaguggcuauugccaucaagaaaauacagacugucgugaaccagcaaggggaggcacuuucccaccugaccgcgcaguugucaaauaacuuucaggccauuagcacaaguauccaggauauuuauaauagacucgagccacccgaagcuaaccaacagguugacaggcugaucaauggccgucuagccgcacugaacgcuuacgugacgcagcuccugaaucaaaugucucagauacggcagucccgacuuuuggcccagcaaaagaucaacgagugcguaaagagccagucgccuagauauggauucuguggcaaugggacccauaucuuuucacugacucagacagcaccaaacggaauuuucuuuaugcacgccgucuuagugccgaauaaauucaccagggugaacgcuucugcggguauuugcgucgauaacacucgcggcuacagucuccagccccaacugauccuuuaucaguuuaauaacuccuggcggguuacaccuagaaauauguacgaaccaaggcugccccgccaggccgacuucauacagcuaaccgauugcagcgugacguuuuauaacacuaccgcagcuaaucucccuaacauuaucccagacguaaucgaugugaaucaaacagucucugacauuaucgacaaccugcccaccgccacuccgccucagugggauguggggauuuacaauaacacaauauugaaucugaccguugagaucaacgacuuacaggaacgaagcaagaaucucucccagauugccgaucggcugcaaaacuacaucgacaaucuuaacaauacacugguggauuuggaguggcucaaccgugucgagacuuga

SEQ ID NO: 15032 - RNA, 3363 nt, Artificial Sequence
  PDCoV/Swine/Thailand/S5011/2015__AMN91621.1 spike protein CDS human (variant)
augcagagagcccugcucaucaugacccuucugugcuuggcuagggcaaaguucgccgacgauuuacuggaccuacucacauuucccggcgcgcaccgguuccugcauaaaccuacucgcaacgauagcauucuuuacucccgagcuaauaacaauuuugacguggggguccugccaggauauccgacgaagaacguuaauuuguucucuccccucaccaacucaacacugccuauaaauggucugcaccguaguuaccaaccacucauguuaaacugucugacuaaaaucaccaaucagacacuuagcauguauuugcagcccuccgagauucagaccuacucuugcggcggggccauggugaaguaucaaacucaugaugcaguaagaaucauucuggaccuaaucgccacagauaggauaucgguggaagucgugggacaggcuggcgagaacuacguuuuuguguguucagaccaguucaauuauaccacggcacuccacaacagcaccuuuuucagucuuaauucccagcuguacugcuuuacuaacaauacauaccuggguaucuugccuccagaucucacugacuucaccgucuaucggacagggcaauuuuacgccaacggauaucuguuaggcacccugcccauuacggugaacuacguacgccucuauagaggccagcuuucugcuaauagcgcccauuucgcgcuggcaaacuugacugauacacuaaucacccugacuaauacaaccauuucccagaucacguacugugacaaaucaguuguggauaguauagccugccagaggagcucucaccaagucgaagacggguuuuauuccgacccuaagucagcugugcgggcccgccagcgaaccauugugacacucccaaagcugccggagcuugaagucguucagcugaacaucagcgcacacauggauuucggagaggcuagauuggacagugugacuauuaaugguaacaccucuuacuguguaacaaaacccuacuucaggcucgagacuaauuuucugugccggggcuguaccaugaacuuacguacagauaccugcuccuucgaccugagcgccgugaauaacgggaugucguuuucucaauucugucuauccacugaaucaggagcgugcgagaugaagaucaucgucacguauguguggaauuaccuccugcgccagagacuuuauguuacagccguggaaggccagacccauacugguaccacaaguguccacgcaaccgauacuagcuccgugauuacagacguaugcacggauuacaccauauaugggguuucuggaacuggcaucauuaaaccuagcgacuugcugcuccauaacggcaucgcuuuuacaucaccaaccggggagcuguacgccuucaagaauauaacaacuggaaaaacccuucaggugcugcccugugagacgccuagucaauugauugucaucaacaauaccguggucggugcuaucacauccagcaacucuacugaaaacaauagguuuaccacaacuauugugaccccaacguucuuuuauucaacaaacgccaccacucucaauugcacaaagcccguucugaguuacggcccgaucagcguguguuccgauggggcaauugccggaaccucuacuuuacagaacacccggccuucgauaguaagccuguacgacggcgagaucgaaauucccuccgcuuucucacuaaguguccagacagaguaucuccaggugcaagcggaacagguuaucguggauugcccacaguacgucuguaaugguaacucucgaugccugcagcuuuuggcacaauauacgagcgccuguuccaauaucgagguggcucugcacucaagcgcccagcucgacucucgcgagauuauauccauguuuaagaccaguacucagagccugcaguuagcaaacaucacaaauuucaaaggggacuacaacuuuucuuccauucugaccucaagaguaggcggaaggagugccaucgaagaucuuuuguucaauaaggugguuacaagcggccucgggacugucgaccaagauuauaaaucgugcucccggaacauggcuauugccgaccugguguguucucaguacuauaauggaaucauggugcuaccuggugucguugaugcagagaagauggcgauguacaccggcagccugacgggggcuaugguguucggaggccucacagccgcagccgcuauacccuuugccaccgcagugcaggcucgccugaacuacguagcccuucaaacuaaugucuugcaggaaaaccagaaaauccuggcggagucauucaaccaggccguggguaauauuaguuuagcucucuccucuguuaacgacgcaauccaacagaccagcgaagcccugaauacaguggcuauugccaucaagaaaauacagacugucgugaaccagcaaggggaggcacuuucccaccugaccgcgcaguugucaaauaacuuucaggccauuagcacaaguauccaggauauuuauaauagacucgagccacccgaagcuaaccaacagguugacaggcugaucaauggccgucuagccgcacugaacgcuuacgugacgcagcuccugaaucaaaugucucagauacggcagucccgacuuuuggcccagcaaaagaucaacgagugcguaaagagccagucgccuagauauggauucuguggcaaugggacccauaucuuuucacugacucagacagcaccaaacggaauuuucuuuaugcacgccgucuuagugccgaauaaauucaccagggugaacgcuucugcggguauuugcgucgauaacacucgcggcuacagucuccagccccaacugauccuuuaucaguuuaauaacuccuggcggguuacaccuagaaauauguacgaaccaaggcugccccgccaggccgacuucauacagcuaaccgauugcagcgugacguuuuauaacacuaccgcagcuaaucucccuaacauuaucccagacguaaucgaugugaaucaaacagucucugacauuaucgacaaccugcccaccgccacuccgccucagugggauguggggauuuacaauaacacaauauugaaucugaccguugagaucaacgacuuacaggaacgaagcaagaaucucucccagauugccgaucggcugcaaaacuacaucgacaaucuuaacaauacacugguggauuuggaguggcucaaccgugucgagacuggaggcuauauuccagaagcucccagagacggucaggcauacgugaggaaagauggggaguggguucugcuaucaaccuucuga

SEQ ID NO: 15033 - RNA, 4161 nt, Artificial Sequence
  PEDV/NPL-PEDv/2013/P10__AHZ94887.1 spike protein CDS human (1-1386)
augaaaagccugaccuacuucuggcucuuucuucccgugcuguccacauugucuuuaccucaggacgucacuagaugcucagccaacacgaauuucaggcgguuuuucaguaaauuuaacguucaagcuccagcagugguagugcugggcggguaucuaccgaucggagagaaucagggugucaacagcaccugguacugugccggccagcaccccacagcguccggggugcauggaauuuucguuucucacauacgcggcggucauggguuugaaaucggaauuucgcaggagccuuucgauccaucaggcuaucaacucuaccugcacaaggcuacuaauggcaacaccaaugccacagcacgacuucguaucugccaguuucccagcauuaaaacccuggggccuacugccaacaaugacgugacaaccggaagaaacuguuuguucaauaaggcuaucccagcacauaugagugaacacuccgucguggguauaacgugggauaacgacaggguaacuguguuuucugauaaaaucuauuacuucuauuuuaagaaugacuggagccggguugccaccaagugcuacaacuccggcgggugugcuaugcaguacgucuaugagcccacauacuauaugcucaaugugacuucagccggagaagauggcauuaguuaccagccuugcaccgcgaacuguaucgguuaugcagccaacguguucgcuacagagccaaaugggcacauuccggagggauucagcuuuaacaauugguuccugcugucuaacgacuccacccucguccauggcaaaguugugucaaaucaacccuuacugguaaacugccuuuuggccaucccuaagauauacggccuggggcaguuuuucagcuuuaaucagacgauugauggaguguguaacggugcagcuguccagcgcgccccagaagcgcuaagauucaauaucaacgacauuagugugauccucgccgagggcucuaucguucugcacacugcacuugggacaaauuuuuccuucgugugcagcaacucgucuaauccccaucuggcuaccuuugccauuccuuugggagcuacucaagucccauauuacuguuucuuuaaaguggauacauacaacuccaccguauauaaguuccucgccguucugcccccgacggugagggaaauagucaucaccaaauacggcgacguguaugucaaugguuuuggguacuuacaccugggccuccuugaugcagugacaauuaacuucacuggacacggcaccgacgacgauguuucaggguucuggacaaucgccaguacuaacuuuguggacgcucugauagagguacagggaaccgcgauucagcggaucuuguauugcgaugacccugucagccaacuaaagugcucccagguggcauucgaucuggacgaugguuuuuacacaaucucuagccgcaaucuccugucacaugagcagcccauuaguuucguuacccuuccauccuuuaacgaccacagcuucgugaauaucacugucucugccucauuuggcgggcauaguggagcuaaccugauugccagcgauacgacaauaaauggcuucuccucuuuuuguguggacacccgacaguucacuaucucguuguuuuauaacguaaccaauagcuacgguuacguguccaagucacaagauaguaacugcccuuucacacuccagucuguuaaugacuaucugagcuuuuccaaauucugugucucaaccagcuuacuggcaucugccugcacuauugaccuauucggguaccccgaauuuggcuccggagugaaguucacaagucucuauuuucaguucacgaaaggcgagcugaucaccgggacuccaaagccccuugaaggagugacagaugucagcuuuaugaccuuggacguuuguacaaaauacacuaucuaugguuucaagggcgaggggauuauaacccugacgaacucuuccuuucucgcuggaguguacuauaccucagauaguggccagcugcuugccuucaaaaaugugacaagcggugcaguauacucggucacuccuugcuccuuuucugaacaagcggcuuacguggacgaugacaucguuggggugauuagcucacugaguuccucuaccuucaacagcacaagagaguugccaggcuuuuucuaucacuccaaugauggaucaaacuguacugagccgguccucguguacagcaauaucggcguuugcaagagugggucuauuggauaugugcccucccagagcggccagguaaagaucgccccuaccgucacggguaacauaucgaucccaacaaacuucucaaugucuauuaggaccgaauaccugcaguuauauaauacucccgugaguguggacugugcaacauacgucugcaacggaaauucccgguguaaacaacugcuaacccaguauacugccgcuugcaagaccaucgagagcgcccuccagcugucugcacgucuugaaagcguugaggugaacuccauguugacaauuucagaugaagcucugcagcucgccacgaucaguagcuuuaauggggacggcuacaacuucaccaauguacugggugugucugucuacgauccugcgucccgcagagugguucaaaagaggucauuuauagaggacuuacuguucaacaagguggucacuaauggccuugggacaguggaugaggacuauaaacggugcaguaacggacgaagcguugccgacuuggugugugcucaguacuauuccggcgucaugguacucccaggggugguugaugcagaaaagcugcauauguacucugccucgcuaauuggaggcauggugcuggguggguuuaccagcgcugccgcacuccccuucucauaugcgguccaggcccgccugaauuaccuugcuuugcaaacagacgugcugcagagaaaccagcaguuacucgccgaguccuuuaauagugcaaucggaaacauuacuucugcuuucgaaagcguaaaggaggccaucucccaaaccucaaaaggccugaauacgguggcacacgcccuuacaaagguccaggaaguugugaacucucagggugcugcgcugacccaguugacugugcaacuccagcacaacuuucaggccauaagcaguuccaucgaugacauuuauagcaggcuggauauccuaucugcagacgcucaggucgaucggcugauuaccggccgccucucagcccugaaugccuucguggcucaaacacuuacuaaauacaccgagguucaggcauccagaaaguuggcccagcaaaaaguaaacgagugcgugaagagucagagccagagguacggguuuuguggaggcgacggggaacauaucuucucgcugguccaggcggcuccgcaaggauuacucuuucugcacacagugcuuguuccuucugauuucguggacgucauagccauugcaggccugugcgugaaugaugagaucgcccuaacgcuccgugaaccaggucugguauuguucacccaugagcugcagaaccacacugcuacagaguauuuugucuccagccggcgaauguucgaacccagaaagccuaccgugucagacuuuguucagaucgagaguuguguggucacuuacgugaauuuaacaagggaucagcuccccgacguuauuccagacuauaucgaugugaacaaaacccuguacgaaauucuugcaucucugccuaaucgcacggggcccuccuugccacucgacgucuucaacgccacuuaucugaaucuaaccggagagauagcggaucuggaacaacggagcgagucacuuagaaacacaaccgaggaacuccagagucugaucuacaauauuaacaauacuuugguggaccuggagugguuaaacaggguagaaacauauaucaaguggccgugguggguguggcucauuaucuuuauaguucugaucuucgucgugagccuucugguguuuugcuguauuuccaccggcugcugugguugcuguggcugcugcugugcuugcuucucuggguguugccgcggaccucgauugcagcccuacgaggucuuugaaaaaguacacgugcaguga

SEQ ID NO: 15034 - RNA, 4161 nt, Artificial Sequence
  PEDV/NPL-PEDv/2013/P10__AHZ94887.1 spike protein CDS human (1-1386)(I1076P_L1077P)
augaagucucugaccuacuucuggcucuuucuucccgugcuguccacauugucuuuaccucaggacgucacuagaugcucagccaacacgaauuucaggcgguuuuucaguaaauuuaacguucaagcuccagcagugguagugcugggcggguaucuaccgaucggagagaaucagggugucaacagcaccugguacugugccggccagcaccccacagcguccggggugcauggaauuuucguuucucacauacgcggcggucauggguuugaaaucggaauuucgcaggagccuuucgauccaucaggcuaucaacucuaccugcacaaggcuacuaauggcaacaccaaugccacagcacgacuucguaucugccaguuucccagcauuaaaacccuggggccuacugccaacaaugacgugacaaccggaagaaacuguuuguucaauaaggcuaucccagcacauaugagugaacacuccgucguggguauaacgugggauaacgacaggguaacuguuuuuagcgauaaaaucuauuacuucuauuuuaagaaugacuggagccggguggccaccaagugcuacaacuccggcgggugugcuaugcaguacgucuaugagcccacauacuauaugcucaaugugacuucagccggagaagauggcauuaguuaccagccuugcaccgcgaacuguaucgguuaugcagccaacguguucgcuacagagccaaaugggcacauuccggagggauucagcuuuaacaauugguuccugcugucuaacgacuccacccucguccauggcaaaguugugucaaaucaacccuuacugguaaacugccuuuuggccaucccuaagauauacggccuggggcaguuuuucagcuuuaaucagacgauugauggaguguguaacggugcagcuguccagcgcgccccagaagcgcuaagauucaauaucaacgacauuagugugauccucgccgagggcucuaucguucugcacacugcacuugggacaaauuuuuccuucgugugcagcaacucgucuaauccccaucuggcuaccuuugccauuccuuugggagcuacucaagucccauauuacuguuucuuuaaaguggauacauacaacuccaccguauauaaguuccucgccguucugcccccgacggugagggaaauagucaucaccaaauacggcgacguguaugucaaugguuuuggguacuuacaccugggccuccuugaugcagugacaauuaacuucacuggacacggcaccgacgacgauguuucaggguucuggacaaucgccaguacuaacuuuguggacgcucugauagagguacagggaaccgcgauucagcggaucuuguauugcgaugacccugucagccaacuaaagugcucccagguggcauucgaucuggacgaugguuuuuacacaaucucuagccgcaaucuccugucacaugagcagcccauuaguuucguuacccuuccauccuuuaacgaccacagcuucgugaauaucacugucucugccucauuuggcgggcauaguggagcuaaccugauugccagcgauacgacaauaaauggcuucuccucuuuuuguguggacacccgacaguucacuaucucguuguuuuauaacguaaccaauagcuacgguuacguguccaagucacaagauaguaacugcccuuucacacuccagucuguuaaugacuaucugagcuuuuccaaauucugugucucaaccagcuuacuggcaucugccugcacuauugaccuauucggguaccccgaauuuggcuccggagugaaguucacaagucucuauuuucaguucacgaaaggcgagcugaucaccgggacuccaaagccccuugaaggagugacagaugucagcuuuaugaccuuggacguuuguacaaaauacacuaucuaugguuucaagggcgaggggauuauaacccugacgaacucuuccuuucucgcuggaguguacuauaccucagauaguggccagcugcuugccuucaaaaaugugacaagcggugcaguauacucggucacuccuugcuccuuuucugaacaagcggcuuacguggacgaugacaucguuggggugauuagcucacugaguuccucuaccuucaacagcacaagagaguugccaggcuuuuucuaucacuccaaugauggaucaaacuguacugagccgguccucguguacagcaauaucggcguuugcaagagugggucuauuggauaugugcccucccagagcggccagguaaagaucgccccuaccgucacggguaacauaucgaucccaacaaacuucucaaugucuauuaggaccgaauaccugcaguuauauaauacucccgugaguguggacugugcaacauacgucugcaacggaaauucccgguguaaacaacugcuaacccaguauacugccgcuugcaagaccaucgagagcgcccuccagcugucugcacgucuugaaagcguugaggugaacuccauguugacaauuucagaugaagcucugcagcucgccacgaucaguagcuuuaauggggacggcuacaacuucaccaauguacugggugugucugucuacgauccugcgucccgcagagugguucaaaagaggucauuuauagaggacuuacuguucaacaagguggucacuaauggccuugggacaguggaugaggacuauaaacggugcaguaacggacgaagcguugccgacuuggugugugcucaguacuauuccggcgucaugguacucccaggggugguugaugcagaaaagcugcauauguacucugccucgcuaauuggaggcauggugcuggguggguuuaccagcgcugccgcacuccccuucucauaugcgguccaggcccgccugaauuaccuugcuuugcaaacagacgugcugcagagaaaccagcaguuacucgccgaguccuuuaauagugcaaucggaaacauuacuucugcuuucgaaagcguaaaggaggccaucucccaaaccucaaaaggccugaauacgguggcacacgcccuuacaaagguccaggaaguugugaacucucagggugcugcgcugacccaguugacugugcaacuccagcacaacuuucaggccauaagcaguuccaucgaugacauuuauagcaggcuggauccgccuucugcagacgcucaggucgaucggcuaaucaccggccgccugucagcccucaaugccuucguggcucaaacacugacuaaauacaccgagguucaggcauccagaaaacuugcccagcaaaaaguaaacgagugcgugaagagucagagccagagguacggguuuuguggaggcgacggggaacauauuuucucguugguccaggcggcuccacaaggacuguuauuucuccacacagugcugguucccucugauuucguggacgucaucgccauagcaggccuuugcgugaaugaugagauugcccugacgcuacgugaaccuggucucguacuguucacccaugaguugcagaaccacacugcuacagaguauuuugucuccagccggcgaauguucgaacccagaaagccaaccgugucagacuuuguucagaucgagaguuguguggucacuuacgugaaucugacaagggaucaguuaccugacguuauccccgacuauauugaugugaacaaaacccucuacgaaauccuggcaucucuuccaaaucgcacggggccgucccugccuuuggacgucuucaacgccacuuaucucaaucugaccggagagauugcggaucuagaacaacggagcgagucacugagaaacacaaccgaggaacuucagagucucauauacaauaucaacaauacucugguggacuuggaguggcugaacaggguagaaacauauauuaaguggcccuggugggugugguuaaucauuuuuaucguucucauauucgucgugagccugcuuguguuuugcuguaucuccaccggcugcugugguugcuguggcugcugcugugcuugcuucucuggguguugccgcggaccacgacugcagcccuacgaggucuuugaaaaaguacacgugcaguga

SEQ ID NO: 15035 - RNA, 3969 nt, Artificial Sequence
  PEDV/NPL-PEDv/2013/P10__AHZ94887.1 spike protein CDS human (variant)
augaagucucugaccuacuucuggcucuuucuucccgugcuguccacauugucuuuaccucaggacgucacuagaugcucagccaacacgaauuucaggcgguuuuucaguaaauuuaacguucaagcuccagcagugguagugcugggcggguaucuaccgaucggagagaaucagggugucaacagcaccugguacugugccggccagcaccccacagcguccggggugcauggaauuuucguuucucacauacgcggcggucauggguuugaaaucggaauuucgcaggagccuuucgauccaucaggcuaucaacucuaccugcacaaggcuacuaauggcaacaccaaugccacagcacgacuucguaucugccaguuucccagcauuaaaacccuggggccuacugccaacaaugacgugacaaccggaagaaacuguuuguucaauaaggcuaucccagcacauaugagugaacacuccgucguggguauaacgugggauaacgacaggguaacuguuuuuagcgauaaaaucuauuacuucuauuuuaagaaugacuggagccggguggccaccaagugcuacaacuccggcgggugugcuaugcaguacgucuaugagcccacauacuauaugcucaaugugacuucagccggagaagauggcauuaguuaccagccuugcaccgcgaacuguaucgguuaugcagccaacguguucgcuacagagccaaaugggcacauuccggagggauucagcuuuaacaauugguuccugcugucuaacgacuccacccucguccauggcaaaguugugucaaaucaacccuuacugguaaacugccuuuuggccaucccuaagauauacggccuggggcaguuuuucagcuuuaaucagacgauugauggaguguguaacggugcagcuguccagcgcgccccagaagcgcuaagauucaauaucaacgacauuagugugauccucgccgagggcucuaucguucugcacacugcacuugggacaaauuuuuccuucgugugcagcaacucgucuaauccccaucuggcuaccuuugccauuccuuugggagcuacucaagucccauauuacuguuucuuuaaaguggauacauacaacuccaccguauauaaguuccucgccguucugcccccgacggugagggaaauagucaucaccaaauacggcgacguguaugucaaugguuuuggguacuuacaccugggccuccuugaugcagugacaauuaacuucacuggacacggcaccgacgacgauguuucaggguucuggacaaucgccaguacuaacuuuguggacgcucugauagagguacagggaaccgcgauucagcggaucuuguauugcgaugacccugucagccaacuaaagugcucccagguggcauucgaucuggacgaugguuuuuacacaaucucuagccgcaaucuccugucacaugagcagcccauuaguuucguuacccuuccauccuuuaacgaccacagcuucgugaauaucacugucucugccucauuuggcgggcauaguggagcuaaccugauugccagcgauacgacaauaaauggcuucuccucuuuuuguguggacacccgacaguucacuaucucguuguuuuauaacguaaccaauagcuacgguuacguguccaagucacaagauaguaacugcccuuucacacuccagucuguuaaugacuaucugagcuuuuccaaauucugugucucaaccagcuuacuggcaucugccugcacuauugaccuauucggguaccccgaauuuggcuccggagugaaguucacaagucucuauuuucaguucacgaaaggcgagcugaucaccgggacuccaaagccccuugaaggagugacagaugucagcuuuaugaccuuggacguuuguacaaaauacacuaucuaugguuucaagggcgaggggauuauaacccugacgaacucuuccuuucucgcuggaguguacuauaccucagauaguggccagcugcuugccuucaaaaaugugacaagcggugcaguauacucggucacuccuugcuccuuuucugaacaagcggcuuacguggacgaugacaucguuggggugauuagcucacugaguuccucuaccuucaacagcacaagagaguugccaggcuuuuucuaucacuccaaugauggaucaaacuguacugagccgguccucguguacagcaauaucggcguuugcaagagugggucuauuggauaugugcccucccagagcggccagguaaagaucgccccuaccgucacggguaacauaucgaucccaacaaacuucucaaugucuauuaggaccgaauaccugcaguuauauaauacucccgugaguguggacugugcaacauacgucugcaacggaaauucccgguguaaacaacugcuaacccaguauacugccgcuugcaagaccaucgagagcgcccuccagcugucugcacgucuugaaagcguugaggugaacuccauguugacaauuucagaugaagcucugcagcucgccacgaucaguagcuuuaauggggacggcuacaacuucaccaauguacugggugugucugucuacgauccugcgucccgcagagugguucaaaagaggucauuuauagaggacuuacuguucaacaagguggucacuaauggccuugggacaguggaugaggacuauaaacggugcaguaacggacgaagcguugccgacuuggugugugcucaguacuauuccggcgucaugguacucccaggggugguugaugcagaaaagcugcauauguacucugccucgcuaauuggaggcauggugcuggguggguuuaccagcgcugccgcacuccccuucucauaugcgguccaggcccgccugaauuaccuugcuuugcaaacagacgugcugcagagaaaccagcaguuacucgccgaguccuuuaauagugcaaucggaaacauuacuucugcuuucgaaagcguaaaggaggccaucucccaaaccucaaaaggccugaauacgguggcacacgcccuuacaaagguccaggaaguugugaacucucagggugcugcgcugacccaguugacugugcaacuccagcacaacuuucaggccauaagcaguuccaucgaugacauuuauagcaggcuggauccgccuucugcagacgcucaggucgaucggcuaaucaccggccgccugucagcccucaaugccuucguggcucaaacacugacuaaauacaccgagguucaggcauccagaaaacuugcccagcaaaaaguaaacgagugcgugaagagucagagccagagguacggguuuuguggaggcgacggggaacauauuuucucguugguccaggcggcuccacaaggacuguuauuucuccacacagugcugguucccucugauuucguggacgucaucgccauagcaggccuuugcgugaaugaugagauugcccugacgcuacgugaaccuggucucguacuguucacccaugaguugcagaaccacacugcuacagaguauuuugucuccagccggcgaauguucgaacccagaaagccaaccgugucagacuuuguucagaucgagaguuguguggucacuuacgugaaucugacaagggaucaguuaccugacguuauccccgacuauauugaugugaacaaaacccucuacgaaauccuggcaucucuuccaaaucgcacggggccgucccugccuuuggacgucuucaacgccacuuaucucaaucugaccggagagauugcggaucuagaacaacggagcgagucacugagaaacacaaccgaggaacuucagagucucauauacaauaucaacaauacucugguggacuuggaguggcugaacaggguagaaacauga

SEQ ID NO: 15036 - RNA, 4050 nt, Artificial Sequence
  PEDV/NPL-PEDv/2013/P10__AHZ94887.1 spike protein CDS human (variant)
augaagucucugaccuacuucuggcucuuucuucccgugcuguccacauugucuuuaccucaggacgucacuagaugcucagccaacacgaauuucaggcgguuuuucaguaaauuuaacguucaagcuccagcagugguagugcugggcggguaucuaccgaucggagagaaucagggugucaacagcaccugguacugugccggccagcaccccacagcguccggggugcauggaauuuucguuucucacauacgcggcggucauggguuugaaaucggaauuucgcaggagccuuucgauccaucaggcuaucaacucuaccugcacaaggcuacuaauggcaacaccaaugccacagcacgacuucguaucugccaguuucccagcauuaaaacccuggggccuacugccaacaaugacgugacaaccggaagaaacuguuuguucaauaaggcuaucccagcacauaugagugaacacuccgucguggguauaacgugggauaacgacaggguaacuguuuuuagcgauaaaaucuauuacuucuauuuuaagaaugacuggagccggguggccaccaagugcuacaacuccggcgggugugcuaugcaguacgucuaugagcccacauacuauaugcucaaugugacuucagccggagaagauggcauuaguuaccagccuugcaccgcgaacuguaucgguuaugcagccaacguguucgcuacagagccaaaugggcacauuccggagggauucagcuuuaacaauugguuccugcugucuaacgacuccacccucguccauggcaaaguugugucaaaucaacccuuacugguaaacugccuuuuggccaucccuaagauauacggccuggggcaguuuuucagcuuuaaucagacgauugauggaguguguaacggugcagcuguccagcgcgccccagaagcgcuaagauucaauaucaacgacauuagugugauccucgccgagggcucuaucguucugcacacugcacuugggacaaauuuuuccuucgugugcagcaacucgucuaauccccaucuggcuaccuuugccauuccuuugggagcuacucaagucccauauuacuguuucuuuaaaguggauacauacaacuccaccguauauaaguuccucgccguucugcccccgacggugagggaaauagucaucaccaaauacggcgacguguaugucaaugguuuuggguacuuacaccugggccuccuugaugcagugacaauuaacuucacuggacacggcaccgacgacgauguuucaggguucuggacaaucgccaguacuaacuuuguggacgcucugauagagguacagggaaccgcgauucagcggaucuuguauugcgaugacccugucagccaacuaaagugcucccagguggcauucgaucuggacgaugguuuuuacacaaucucuagccgcaaucuccugucacaugagcagcccauuaguuucguuacccuuccauccuuuaacgaccacagcuucgugaauaucacugucucugccucauuuggcgggcauaguggagcuaaccugauugccagcgauacgacaauaaauggcuucuccucuuuuuguguggacacccgacaguucacuaucucguuguuuuauaacguaaccaauagcuacgguuacguguccaagucacaagauaguaacugcccuuucacacuccagucuguuaaugacuaucugagcuuuuccaaauucugugucucaaccagcuuacuggcaucugccugcacuauugaccuauucggguaccccgaauuuggcuccggagugaaguucacaagucucuauuuucaguucacgaaaggcgagcugaucaccgggacuccaaagccccuugaaggagugacagaugucagcuuuaugaccuuggacguuuguacaaaauacacuaucuaugguuucaagggcgaggggauuauaacccugacgaacucuuccuuucucgcuggaguguacuauaccucagauaguggccagcugcuugccuucaaaaaugugacaagcggugcaguauacucggucacuccuugcuccuuuucugaacaagcggcuuacguggacgaugacaucguuggggugauuagcucacugaguuccucuaccuucaacagcacaagagaguugccaggcuuuuucuaucacuccaaugauggaucaaacuguacugagccgguccucguguacagcaauaucggcguuugcaagagugggucuauuggauaugugcccucccagagcggccagguaaagaucgccccuaccgucacggguaacauaucgaucccaacaaacuucucaaugucuauuaggaccgaauaccugcaguuauauaauacucccgugaguguggacugugcaacauacgucugcaacggaaauucccgguguaaacaacugcuaacccaguauacugccgcuugcaagaccaucgagagcgcccuccagcugucugcacgucuugaaagcguugaggugaacuccauguugacaauuucagaugaagcucugcagcucgccacgaucaguagcuuuaauggggacggcuacaacuucaccaauguacugggugugucugucuacgauccugcgucccgcagagugguucaaaagaggucauuuauagaggacuuacuguucaacaagguggucacuaauggccuugggacaguggaugaggacuauaaacggugcaguaacggacgaagcguugccgacuuggugugugcucaguacuauuccggcgucaugguacucccaggggugguugaugcagaaaagcugcauauguacucugccucgcuaauuggaggcauggugcuggguggguuuaccagcgcugccgcacuccccuucucauaugcgguccaggcccgccugaauuaccuugcuuugcaaacagacgugcugcagagaaaccagcaguuacucgccgaguccuuuaauagugcaaucggaaacauuacuucugcuuucgaaagcguaaaggaggccaucucccaaaccucaaaaggccugaauacgguggcacacgcccuuacaaagguccaggaaguugugaacucucagggugcugcgcugacccaguugacugugcaacuccagcacaacuuucaggccauaagcaguuccaucgaugacauuuauagcaggcuggauccgccuucugcagacgcucaggucgaucggcuaaucaccggccgccugucagcccucaaugccuucguggcucaaacacugacuaaauacaccgagguucaggcauccagaaaacuugcccagcaaaaaguaaacgagugcgugaagagucagagccagagguacggguuuuguggaggcgacggggaacauauuuucucguugguccaggcggcuccacaaggacuguuauuucuccacacagugcugguucccucugauuucguggacgucaucgccauagcaggccuuugcgugaaugaugagauugcccugacgcuacgugaaccuggucucguacuguucacccaugaguugcagaaccacacugcuacagaguauuuugucuccagccggcgaauguucgaacccagaaagccaaccgugucagacuuuguucagaucgagaguuguguggucacuuacgugaaucugacaagggaucaguuaccugacguuauccccgacuauauugaugugaacaaaacccucuacgaaauccuggcaucucuuccaaaucgcacggggccgucccugccuuuggacgucuucaacgccacuuaucucaaucugaccggagagauugcggaucuagaacaacggagcgagucacugagaaacacaaccgaggaacuucagagucucauauacaauaucaacaauacucugguggacuuggaguggcugaacaggguagaaacaggcgguuauauucccgaggcuccacgcgauggccaggccuacgugcgaaaggacggggaauggguuuuacucagcaccuuuuga

SEQ ID NO: 15037 - RNA, 4086 nt, Artificial Sequence
  MHV/S__BAK18575.1 spike protein CDS human (1-1361)
augcuuagcguguucauccucuuucuucccuccugccugggcuacauuggggacuucagauguauaaacuuggucaauaccgauacaucuaacgccucagcuccuaguguuagcacugaggugguagacguguccaagggaaucgguacguauuacgucuuagauaggguguaucugaaugcaacccuacuccugacaggcuacuauccaguugacgggucuaacuaccggaaucuugcccugacuggaaccaacacauugucgcucaauugguauaaaccgcccuuucugucagaauuuaacgauggcauuuuugcgaaggugaaaaaucugaaggcuagccucccuaaagacaguaccuccuacuucccaacuaucgucauugguucuaacuuugugacaaccagcuacacgguaguuuuagagcccuauaaugggaucauaauggccuccaucugccaguacacuauuugucugcuuccuuauaccgauugcaagccaaacacaggaggcaauaaguugaucggcuucuggcacauugaccugaaaucacccguguguauccuaaagcgcaacuuuacuuucaaugucaacgcagauuggcucuacuuucauuucuaucaacaagggggaaccuuuuacgccuauuacgcugacgcagguagugccacaaccuuccuguucagcucuuacauaggcgaugugcuuacgcaguauuuugugcugccuuucgucugcacuccaacaaccacugggguuuucuccccgcaguacugggugacacccuugguaaaacgacaguaucucuucaacuuuaaucagaagggaaccauuacgucagcuguggacugugccagcaguuacaccucugaaaucaaaugcaagacacaguccaugaacccuaauacuggcgucuaugaucugagcgguuacaccgugcagccaguuggguuaguguaucguagagucaggaaccugcccgacugucggauugaggacuggcucgcggcaaagacagugccuucgccacuuaauugggaacgcaaaacuuuccaaaacugcaauuuuaaccugucuuccuugcuaagacugguacaggccggaucacucaguuguagcaauaucgaugcugccaagguuuacggcaugugcuucggcuccaugucuaucgacaaauuugcaauucccaacagcaggcggguggaucugcagcuuggaaauucaggguuccugcagaguuuuaacuacaagauagacacccgcgcuacauccugccaauuguauuacagccucgcccagucuaaugucaccgugaacaaucacaacccgucaaguuggaaccgaagauaugguuucaaugaugucgcgacuuuuggcagggggaaacaugacguggccuacgcagaggcuuguuucacgguuggagccagcuauugcccuugugcuaaccccuccaucgugucuccaugcacaaccggcaagccuaaauucgccaauugucccacugguaccacaaaccgggagugcaauguacuggcauuagggucgaaccuguuuaagugugauugcaccuguaauccaagcccccuaacuacauacgaccuccguugccugcagggccgcuccaugcuuggagucggcgaucacugugaaggguugggagugcuggaggacaagugcgguggcucaaacacgugcaauuguagugccgaugcuuucguugggugggcgaaagacucuugccucagcaacggaagaugucauaucuuuuccaaucugaugcuuaacggcauuaauucagguaccacuugcagcacagaccugcaauugccuaacaccgaaguggucacagggauaugugugaaguaugaucucuacggcauuacuggacagggcguauucaaagaggugaaggcagacuacuauaauucuuggcagaaccuguuauacgauguuaacgggaaucugaacggauuuagggacaucgucaccaauaaaacguaucuaacccgguccugcuacaguggucgagugagcgccgcuuaucaccaggaugccccagagccggcacuccuguaccgcaaccuuaagugugacuauguguucaauaacaauaucuuuagagaagagacacccuugaacuacuucgauucuuaccugggcugcgucguuaaugccgacaacuccacugaacaagcuguggaugccugugaccucaggauggggucaggacugugcgugaauuauaguaccgcacaccgggcgcgcacaagcguaucgacuggcuacaaguuaaccacguuugagccuuucacagucuccauugugaacgauucuguugaaagcgugggugggcuguaugagaugcagaucccaaccaauuuuacuauugcuucacaucaggaguucauacagacaagagcccccaaagucaccaucgacugugcagccuuugugugcggcgauuacacuaccugcaggcaacagcuuguugaauauggaaguuucugugacaacauuaaugcuaucuugggcgaggugaacaaccucaucgacacaaugcagcugcagguagccuccgcacuaauucaaggggucacgcugucuagccgucucgcugauggaauauccggccagaucgacgauauuaauuucucaccucugcuugguugcuuggggagccaguguagugaaggaaccauggccgcgcagggccggucuacuguggaggaccuguuauuugauaaggugaaacucuccgacgucgguuucguugaagccuacaacaauugcacaggcgggcaagaggugcgagaucugcuuuguguacagagcuuuaacggaaucaaggugcugccacccgucuugucggagaaucaggugucaggcuauaccgcuggggcaacagccucuaguauguucccgccuugguccgcugccgcaggaguuccauuuagccucucugugcaauacagaauuaacggccugggugucacuaugaaugugcuaagcgaaaaccagaaaaugaucgcguccgccuucaauaacgcuauaggggccauccaggagggauuugacgcaaccaauucagcucuggccaagauucagaguguugugaacgcaaaugccgaagcucucaacaaucugcuuaaccaauugagcaauagguucggcgcgaucucugccucccugcaggagauuuuaucacgccucgaugcacuggaagcucaggcccagaucgaccggcuuauaaacgguagacugacggcccuaaacgcuuacgucaguaagcaacucagcgauaugacacugauuaaaguauccgcagcccaggcgaucgagaaggugaaugagugcguuaaaucucagucgcccaggauuaacuuuuguggcaaugggaaccacaucuugagccuggugcagaaugcuccuuauggauuauacuuccuccauuuuucauauguccccaccuccuucacuaccgccaacgugaguccaggccugugcauaucuggggaccgcggacuugcaccuaaggccggcuacuucguacaagaugacggugaauggaaauuuacagggagcaauuauuacuaucccgagccaaucacugacaagaacuccguggucaugucaucuugugcuguuaauuacaccaaggcaccggaaguguuccugaacacaagcauuaguaauuugccugauuuuaaagaggagcucgacaagugguucaaaaaccagacguccguggcccccgaucugagccuagacuuugaaaagcugaaugucaccuuccuugaucucucugacgagaugaaccgaauccaggaagcgauuaaaaagcugaaugagucauacaucaacuugaaagaaauaggaacuuaugagauguacgugaaguggccaugguauguuuggcuguuaauuggccucgcugguguagccgugugcguccugcuguuuuucaucuguugcugcacaggcuguggguccugcuguuuuaagaaaugcggaaacuguugcgaugaguacggcgggcaccaagacaguaucgugauucacaauaucagcucgcaugaagauuga

SEQ ID NO: 15038 - RNA, 4086 nt, Artificial Sequence
  MHV/S__BAK18575.1 spike protein CDS human (1-1361)(A1073P_L1074P)
augcugagcguguucauccucuuucuucccuccugccugggcuacauuggggacuucagauguauaaacuuggucaauaccgauacaucuaacgccucagcuccuaguguuagcacugaggugguagacguguccaagggaaucgguacguauuacgucuuagauaggguguaucugaaugcaacccuacuccugacaggcuacuauccaguugacgggucuaacuaccggaaucuugcccugacuggaaccaacacauugucgcucaauugguauaaaccgcccuuucugucagaauuuaacgauggcauuuuugcgaaggugaaaaaucugaaggcuagccucccuaaagacaguaccuccuacuucccaacuaucgucauugguucuaacuuugugacaaccagcuacacgguaguuuuagagcccuauaaugggaucauaauggccuccaucugccaguacacuauuugucugcuuccuuauaccgauugcaagccaaacacaggaggcaauaaguugaucggcuucuggcacauugaccugaaaucacccguguguauccuaaagcgcaacuuuacuuucaaugucaacgcagauuggcucuacuuucauuucuaucaacaagggggaaccuuuuacgccuauuacgcugacgcagguagugccacaaccuuccuguucagcucuuacauaggcgaugugcuuacgcaguauuuugugcugccuuucgucugcacuccaacaaccacugggguuuucuccccgcaguacugggugacacccuugguaaaacgacaguaucucuucaacuuuaaucagaagggaaccauuacgucagcuguggacugugccagcaguuacaccucugaaaucaaaugcaagacacaguccaugaacccuaauacuggcgucuaugaucugagcgguuacaccgugcagccaguuggguuaguguaucguagagucaggaaccugcccgacugucggauugaggacuggcucgcggcaaagacagugccuucgccacuuaauugggaacgcaaaacuuuccaaaacugcaauuuuaaccugucuuccuugcuaagacugguacaggccggaucacucaguuguagcaauaucgaugcugccaagguuuacggcaugugcuucggcuccaugucuaucgacaaauuugcaauucccaacagcaggcggguggaucugcagcuuggaaauucaggguuccugcagaguuuuaacuacaagauagacacccgcgcuacauccugccaauuguauuacagccucgcccagucuaaugucaccgugaacaaucacaacccgucaaguuggaaccgaagauaugguuucaaugaugucgcgacuuuuggcagggggaaacaugacguggccuacgcagaggcuuguuucacgguuggagccagcuauugcccuugugcuaaccccuccaucgugucuccaugcacaaccggcaagccuaaauucgccaauugucccacugguaccacaaaccgggagugcaauguacuggcauuagggucgaaccuguuuaagugugauugcaccuguaauccaagcccccuaacuacauacgaccuccguugccugcagggccgcuccaugcuuggagucggcgaucacugugaaggguugggagugcuggaggacaagugcgguggcucaaacacgugcaauuguagugccgaugcuuucguugggugggcgaaagacucuugccucagcaacggaagaugucauaucuuuuccaaucugaugcuuaacggcauuaauucagguaccacuugcagcacagaccugcaauugccuaacaccgaaguggucacagggauaugugugaaguaugaucucuacggcauuacuggacagggcguauucaaagaggugaaggcagacuacuauaauucuuggcagaaccuguuauacgauguuaacgggaaucugaacggauuuagggacaucgucaccaauaaaacguaucuaacccgguccugcuacaguggucgagugagcgccgcuuaucaccaggaugccccagagccggcacuccuguaccgcaaccuuaagugugacuauguguucaauaacaauaucuuuagagaagagacacccuugaacuacuucgauucuuaccugggcugcgucguuaaugccgacaacuccacugaacaagcuguggaugccugugaccucaggauggggucaggacugugcgugaauuauaguaccgcacaccgggcgcgcacaagcguaucgacuggcuacaaguuaaccacguuugagccuuucacagucuccauugugaacgauucuguugaaagcgugggugggcuguaugagaugcagaucccaaccaauuuuacuauugcuucacaucaggaguucauacagacaagagcccccaaagucaccaucgacugugcagccuuugugugcggcgauuacacuaccugcaggcaacagcuuguugaauauggaaguuucugugacaacauuaaugcuaucuugggcgaggugaacaaccucaucgacacaaugcagcugcagguagccuccgcacuaauucaaggggucacgcugucuagccgucucgcugauggaauauccggccagaucgacgauauuaauuucucaccucugcuugguugcuuggggagccaguguagugaaggaaccauggccgcgcagggccggucuacuguggaggaccuguuauuugauaaggugaaacucuccgacgucgguuucguugaagccuacaacaauugcacaggcgggcaagaggugcgagaucugcuuuguguacagagcuuuaacggaaucaaggugcugccacccgucuugucggagaaucaggugucaggcuauaccgcuggggcaacagccucuaguauguucccgccuugguccgcugccgcaggaguuccauuuagccucucugugcaauacagaauuaacggccugggugucacuaugaaugugcuaagcgaaaaccagaaaaugaucgcguccgccuucaauaacgcuauaggggccauccaggagggauuugacgcaaccaauucagcucuggccaagauucagaguguugugaacgcaaaugccgaagcucucaacaaucugcuuaaccaauugagcaauagguucggcgcgaucucugccucccugcaggagauuuuaucacgccucgaucccccugaagcacaggcucagaucgaccggcugauaaacgguagacuuacggcccugaacgccuacgucaguaagcaacuaagcgauaugacacucauuaaaguauccgcugcacaggccaucgagaaggugaaugagugcguuaaaucucagucgcccaggauuaacuuuuguggcaaugggaaccacauccugagcuuggugcagaaugcgccauauggacuguacuucuuacauuuuucauaugucccuaccuccuucacuaccgcuaacgugagucccggccucugcauaucuggggaccgcggacuggccccaaaggcaggcuacuucguacaagaugacggugaauggaaauuuacagggagcaauuauuacuauccggagccuaucacugacaagaacuccguggucaugucaucuugugccguuaauuacaccaaggcucccgaaguguuccuuaacacaagcauuaguaaucugccagauuuuaaagaggaguuggacaagugguucaaaaaccagacguccguggcacccgaucucagccuggacuuugaaaagcuaaaugucaccuuccuggaucuuucugacgagaugaaccgaauccaggaagccauuaaaaagcucaaugagucauacaucaaccugaaagaaauaggaacuuaugagauguacgugaaguggccuugguauguuugguugcugauuggcuuagcggguguagcugugugcguccuccuguuuuucaucuguugcugcacaggcuguggguccugcuguuuuaagaaaugcggaaacuguugcgaugaguacggcgggcaccaagacaguaucgugauucacaauaucagcucgcaugaagauuga

SEQ ID NO: 15039 - RNA, 3894 nt, Artificial Sequence
  MHV/S__BAK18575.1 spike protein CDS human (variant)
augcugagcguguucauccucuuucuucccuccugccugggcuacauuggggacuucagauguauaaacuuggucaauaccgauacaucuaacgccucagcuccuaguguuagcacugaggugguagacguguccaagggaaucgguacguauuacgucuuagauaggguguaucugaaugcaacccuacuccugacaggcuacuauccaguugacgggucuaacuaccggaaucuugcccugacuggaaccaacacauugucgcucaauugguauaaaccgcccuuucugucagaauuuaacgauggcauuuuugcgaaggugaaaaaucugaaggcuagccucccuaaagacaguaccuccuacuucccaacuaucgucauugguucuaacuuugugacaaccagcuacacgguaguuuuagagcccuauaaugggaucauaauggccuccaucugccaguacacuauuugucugcuuccuuauaccgauugcaagccaaacacaggaggcaauaaguugaucggcuucuggcacauugaccugaaaucacccguguguauccuaaagcgcaacuuuacuuucaaugucaacgcagauuggcucuacuuucauuucuaucaacaagggggaaccuuuuacgccuauuacgcugacgcagguagugccacaaccuuccuguucagcucuuacauaggcgaugugcuuacgcaguauuuugugcugccuuucgucugcacuccaacaaccacugggguuuucuccccgcaguacugggugacacccuugguaaaacgacaguaucucuucaacuuuaaucagaagggaaccauuacgucagcuguggacugugccagcaguuacaccucugaaaucaaaugcaagacacaguccaugaacccuaauacuggcgucuaugaucugagcgguuacaccgugcagccaguuggguuaguguaucguagagucaggaaccugcccgacugucggauugaggacuggcucgcggcaaagacagugccuucgccacuuaauugggaacgcaaaacuuuccaaaacugcaauuuuaaccugucuuccuugcuaagacugguacaggccggaucacucaguuguagcaauaucgaugcugccaagguuuacggcaugugcuucggcuccaugucuaucgacaaauuugcaauucccaacagcaggcggguggaucugcagcuuggaaauucaggguuccugcagaguuuuaacuacaagauagacacccgcgcuacauccugccaauuguauuacagccucgcccagucuaaugucaccgugaacaaucacaacccgucaaguuggaaccgaagauaugguuucaaugaugucgcgacuuuuggcagggggaaacaugacguggccuacgcagaggcuuguuucacgguuggagccagcuauugcccuugugcuaaccccuccaucgugucuccaugcacaaccggcaagccuaaauucgccaauugucccacugguaccacaaaccgggagugcaauguacuggcauuagggucgaaccuguuuaagugugauugcaccuguaauccaagcccccuaacuacauacgaccuccguugccugcagggccgcuccaugcuuggagucggcgaucacugugaaggguugggagugcuggaggacaagugcgguggcucaaacacgugcaauuguagugccgaugcuuucguugggugggcgaaagacucuugccucagcaacggaagaugucauaucuuuuccaaucugaugcuuaacggcauuaauucagguaccacuugcagcacagaccugcaauugccuaacaccgaaguggucacagggauaugugugaaguaugaucucuacggcauuacuggacagggcguauucaaagaggugaaggcagacuacuauaauucuuggcagaaccuguuauacgauguuaacgggaaucugaacggauuuagggacaucgucaccaauaaaacguaucuaacccgguccugcuacaguggucgagugagcgccgcuuaucaccaggaugccccagagccggcacuccuguaccgcaaccuuaagugugacuauguguucaauaacaauaucuuuagagaagagacacccuugaacuacuucgauucuuaccugggcugcgucguuaaugccgacaacuccacugaacaagcuguggaugccugugaccucaggauggggucaggacugugcgugaauuauaguaccgcacaccgggcgcgcacaagcguaucgacuggcuacaaguuaaccacguuugagccuuucacagucuccauugugaacgauucuguugaaagcgugggugggcuguaugagaugcagaucccaaccaauuuuacuauugcuucacaucaggaguucauacagacaagagcccccaaagucaccaucgacugugcagccuuugugugcggcgauuacacuaccugcaggcaacagcuuguugaauauggaaguuucugugacaacauuaaugcuaucuugggcgaggugaacaaccucaucgacacaaugcagcugcagguagccuccgcacuaauucaaggggucacgcugucuagccgucucgcugauggaauauccggccagaucgacgauauuaauuucucaccucugcuugguugcuuggggagccaguguagugaaggaaccauggccgcgcagggccggucuacuguggaggaccuguuauuugauaaggugaaacucuccgacgucgguuucguugaagccuacaacaauugcacaggcgggcaagaggugcgagaucugcuuuguguacagagcuuuaacggaaucaaggugcugccacccgucuugucggagaaucaggugucaggcuauaccgcuggggcaacagccucuaguauguucccgccuugguccgcugccgcaggaguuccauuuagccucucugugcaauacagaauuaacggccugggugucacuaugaaugugcuaagcgaaaaccagaaaaugaucgcguccgccuucaauaacgcuauaggggccauccaggagggauuugacgcaaccaauucagcucuggccaagauucagaguguugugaacgcaaaugccgaagcucucaacaaucugcuuaaccaauugagcaauagguucggcgcgaucucugccucccugcaggagauuuuaucacgccucgaucccccugaagcacaggcucagaucgaccggcugauaaacgguagacuuacggcccugaacgccuacgucaguaagcaacuaagcgauaugacacucauuaaaguauccgcugcacaggccaucgagaaggugaaugagugcguuaaaucucagucgcccaggauuaacuuuuguggcaaugggaaccacauccugagcuuggugcagaaugcgccauauggacuguacuucuuacauuuuucauaugucccuaccuccuucacuaccgcuaacgugagucccggccucugcauaucuggggaccgcggacuggccccaaaggcaggcuacuucguacaagaugacggugaauggaaauuuacagggagcaauuauuacuauccggagccuaucacugacaagaacuccguggucaugucaucuugugccguuaauuacaccaaggcucccgaaguguuccuuaacacaagcauuaguaaucugccagauuuuaaagaggaguuggacaagugguucaaaaaccagacguccguggcacccgaucucagccuggacuuugaaaagcuaaaugucaccuuccuggaucuuucugacgagaugaaccgaauccaggaagccauuaaaaagcucaaugagucauacaucaaccugaaagaaauaggaacuuaugagauguga

SEQ ID NO: 15040 - RNA, 3975 nt, Artificial Sequence
  MHV/S__BAK18575.1 spike protein CDS human (variant)
augcugagcguguucauccucuuucuucccuccugccugggcuacauuggggacuucagauguauaaacuuggucaauaccgauacaucuaacgccucagcuccuaguguuagcacugaggugguagacguguccaagggaaucgguacguauuacgucuuagauaggguguaucugaaugcaacccuacuccugacaggcuacuauccaguugacgggucuaacuaccggaaucuugcccugacuggaaccaacacauugucgcucaauugguauaaaccgcccuuucugucagaauuuaacgauggcauuuuugcgaaggugaaaaaucugaaggcuagccucccuaaagacaguaccuccuacuucccaacuaucgucauugguucuaacuuugugacaaccagcuacacgguaguuuuagagcccuauaaugggaucauaauggccuccaucugccaguacacuauuugucugcuuccuuauaccgauugcaagccaaacacaggaggcaauaaguugaucggcuucuggcacauugaccugaaaucacccguguguauccuaaagcgcaacuuuacuuucaaugucaacgcagauuggcucuacuuucauuucuaucaacaagggggaaccuuuuacgccuauuacgcugacgcagguagugccacaaccuuccuguucagcucuuacauaggcgaugugcuuacgcaguauuuugugcugccuuucgucugcacuccaacaaccacugggguuuucuccccgcaguacugggugacacccuugguaaaacgacaauaucucuucaacuuuaaucagaagggaaccauuacgucagcuguggacugugccagcaguuacaccucugaaaucaaaugcaagacacaguccaugaacccuaauacuggcgucuaugaucugagcgguuacaccgugcagccaguuggguuaguguaucguagagucaggaaccugcccgacugucggauugaggacuggcucgcggcaaagacagugccuucgccacuuaauugggaacgcaaaacuuuccaaaacugcaauuuuaaccugucuuccuugcuaagacugguacaggccggaucacucaguuguagcaauaucgaugcugccaagguuuacggcaugugcuucggcuccaugucuaucgacaaauuugcaauucccaacagcaggcggguggaucugcagcuuggaaauucaggguuccugcagaguuuuaacuacaagauagacacccgcgcuacauccugccaauuguauuacagccucgcccagucuaaugucaccgugaacaaucacaacccgucaaguuggaaccgaagauaugguuucaaugaugucgcgacuuuuggcagggggaaacaugacguggccuacgcagaggcuuguuucacgguuggagccagcuauugcccuugugcuaaccccuccaucgugucuccaugcacaaccggcaagccuaaauucgccaauugucccacugguaccacaaaccgggagugcaauguacuggcauuagggucgaaccuguuuaagugugauugcaccuguaauccaagcccccuaacuacauacgaccuccguugccugcagggccgcuccaugcuuggagucggcgaucacugugaaggguugggagugcuggaggacaagugcgguggcucaaacacgugcaauuguagugccgaugcuuucguugggugggcgaaagacucuugccucagcaacggaagaugucauaucuuuuccaaucugaugcuuaacggcauuaauucagguaccacuugcagcacagaccugcaauugccuaacaccgaaguggucacagggauaugugugaaguaugaucucuacggcauuacuggacagggcguauucaaagaggugaaggcagacuacuauaauucuuggcagaaccuguuauacgauguuaacgggaaucugaacggauuuagggacaucgucaccaauaaaacguaucuaacccgguccugcuacaguggucgagugagcgccgcuuaucaccaggaugccccagagccggcacuccuguaccgcaaccuuaagugugacuauguguucaauaacaauaucuuuagagaagagacacccuugaacuacuucgauucuuaccugggcugcgucguuaaugccgacaacuccacugaacaagcuguggaugccugugaccucaggauggggucaggacugugcgugaauuauaguaccgcacaccgggcgcgcacaagcguaucgacuggcuacaaguuaaccacguuugagccuuucacagucuccauugugaacgauucuguugaaagcgugggugggcuguaugagaugcagaucccaaccaauuuuacuauugcuucacaucaggaguucauacagacaagagcccccaaagucaccaucgacugugcagccuuugugugcggcgauuacacuaccugcaggcaacagcuuguugaauauggaaguuucugugacaacauuaaugcuaucuugggcgaggugaacaaccucaucgacacaaugcagcugcagguagccuccgcacuaauucaaggggucacgcugucuagccgucucgcugauggaauauccggccagaucgacgauauuaauuucucaccucugcuugguugcuuggggagccaguguagugaaggaaccauggccgcgcagggccggucuacuguggaggaccuguuauuugauaaggugaaacucuccgacgucgguuucguugaagccuacaacaauugcacaggcgggcaagaggugcgagaucugcuuuguguacagagcuuuaacggaaucaaggugcugccacccgucuugucggagaaucaggugucaggcuauaccgcuggggcaacagccucuaguauguucccgccuugguccgcugccgcaggaguuccauuuagccucucugugcaauacagaauuaacggccugggugucacuaugaaugugcuaagcgaaaaccagaaaaugaucgcguccgccuucaauaacgcuauaggggccauccaggagggauuugacgcaaccaauucagcucuggccaagauucagaguguugugaacgcaaaugccgaagcucucaacaaucugcuuaaccaauugagcaauagguucggcgcgaucucugccucccugcaggagauuuuaucacgccucgaucccccugaagcacaggcucagaucgaccggcugauaaacgguagacuuacggcccugaacgccuacgucaguaagcaacuaagcgauaugacacucauuaaaguauccgcugcacaggccaucgagaaggugaaugagugcguuaaaucucagucgcccaggauuaacuuuuguggcaaugggaaccacauccugagcuuggugcagaaugcgccauauggacuguacuucuuacauuuuucauaugucccuaccuccuucacuaccgcuaacgugagucccggccucugcauaucuggggaccgcggacuggccccaaaggcaggcuacuucguacaagaugacggugaauggaaauuuacagggagcaauuauuacuauccggagccuaucacugacaagaacuccguggucaugucaucuugugccguuaauuacaccaaggcucccgaaguguuccuuaacacaagcauuaguaaucugccagauuuuaaagaggaguuggacaagugguucaaaaaccagacguccguggcacccgaucucagccuggacuuugaaaagcuaaaugucaccuuccuggaucuuucugacgagaugaaccgaauccaggaagccauuaaaaagcucaaugagucauacaucaaccugaaagaaauaggaacuuaugagaugggcgguuacauuccugaggcgccacgggauggccaggcuuaugugcguaaggacggggaauggguuuugcuguccacauuuuga

SEQ ID NO: 15041 - RNA, 4040 nt, Artificial Sequence
  SARS-CoV__P59594.1 spike protein mRNA gc (1-1255)
aggagagucccgcagucggcguccagcggcucugcuuguucgugugugugucguugcaggccuuauucaagcuuaccauguucaucuuccugcuguuccugacccugaccagcggcuccgaccucgaccgcugcacgaccuucgacgacgugcaggcccccaacuacacccagcacaccagcuccaugcgcggggucuacuacccggacgagaucuuccggagcgacacgcuguaccugacccaggaccucuuccugcccuucuacuccaacgugaccggcuuccacaccaucaaccacacguucgggaaccccgugauccccuucaaggacggcaucuacuucgccgcgaccgagaaguccaacgucgugcggggguggguguucggcagcaccaugaacaacaagagccaguccgucaucaucaucaacaacagcaccaacguggugauccgcgccugcaacuucgagcugugcgacaacccguucuucgccgucuccaagcccaugggcacgcagacccacaccaugaucuucgacaacgccuucaacugcaccuucgaguacaucagcgacgccuucucccucgacgugagcgagaaguccgggaacuucaagcaccuccgggaguucguguucaagaacaaggacggcuuccuguacgucuacaagggguaccagcccaucgacguggugcgcgaccuccccagcggcuucaacacgcugaagccgaucuucaagcugccccucgggaucaacaucaccaacuuccgggcgauccugaccgccuucucccccgcccaggacaucuggggcaccagcgccgcggccuacuucgucggcuaccugaagcccacgaccuucaugcucaaguacgacgagaacgggaccaucaccgacgccguggacugcucccagaacccgcuggccgagcugaagugcagcgucaagagcuucgagaucgacaagggcaucuaccagacguccaacuuccgcguggugcccagcggggacgugguccgguuccccaacaucaccaaccucugccccuucggcgagguguucaacgccaccaaguucccguccguguacgcgugggagcgcaagaagaucagcaacugcgucgccgacuacuccgugcuguacaacagcaccuucuucuccacguucaagugcuacggcgucagcgccaccaagcugaacgaccucugcuucuccaacguguacgccgacagcuucguggucaagggggacgacgugcggcagaucgcccccggccagaccggggugaucgcggacuacaacuacaagcugcccgacgacuucaugggcugcguccuggccuggaacacccgcaacaucgacgccacguccaccgggaacuacaacuacaaguaccgguaccuccgccacggcaagcugcggcccuucgagcgcgacaucagcaacgugccguucucccccgacggcaagcccugcacgcccccggcccugaacugcuacuggccccucaacgacuacggguucuacaccaccaccggcaucggguaccagcccuaccggguggucgugcugagcuucgagcugcucaacgcccccgcgaccgugugcggcccgaagcuguccaccgaccugaucaagaaccagugcgucaacuucaacuucaacgggcucaccggcacgggcgugcugacccccagcuccaagcgcuuccagcccuuccagcaguucgggcgggacgugagcgacuucaccgacuccguccgcgacccgaagaccagcgagauccuggacaucagccccugcuccuucggcggggugagcgugaucacgcccggcaccaacgccuccagcgaggucgccgugcucuaccaggacgugaacugcaccgacgucuccaccgccauccacgccgaccagcugacgcccgcguggcggaucuacagcaccgggaacaacguguuccagacccaggccggcugccugaucggcgccgagcacguggacaccuccuacgagugcgacaucccgaucggggccggcaucugcgcgagcuaccacacggucucccuccugcgcagcaccucccagaaguccaucguggccuacaccaugagccugggggccgacagcuccaucgccuacagcaacaacaccaucgccauccccacgaacuucuccaucagcaucaccaccgaggugaugcccgucagcauggcgaagaccuccguggacugcaacauguacaucugcggcgacagcacggagugcgccaaccuccugcugcaguacggcuccuucugcacccagcugaaccgcgcccucagcgggaucgccgccgagcaggaccggaacacccgcgagguguucgcgcaggucaagcagauguacaagacccccacgcugaaguacuucggcggguucaacuucucccagauccugccggacccccucaagcccaccaagcggagcuucaucgaggaccugcuguucaacaaggugacccucgccgacgccggcuucaugaagcaguacggggagugccugggcgacaucaacgcccgcgaccugaucugcgcccagaaguucaacggccucaccgugcugcccccgcugcucacggacgacaugaucgcggccuacaccgccgcccuggucuccgggaccgcgaccgccggcuggacguucggggccggcgccgcccugcagauccccuucgcgaugcagauggccuaccgguucaacgggaucggcgugacccagaacgugcucuacgagaaccagaagcagaucgccaaccaguucaacaaggccaucagccagauccaggagucccugaccaccacgagcaccgcccugggcaagcuccaggacgucgugaaccagaacgcgcaggcccugaacacccuggugaagcagcucuccagcaacuucggggccaucuccagcguccugaacgacauccugucccgccucgacaagguggaggccgaggugcagaucgaccggcugaucaccggccgccugcagagccuccagaccuacgucacgcagcagcugauccgggccgcggagauccgcgccuccgccaaccuggccgcgaccaagaugagcgagugcgugcucgggcaguccaagcggguggacuucugcggcaagggguaccaccugaugagcuucccccaggccgcgccccacggcgucguguuccugcacgugaccuacgucccgagccaggagcgcaacuucaccacggcccccgccaucugccacgagggcaaggccuacuucccccgggaggggguguucguguucaacggcaccuccugguucaucacccagcgcaacuucuucagcccccagaucaucaccacggacaacaccuucgucuccgggaacugcgacguggucaucggcaucaucaacaacaccguguacgacccgcuccagcccgagcuggacagcuucaaggaggagcuggacaaguacuucaagaaccacaccucccccgacguggaccucggggacaucagcggcaucaacgccuccgucgugaacauccagaaggagaucgaccggcugaacgagguggccaagaaccugaacgagagccucaucgaccugcaggagcugggcaaguacgagcaguacaucaaguggcccugguacgucuggcucggguucaucgccggccugaucgccaucgugauggugacgauccugcucugcugcaugaccuccugcugcagcugccugaagggggcgugcuccugcggcagcugcugcaaguucgacgaggacgacuccgagccgguccugaagggcgugaagcuccacuacaccugaggacuagucccuguucccagagcccacuuuuuuuucuuuuuuugaaauaaaauagccugucuuucagaucucaaaggcucuuuucagagccaccaaaaaaaaaaaaaaaaaaaaaaaaaaaaaaaaaaaaaaaaaaaaaaaaaaaaaaaaaaaaaaaaaaaaaaaaaaaaaaaaaaaaaaaaaaaaaaaaaaaaa

SEQ ID NO: 15042 - RNA, 4040 nt, Artificial Sequence
  SARS-CoV__P59594.1 spike protein mRNA gc (1-1255)(K968P_V969P)
aggagagucccgcagucggcguccagcggcucugcuuguucgugugugugucguugcaggccuuauucaagcuuaccauguucaucuuccugcuguuccugacccugaccagcggcuccgaccucgaccgcugcacgaccuucgacgacgugcaggcccccaacuacacccagcacaccagcuccaugcgcggggucuacuacccggacgagaucuuccggagcgacacgcuguaccugacccaggaccucuuccugcccuucuacuccaacgugaccggcuuccacaccaucaaccacacguucgggaaccccgugauccccuucaaggacggcaucuacuucgccgcgaccgagaaguccaacgucgugcggggguggguguucggcagcaccaugaacaacaagagccaguccgucaucaucaucaacaacagcaccaacguggugauccgcgccugcaacuucgagcugugcgacaacccguucuucgccgucuccaagcccaugggcacgcagacccacaccaugaucuucgacaacgccuucaacugcaccuucgaguacaucagcgacgccuucucccucgacgugagcgagaaguccgggaacuucaagcaccuccgggaguucguguucaagaacaaggacggcuuccuguacgucuacaagggguaccagcccaucgacguggugcgcgaccuccccagcggcuucaacacgcugaagccgaucuucaagcugccccucgggaucaacaucaccaacuuccgggcgauccugaccgccuucucccccgcccaggacaucuggggcaccagcgccgcggccuacuucgucggcuaccugaagcccacgaccuucaugcucaaguacgacgagaacgggaccaucaccgacgccguggacugcucccagaacccgcuggccgagcugaagugcagcgucaagagcuucgagaucgacaagggcaucuaccagacguccaacuuccgcguggugcccagcggggacgugguccgguuccccaacaucaccaaccucugccccuucggcgagguguucaacgccaccaaguucccguccguguacgcgugggagcgcaagaagaucagcaacugcgucgccgacuacuccgugcuguacaacagcaccuucuucuccacguucaagugcuacggcgucagcgccaccaagcugaacgaccucugcuucuccaacguguacgccgacagcuucguggucaagggggacgacgugcggcagaucgcccccggccagaccggggugaucgcggacuacaacuacaagcugcccgacgacuucaugggcugcguccuggccuggaacacccgcaacaucgacgccacguccaccgggaacuacaacuacaaguaccgguaccuccgccacggcaagcugcggcccuucgagcgcgacaucagcaacgugccguucucccccgacggcaagcccugcacgcccccggcccugaacugcuacuggccccucaacgacuacggguucuacaccaccaccggcaucggguaccagcccuaccggguggucgugcugagcuucgagcugcucaacgcccccgcgaccgugugcggcccgaagcuguccaccgaccugaucaagaaccagugcgucaacuucaacuucaacgggcucaccggcacgggcgugcugacccccagcuccaagcgcuuccagcccuuccagcaguucgggcgggacgugagcgacuucaccgacuccguccgcgacccgaagaccagcgagauccuggacaucagccccugcuccuucggcggggugagcgugaucacgcccggcaccaacgccuccagcgaggucgccgugcucuaccaggacgugaacugcaccgacgucuccaccgccauccacgccgaccagcugacgcccgcguggcggaucuacagcaccgggaacaacguguuccagacccaggccggcugccugaucggcgccgagcacguggacaccuccuacgagugcgacaucccgaucggggccggcaucugcgcgagcuaccacacggucucccuccugcgcagcaccucccagaaguccaucguggccuacaccaugagccugggggccgacagcuccaucgccuacagcaacaacaccaucgccauccccacgaacuucuccaucagcaucaccaccgaggugaugcccgucagcauggcgaagaccuccguggacugcaacauguacaucugcggcgacagcacggagugcgccaaccuccugcugcaguacggcuccuucugcacccagcugaaccgcgcccucagcgggaucgccgccgagcaggaccggaacacccgcgagguguucgcgcaggucaagcagauguacaagacccccacgcugaaguacuucggcggguucaacuucucccagauccugccggacccccucaagcccaccaagcggagcuucaucgaggaccugcuguucaacaaggugacccucgccgacgccggcuucaugaagcaguacggggagugccugggcgacaucaacgcccgcgaccugaucugcgcccagaaguucaacggccucaccgugcugcccccgcugcucacggacgacaugaucgcggccuacaccgccgcccuggucuccgggaccgcgaccgccggcuggacguucggggccggcgccgcccugcagauccccuucgcgaugcagauggccuaccgguucaacgggaucggcgugacccagaacgugcucuacgagaaccagaagcagaucgccaaccaguucaacaaggccaucagccagauccaggagucccugaccaccacgagcaccgcccugggcaagcuccaggacgucgugaaccagaacgcgcaggcccugaacacccuggugaagcagcucuccagcaacuucggggccaucuccagcguccugaacgacauccugucccgccucgacccgcccgaggccgaggugcagaucgaccggcugaucaccggccgccugcagagccuccagaccuacgugacgcagcagcugauccgggccgcggagauccgcgccuccgccaaccuggccgcgaccaagaugagcgagugcguccucgggcaguccaagcggguggacuucugcggcaagggguaccaccugaugagcuucccccaggccgcgccccacggcguggucuuccugcacgugaccuacgugcccagccaggagcgcaacuucaccacggcccccgccaucugccacgagggcaaggccuacuucccgcgggagggggucuucguguucaacggcaccuccugguucaucacccagcgcaacuucuucagcccccagaucaucaccacggacaacaccuucguguccgggaacugcgacgucgugaucggcaucaucaacaacaccgucuacgacccccuccagcccgagcuggacagcuucaaggaggagcuggacaaguacuucaagaaccacaccuccccggacguggaccucggggacaucagcggcaucaacgccuccguggucaacauccagaaggagaucgaccggcugaacgagguggccaagaaccugaacgagagccucaucgaccugcaggagcugggcaaguacgagcaguacaucaaguggcccugguacguguggcucggguucaucgccggccugaucgccaucgucauggugacgauccugcucugcugcaugaccuccugcugcagcugccugaagggggcgugcuccugcggcagcugcugcaaguucgacgaggacgacuccgagcccgugcugaagggcgucaagcuccacuacaccugaggacuagucccuguucccagagcccacuuuuuuuucuuuuuuugaaauaaaauagccugucuuucagaucucaaaggcucuuuucagagccaccaaaaaaaaaaaaaaaaaaaaaaaaaaaaaaaaaaaaaaaaaaaaaaaaaaaaaaaaaaaaaaaaaaaaaaaaaaaaaaaaaaaaaaaaaaaaaaaaaaaaa

SEQ ID NO: 15043 - RNA, 1853 nt, Artificial Sequence
  SARS-CoV__P59594.1 spike protein mRNA gc (1-17_747-1255)
aggagagucccgcagucggcguccagcggcucugcuuguucgugugugugucguugcaggccuuauucaagcuuaccauguucaucuuccugcuguuccugacccugaccagcggcuccgaccucgaccgcgcccugagcgggaucgccgcggagcaggaccggaacacgcgcgagguguucgcccaggucaagcagauguacaagacccccacccugaaguacuucggcggguucaacuucucccagauccucccggacccccugaagcccaccaagcggagcuucaucgaggaccuccucuucaacaaggugacgcuggccgacgccggcuucaugaagcaguacggggagugccugggcgacaucaacgcccgcgaccucaucugcgcgcagaaguucaacggccugaccgugcugcccccgcuccugaccgacgacaugaucgccgccuacaccgccgcgcuggucuccgggacggccaccgccggcuggaccuucggggccggcgccgcgcuccagauccccuucgccaugcagauggccuaccgguucaacgggaucggcgugacccagaacgugcuguacgagaaccagaagcagaucgccaaccaguucaacaaggccaucagccagauccaggagucccugacgaccaccagcaccgcgcucggcaagcugcaggacgucgugaaccagaacgcccaggcccugaacacgcucgugaagcagcuguccagcaacuucggggccaucuccagcguccugaacgacauccucucccgccuggacaagguggaggccgaggugcagaucgaccggcugaucaccggccgccuccagagccugcagaccuacgucacccagcagcugauccgggcggccgagauccgcgccuccgccaaccucgccgcgacgaagaugagcgagugcgugcuggggcaguccaagcggguggacuucugcggcaagggcuaccaccugaugagcuucccccaggccgcgccccacggggucguguuccuccacgugaccuacgucccgucccaggagcgcaacuucaccaccgcccccgccaucugccacgagggcaaggccuacuucccccgggaggggguguucguguucaacggcacgagcugguucaucacccagcgcaacuucuucagcccccagaucaucaccaccgacaacacguucgucuccgggaacugcgacguggugaucggcaucaucaacaacaccgucuacgacccgcugcagcccgagcuggacagcuucaaggaggagcucgacaaguacuucaagaaccacaccucccccgacguggaccugggcgacaucagcgggaucaacgccuccgucgugaacauccagaaggagaucgaccggcugaacgagguggccaagaaccucaacgagagccugaucgaccugcaggagcucggcaaguacgagcaguacaucaaguggcccugguacgucuggcugggguucaucgccggccugaucgcgaucgugauggugaccauccugcucugcugcaugacguccugcugcagcugccugaagggggccugcuccugcggcagcugcugcaaguucgacgaggacgacuccgagccgguccugaagggcgugaagcuccacuacaccugaggacuagucccuguucccagagcccacuuuuuuuucuuuuuuugaaauaaaauagccugucuuucagaucucaaaggcucuuuucagagccaccaaaaaaaaaaaaaaaaaaaaaaaaaaaaaaaaaaaaaaaaaaaaaaaaaaaaaaaaaaaaaaaaaaaaaaaaaaaaaaaaaaaaaaaaaaaaaaaaaaaaa

SEQ ID NO: 15044 - RNA, 4040 nt, Artificial Sequence
  SARS-CoV/Tor2__NP_828851.1 spike protein mRNA gc (1-1255)
aggagagucccgcagucggcguccagcggcucugcuuguucgugugugugucguugcaggccuuauucaagcuuaccauguucaucuuccugcuguuccugacccugaccagcggcuccgaccucgaccgcugcacgaccuucgacgacgugcaggcccccaacuacacccagcacaccagcuccaugcgcggggucuacuacccggacgagaucuuccggagcgacacgcuguaccugacccaggaccucuuccugcccuucuacuccaacgugaccggcuuccacaccaucaaccacacguucgggaaccccgugauccccuucaaggacggcaucuacuucgccgcgaccgagaaguccaacgucgugcggggguggguguucggcuccaccaugaacaacaagagccaguccgucaucaucaucaacaacagcaccaacguggugauccgcgccugcaacuucgagcugugcgacaacccguucuucgccgucuccaagcccaugggcacgcagacccacaccaugaucuucgacaacgccuucaacugcaccuucgaguacaucagcgacgccuucucccucgacgugagcgagaaguccgggaacuucaagcaccuccgggaguucguguucaagaacaaggacggcuuccuguacgucuacaagggguaccagcccaucgacguggugcgcgaccuccccagcggcuucaacacgcugaagccgaucuucaagcugccccucgggaucaacaucaccaacuuccgggcgauccugaccgccuucucccccgcccaggacaucuggggcaccagcgccgcggccuacuucgucggcuaccugaagcccacgaccuucaugcucaaguacgacgagaacgggaccaucaccgacgccguggacugcucccagaacccgcuggccgagcugaagugcagcgucaagagcuucgagaucgacaagggcaucuaccagacguccaacuuccgcguggugcccagcggggacgugguccgguuccccaacaucaccaaccucugccccuucggcgagguguucaacgccaccaaguucccguccguguacgcgugggagcgcaagaagaucagcaacugcgucgccgacuacuccgugcuguacaacagcaccuucuucuccacguucaagugcuacggcgucagcgccaccaagcugaacgaccucugcuucuccaacguguacgccgacagcuucguggucaagggggacgacgugcggcagaucgcccccggccagaccggggugaucgcggacuacaacuacaagcugcccgacgacuucaugggcugcguccuggccuggaacacccgcaacaucgacgccacguccaccgggaacuacaacuacaaguaccgguaccuccgccacggcaagcugcggcccuucgagcgcgacaucagcaacgugccguucucccccgacggcaagcccugcacgcccccggcccugaacugcuacuggccccucaacgacuacggguucuacaccaccaccggcaucggguaccagcccuaccggguggucgugcugagcuucgagcugcucaacgcccccgcgaccgugugcggcccgaagcuguccaccgaccugaucaagaaccagugcgucaacuucaacuucaacgggcucaccggcacgggcgugcugacccccagcuccaagcgcuuccagcccuuccagcaguucgggcgggacgugagcgacuucaccgacuccguccgcgacccgaagaccagcgagauccuggacaucagccccugcgccuucggcgggguguccgugaucacgcccggcaccaacgccagcuccgaggucgccgugcucuaccaggacgugaacugcaccgacgucagcaccgccauccacgcggaccagcugacgcccgccuggcggaucuacuccaccgggaacaacguguuccagacccaggccggcugccugaucggcgccgagcacguggacaccagcuacgagugcgacaucccgaucggggcgggcaucugcgccuccuaccacacggucagccuccugcgcuccaccagccagaaguccaucguggccuacaccaugagccugggggccgacuccagcaucgccuacuccaacaacaccaucgcgauccccacgaacuucagcaucuccaucaccaccgaggugaugcccgucagcauggccaagaccagcguggacugcaacauguacaucugcggcgacuccacggagugcgccaaccuccugcugcaguacggcagcuucugcacccagcugaaccgcgcccucuccgggaucgccgcggagcaggaccggaacacccgcgagguguucgcccaggucaagcagauguacaagacccccacgcugaaguacuucggcggguucaacuucagccagauccugccggacccccucaagcccaccaagcgguccuucaucgaggaccugcuguucaacaaggugacccucgccgacgccggcuucaugaagcaguacggggagugccugggcgacaucaacgcccgcgaccugaucugcgcgcagaaguucaacggccucaccgugcugcccccgcugcucacggacgacaugaucgccgccuacaccgccgcgcuggucagcgggaccgccaccgccggcuggacguucggggccggcgccgcgcugcagauccccuucgccaugcagauggccuaccgguucaacgggaucggcgugacccagaacgugcucuacgagaaccagaagcagaucgccaaccaguucaacaaggccaucucccagauccaggagagccugaccaccacguccaccgcgcugggcaagcuccaggacgucgugaaccagaacgcccaggcccugaacacccuggugaagcagcucagcuccaacuucggggccaucagcuccguccugaacgacauccugagccgccucgacaagguggaggccgaggugcagaucgaccggcugaucaccggccgccugcagucccuccagaccuacgucacgcagcagcugauccgggcggccgagauccgcgccagcgccaaccuggcggccaccaagauguccgagugcgugcucgggcagagcaagcggguggacuucugcggcaagggguaccaccugauguccuucccccaggccgcgccccacggcgucguguuccugcacgugaccuacgucccgagccaggagcgcaacuucaccacggcccccgccaucugccacgagggcaaggccuacuucccccgggaggggguguucguguucaacggcaccagcugguucaucacccagcgcaacuucuucagcccccagaucaucaccacggacaacaccuucgucagcgggaacugcgacguggucaucggcaucaucaacaacaccguguacgacccgcuccagcccgagcuggacuccuucaaggaggagcuggacaaguacuucaagaaccacaccagccccgacguggaccucggggacaucuccggcaucaacgccagcgucgugaacauccagaaggagaucgaccggcugaacgagguggccaagaaccugaacgagucccucaucgaccugcaggagcugggcaaguacgagcaguacaucaaguggcccugguacgucuggcucggguucaucgccggccugaucgcgaucgugauggugacgauccugcucugcugcaugaccagcugcugcuccugccugaagggggccugcagcugcggcuccugcugcaaguucgacgaggacgacagcgagccgguccugaagggcgugaagcuccacuacaccugaggacuagucccuguucccagagcccacuuuuuuuucuuuuuuugaaauaaaauagccugucuuucagaucucaaaggcucuuuucagagccaccaaaaaaaaaaaaaaaaaaaaaaaaaaaaaaaaaaaaaaaaaaaaaaaaaaaaaaaaaaaaaaaaaaaaaaaaaaaaaaaaaaaaaaaaaaaaaaaaaaaaa

SEQ ID NO: 15045 - RNA, 4040 nt, Artificial Sequence
  SARS-CoV/Tor2__NP_828851.1 spike protein mRNA gc (1-1255)(K968P_V969P)
aggagagucccgcagucggcguccagcggcucugcuuguucgugugugugucguugcaggccuuauucaagcuuaccauguucaucuuccugcuguuccugacccugaccagcggcuccgaccucgaccgcugcacgaccuucgacgacgugcaggcccccaacuacacccagcacaccagcuccaugcgcggggucuacuacccggacgagaucuuccggagcgacacgcuguaccugacccaggaccucuuccugcccuucuacuccaacgugaccggcuuccacaccaucaaccacacguucgggaaccccgugauccccuucaaggacggcaucuacuucgccgcgaccgagaaguccaacgucgugcggggguggguguucggcuccaccaugaacaacaagagccaguccgucaucaucaucaacaacagcaccaacguggugauccgcgccugcaacuucgagcugugcgacaacccguucuucgccgucuccaagcccaugggcacgcagacccacaccaugaucuucgacaacgccuucaacugcaccuucgaguacaucagcgacgccuucucccucgacgugagcgagaaguccgggaacuucaagcaccuccgggaguucguguucaagaacaaggacggcuuccuguacgucuacaagggguaccagcccaucgacguggugcgcgaccuccccagcggcuucaacacgcugaagccgaucuucaagcugccccucgggaucaacaucaccaacuuccgggcgauccugaccgccuucucccccgcccaggacaucuggggcaccagcgccgcggccuacuucgucggcuaccugaagcccacgaccuucaugcucaaguacgacgagaacgggaccaucaccgacgccguggacugcucccagaacccgcuggccgagcugaagugcagcgucaagagcuucgagaucgacaagggcaucuaccagacguccaacuuccgcguggugcccagcggggacgugguccgguuccccaacaucaccaaccucugccccuucggcgagguguucaacgccaccaaguucccguccguguacgcgugggagcgcaagaagaucagcaacugcgucgccgacuacuccgugcuguacaacagcaccuucuucuccacguucaagugcuacggcgucagcgccaccaagcugaacgaccucugcuucuccaacguguacgccgacagcuucguggucaagggggacgacgugcggcagaucgcccccggccagaccggggugaucgcggacuacaacuacaagcugcccgacgacuucaugggcugcguccuggccuggaacacccgcaacaucgacgccacguccaccgggaacuacaacuacaaguaccgguaccuccgccacggcaagcugcggcccuucgagcgcgacaucagcaacgugccguucucccccgacggcaagcccugcacgcccccggcccugaacugcuacuggccccucaacgacuacggguucuacaccaccaccggcaucggguaccagcccuaccggguggucgugcugagcuucgagcugcucaacgcccccgcgaccgugugcggcccgaagcuguccaccgaccugaucaagaaccagugcgucaacuucaacuucaacgggcucaccggcacgggcgugcugacccccagcuccaagcgcuuccagcccuuccagcaguucgggcgggacgugagcgacuucaccgacuccguccgcgacccgaagaccagcgagauccuggacaucagccccugcgccuucggcgggguguccgugaucacgcccggcaccaacgccagcuccgaggucgccgugcucuaccaggacgugaacugcaccgacgucagcaccgccauccacgcggaccagcugacgcccgccuggcggaucuacuccaccgggaacaacguguuccagacccaggccggcugccugaucggcgccgagcacguggacaccagcuacgagugcgacaucccgaucggggcgggcaucugcgccuccuaccacacggucagccuccugcgcuccaccagccagaaguccaucguggccuacaccaugagccugggggccgacuccagcaucgccuacuccaacaacaccaucgcgauccccacgaacuucagcaucuccaucaccaccgaggugaugcccgucagcauggccaagaccagcguggacugcaacauguacaucugcggcgacuccacggagugcgccaaccuccugcugcaguacggcagcuucugcacccagcugaaccgcgcccucuccgggaucgccgcggagcaggaccggaacacccgcgagguguucgcccaggucaagcagauguacaagacccccacgcugaaguacuucggcggguucaacuucagccagauccugccggacccccucaagcccaccaagcgguccuucaucgaggaccugcuguucaacaaggugacccucgccgacgccggcuucaugaagcaguacggggagugccugggcgacaucaacgcccgcgaccugaucugcgcgcagaaguucaacggccucaccgugcugcccccgcugcucacggacgacaugaucgccgccuacaccgccgcgcuggucagcgggaccgccaccgccggcuggacguucggggccggcgccgcgcugcagauccccuucgccaugcagauggccuaccgguucaacgggaucggcgugacccagaacgugcucuacgagaaccagaagcagaucgccaaccaguucaacaaggccaucucccagauccaggagagccugaccaccacguccaccgcgcugggcaagcuccaggacgucgugaaccagaacgcccaggcccugaacacccuggugaagcagcucagcuccaacuucggggccaucagcuccguccugaacgacauccugagccgccucgacccgcccgaggccgaggugcagaucgaccggcugaucaccggccgccugcagucccuccagaccuacgugacgcagcagcugauccgggcggccgagauccgcgccagcgccaaccuggcggccaccaagauguccgagugcguccucgggcagagcaagcggguggacuucugcggcaagggguaccaccugauguccuucccccaggccgcgccccacggcguggucuuccugcacgugaccuacgugcccagccaggagcgcaacuucaccacggcccccgccaucugccacgagggcaaggccuacuucccgcgggagggggucuucguguucaacggcaccagcugguucaucacccagcgcaacuucuucagcccccagaucaucaccacggacaacaccuucgugagcgggaacugcgacgucgugaucggcaucaucaacaacaccgucuacgacccccuccagcccgagcuggacuccuucaaggaggagcuggacaaguacuucaagaaccacaccagcccggacguggaccucggggacaucuccggcaucaacgccagcguggucaacauccagaaggagaucgaccggcugaacgagguggccaagaaccugaacgagucccucaucgaccugcaggagcugggcaaguacgagcaguacaucaaguggcccugguacguguggcucggguucaucgccggccugaucgcgaucgucauggugacgauccugcucugcugcaugaccagcugcugcuccugccugaagggggccugcagcugcggcuccugcugcaaguucgacgaggacgacagcgagcccgugcugaagggcgucaagcuccacuacaccugaggacuagucccuguucccagagcccacuuuuuuuucuuuuuuugaaauaaaauagccugucuuucagaucucaaaggcucuuuucagagccaccaaaaaaaaaaaaaaaaaaaaaaaaaaaaaaaaaaaaaaaaaaaaaaaaaaaaaaaaaaaaaaaaaaaaaaaaaaaaaaaaaaaaaaaaaaaaaaaaaaaaa

SEQ ID NO: 15046 - RNA, 3845 nt, Artificial Sequence
  SARS-CoV/Tor2__NP_828851.1 spike protein mRNA gc (variant)
aggagagucccgcagucggcguccagcggcucugcuuguucgugugugugucguugcaggccuuauucaagcuuaccauguucaucuuccugcuguuccugacccugaccagcggcuccgaccucgaccgcugcacgaccuucgacgacgugcaggcccccaacuacacccagcacaccagcuccaugcgcggggucuacuacccggacgagaucuuccggagcgacacgcuguaccugacccaggaccucuuccugcccuucuacuccaacgugaccggcuuccacaccaucaaccacacguucgggaaccccgugauccccuucaaggacggcaucuacuucgccgcgaccgagaaguccaacgucgugcggggguggguguucggcuccaccaugaacaacaagagccaguccgucaucaucaucaacaacagcaccaacguggugauccgcgccugcaacuucgagcugugcgacaacccguucuucgccgucuccaagcccaugggcacgcagacccacaccaugaucuucgacaacgccuucaacugcaccuucgaguacaucagcgacgccuucucccucgacgugagcgagaaguccgggaacuucaagcaccuccgggaguucguguucaagaacaaggacggcuuccuguacgucuacaagggguaccagcccaucgacguggugcgcgaccuccccagcggcuucaacacgcugaagccgaucuucaagcugccccucgggaucaacaucaccaacuuccgggcgauccugaccgccuucucccccgcccaggacaucuggggcaccagcgccgcggccuacuucgucggcuaccugaagcccacgaccuucaugcucaaguacgacgagaacgggaccaucaccgacgccguggacugcucccagaacccgcuggccgagcugaagugcagcgucaagagcuucgagaucgacaagggcaucuaccagacguccaacuuccgcguggugcccagcggggacgugguccgguuccccaacaucaccaaccucugccccuucggcgagguguucaacgccaccaaguucccguccguguacgcgugggagcgcaagaagaucagcaacugcgucgccgacuacuccgugcuguacaacagcaccuucuucuccacguucaagugcuacggcgucagcgccaccaagcugaacgaccucugcuucuccaacguguacgccgacagcuucguggucaagggggacgacgugcggcagaucgcccccggccagaccggggugaucgcggacuacaacuacaagcugcccgacgacuucaugggcugcguccuggccuggaacacccgcaacaucgacgccacguccaccgggaacuacaacuacaaguaccgguaccuccgccacggcaagcugcggcccuucgagcgcgacaucagcaacgugccguucucccccgacggcaagcccugcacgcccccggcccugaacugcuacuggccccucaacgacuacggguucuacaccaccaccggcaucggguaccagcccuaccggguggucgugcugagcuucgagcugcucaacgcccccgcgaccgugugcggcccgaagcuguccaccgaccugaucaagaaccagugcgucaacuucaacuucaacgggcucaccggcacgggcgugcugacccccagcuccaagcgcuuccagcccuuccagcaguucgggcgggacgugagcgacuucaccgacuccguccgcgacccgaagaccagcgagauccuggacaucagccccugcgccuucggcgggguguccgugaucacgcccggcaccaacgccagcuccgaggucgccgugcucuaccaggacgugaacugcaccgacgucagcaccgccauccacgcggaccagcugacgcccgccuggcggaucuacuccaccgggaacaacguguuccagacccaggccggcugccugaucggcgccgagcacguggacaccagcuacgagugcgacaucccgaucggggcgggcaucugcgccuccuaccacacggucagccuccugcgcuccaccagccagaaguccaucguggccuacaccaugagccugggggccgacuccagcaucgccuacuccaacaacaccaucgcgauccccacgaacuucagcaucuccaucaccaccgaggugaugcccgucagcauggccaagaccagcguggacugcaacauguacaucugcggcgacuccacggagugcgccaaccuccugcugcaguacggcagcuucugcacccagcugaaccgcgcccucuccgggaucgccgcggagcaggaccggaacacccgcgagguguucgcccaggucaagcagauguacaagacccccacgcugaaguacuucggcggguucaacuucagccagauccugccggacccccucaagcccaccaagcgguccuucaucgaggaccugcuguucaacaaggugacccucgccgacgccggcuucaugaagcaguacggggagugccugggcgacaucaacgcccgcgaccugaucugcgcgcagaaguucaacggccucaccgugcugcccccgcugcucacggacgacaugaucgccgccuacaccgccgcgcuggucagcgggaccgccaccgccggcuggacguucggggccggcgccgcgcugcagauccccuucgccaugcagauggccuaccgguucaacgggaucggcgugacccagaacgugcucuacgagaaccagaagcagaucgccaaccaguucaacaaggccaucucccagauccaggagagccugaccaccacguccaccgcgcugggcaagcuccaggacgucgugaaccagaacgcccaggcccugaacacccuggugaagcagcucagcuccaacuucggggccaucagcuccguccugaacgacauccugagccgccucgacccgcccgaggccgaggugcagaucgaccggcugaucaccggccgccugcagucccuccagaccuacgugacgcagcagcugauccgggcggccgagauccgcgccagcgccaaccuggcggccaccaagauguccgagugcguccucgggcagagcaagcggguggacuucugcggcaagggguaccaccugauguccuucccccaggccgcgccccacggcguggucuuccugcacgugaccuacgugcccagccaggagcgcaacuucaccacggcccccgccaucugccacgagggcaaggccuacuucccgcgggagggggucuucguguucaacggcaccagcugguucaucacccagcgcaacuucuucagcccccagaucaucaccacggacaacaccuucgugagcgggaacugcgacgucgugaucggcaucaucaacaacaccgucuacgacccccuccagcccgagcuggacuccuucaaggaggagcuggacaaguacuucaagaaccacaccagcccggacguggaccucggggacaucuccggcaucaacgccagcguggucaacauccagaaggagaucgaccggcugaacgagguggccaagaaccugaacgagucccucaucgaccugcaggagcugggcaaguacgagcagugaggacuagucccuguucccagagcccacuuuuuuuucuuuuuuugaaauaaaauagccugucuuucagaucucaaaggcucuuuucagagccaccaaaaaaaaaaaaaaaaaaaaaaaaaaaaaaaaaaaaaaaaaaaaaaaaaaaaaaaaaaaaaaaaaaaaaaaaaaaaaaaaaaaaaaaaaaaaaaaaaaaaa

SEQ ID NO: 15047 - RNA, 3926 nt, Artificial Sequence
  SARS-CoV/Tor2__NP_828851.1 spike protein mRNA gc (variant)
aggagagucccgcagucggcguccagcggcucugcuuguucgugugugugucguugcaggccuuauucaagcuuaccauguucaucuuccugcuguuccugacccugaccagcggcuccgaccucgaccgcugcacgaccuucgacgacgugcaggcccccaacuacacccagcacaccagcuccaugcgcggggucuacuacccggacgagaucuuccggagcgacacgcuguaccugacccaggaccucuuccugcccuucuacuccaacgugaccggcuuccacaccaucaaccacacguucgggaaccccgugauccccuucaaggacggcaucuacuucgccgcgaccgagaaguccaacgucgugcggggguggguguucggcuccaccaugaacaacaagagccaguccgucaucaucaucaacaacagcaccaacguggugauccgcgccugcaacuucgagcugugcgacaacccguucuucgccgucuccaagcccaugggcacgcagacccacaccaugaucuucgacaacgccuucaacugcaccuucgaguacaucagcgacgccuucucccucgacgugagcgagaaguccgggaacuucaagcaccuccgggaguucguguucaagaacaaggacggcuuccuguacgucuacaagggguaccagcccaucgacguggugcgcgaccuccccagcggcuucaacacgcugaagccgaucuucaagcugccccucgggaucaacaucaccaacuuccgggcgauccugaccgccuucucccccgcccaggacaucuggggcaccagcgccgcggccuacuucgucggcuaccugaagcccacgaccuucaugcucaaguacgacgagaacgggaccaucaccgacgccguggacugcucccagaacccgcuggccgagcugaagugcagcgucaagagcuucgagaucgacaagggcaucuaccagacguccaacuuccgcguggugcccagcggggacgugguccgguuccccaacaucaccaaccucugccccuucggcgagguguucaacgccaccaaguucccguccguguacgcgugggagcgcaagaagaucagcaacugcgucgccgacuacuccgugcuguacaacagcaccuucuucuccacguucaagugcuacggcgucagcgccaccaagcugaacgaccucugcuucuccaacguguacgccgacagcuucguggucaagggggacgacgugcggcagaucgcccccggccagaccggggugaucgcggacuacaacuacaagcugcccgacgacuucaugggcugcguccuggccuggaacacccgcaacaucgacgccacguccaccgggaacuacaacuacaaguaccgguaccuccgccacggcaagcugcggcccuucgagcgcgacaucagcaacgugccguucucccccgacggcaagcccugcacgcccccggcccugaacugcuacuggccccucaacgacuacggguucuacaccaccaccggcaucggguaccagcccuaccggguggucgugcugagcuucgagcugcucaacgcccccgcgaccgugugcggcccgaagcuguccaccgaccugaucaagaaccagugcgucaacuucaacuucaacgggcucaccggcacgggcgugcugacccccagcuccaagcgcuuccagcccuuccagcaguucgggcgggacgugagcgacuucaccgacuccguccgcgacccgaagaccagcgagauccuggacaucagccccugcgccuucggcgggguguccgugaucacgcccggcaccaacgccagcuccgaggucgccgugcucuaccaggacgugaacugcaccgacgucagcaccgccauccacgcggaccagcugacgcccgccuggcggaucuacuccaccgggaacaacguguuccagacccaggccggcugccugaucggcgccgagcacguggacaccagcuacgagugcgacaucccgaucggggcgggcaucugcgccuccuaccacacggucagccuccugcgcuccaccagccagaaguccaucguggccuacaccaugagccugggggccgacuccagcaucgccuacuccaacaacaccaucgcgauccccacgaacuucagcaucuccaucaccaccgaggugaugcccgucagcauggccaagaccagcguggacugcaacauguacaucugcggcgacuccacggagugcgccaaccuccugcugcaguacggcagcuucugcacccagcugaaccgcgcccucuccgggaucgccgcggagcaggaccggaacacccgcgagguguucgcccaggucaagcagauguacaagacccccacgcugaaguacuucggcggguucaacuucagccagauccugccggacccccucaagcccaccaagcgguccuucaucgaggaccugcuguucaacaaggugacccucgccgacgccggcuucaugaagcaguacggggagugccugggcgacaucaacgcccgcgaccugaucugcgcgcagaaguucaacggccucaccgugcugcccccgcugcucacggacgacaugaucgccgccuacaccgccgcgcuggucagcgggaccgccaccgccggcuggacguucggggccggcgccgcgcugcagauccccuucgccaugcagauggccuaccgguucaacgggaucggcgugacccagaacgugcucuacgagaaccagaagcagaucgccaaccaguucaacaaggccaucucccagauccaggagagccugaccaccacguccaccgcgcugggcaagcuccaggacgucgugaaccagaacgcccaggcccugaacacccuggugaagcagcucagcuccaacuucggggccaucagcuccguccugaacgacauccugagccgccucgacccgcccgaggccgaggugcagaucgaccggcugaucaccggccgccugcagucccuccagaccuacgugacgcagcagcugauccgggcggccgagauccgcgccagcgccaaccuggcggccaccaagauguccgagugcguccucgggcagagcaagcggguggacuucugcggcaagggguaccaccugauguccuucccccaggccgcgccccacggcguggucuuccugcacgugaccuacgugcccagccaggagcgcaacuucaccacggcccccgccaucugccacgagggcaaggccuacuucccgcgggagggggucuucguguucaacggcaccagcugguucaucacccagcgcaacuucuucagcccccagaucaucaccacggacaacaccuucgugagcgggaacugcgacgucgugaucggcaucaucaacaacaccgucuacgacccccuccagcccgagcuggacuccuucaaggaggagcuggacaaguacuucaagaaccacaccagcccggacguggaccucggggacaucuccggcaucaacgccagcguggucaacauccagaaggagaucgaccggcugaacgagguggccaagaaccugaacgagucccucaucgaccugcaggagcugggcaaguacgagcagggcggguacauccccgaggcgccccgcgacgggcaggccuacgugcggaaggacggcgaguggguccuccugagcacguucugaggacuagucccuguucccagagcccacuuuuuuuucuuuuuuugaaauaaaauagccugucuuucagaucucaaaggcucuuuucagagccaccaaaaaaaaaaaaaaaaaaaaaaaaaaaaaaaaaaaaaaaaaaaaaaaaaaaaaaaaaaaaaaaaaaaaaaaaaaaaaaaaaaaaaaaaaaaaaaaaaaaaa

SEQ ID NO: 15048 - RNA, 4334 nt, Artificial Sequence
  HCoV/OC43__P36334.1 spike protein mRNA gc (1-1353)
aggagagucccgcagucggcguccagcggcucugcuuguucgugugugugucguugcaggccuuauucaagcuuaccauguuccugauccuccugaucagccugcccaccgccuucgccgugaucggcgaccucaagugcaccuccgacaacaucaacgacaaggacacggggccgccgcccaucagcaccgacaccgucgacgugaccaacggccuggggacguacuacgugcuggaccgcgucuaccucaacaccacccuguuccugaacggcuacuaccccaccuccgggagcacguaccggaacauggcgcucaagggcuccgugcugcugagccgccucugguucaagccgcccuuccuguccgacuucaucaacggcaucuucgccaaggugaagaacaccaaggucaucaaggaccgggugauguacagcgaguuccccgccaucaccaucggguccaccuucgugaacacgagcuacuccgucguggugcagccccgcaccaucaacagcacccaggacggcgacaacaagcugcaggggcuccuggaggucuccgugugccaguacaacaugugcgaguacccccagaccaucugccaccccaaccugggcaaccaccggaaggagcucuggcaccuggacacggggguggucagcugccuguacaagcgcaacuucaccuacgacgugaacgccgacuaccucuacuuccacuucuaccaggagggcggcaccuucuacgccuacuucaccgacacggggguggucaccaaguuccuguucaacguguaccugggcauggcgcucucccacuacuacgugaugccccugaccugcaacagcaagcugacccucgaguacugggucacgccccugaccucccggcaguaccugcucgccuucaaccaggacgggaucaucuucaacgccgaggacugcaugagcgacuucauguccgagaucaagugcaagacccagagcaucgccccgcccaccggcguguacgagcugaacggcuacacggugcagcccaucgcggacgucuaccgccggaagcccaaccugccgaacugcaacaucgaggccuggcucaacgacaagagcgugcccagcccccugaacugggagcgcaagaccuucuccaacugcaacuucaacauguccagccugauguccuucauccaggccgacagcuucacgugcaacaacaucgacgccgccaagaucuacgggaugugcuucuccagcaucaccaucgacaaguucgcgauccccaacggccggaaggucgaccuccagcuggggaaccugggcuaccuccaguccuucaacuaccgcaucgacaccaccgccaccagcugccagcuguacuacaaccugccggccgccaacguguccgugagccgguucaaccccuccaccuggaacaagcgcuucggguucaucgaggacagcgucuucaagccccggcccgccggcgugcucacgaaccacgacguggucuacgcgcagcacugcuucaaggccccgaagaacuucugccccugcaagcugaacggcuccugcguggggagcggccccgggaagaacaacggcaucgggaccugccccgccggcaccaacuaccugaccugcgacaaccucugcaccccggaccccaucacguucaccggcaccuacaagugcccccagaccaagucccugguggggaucggcgagcacugcagcgggcuggccgucaaguccgacuacugcggcgggaacagcugcacgugccgcccgcaggccuuccugggcuggagcgcggacuccugccuccagggcgacaagugcaacaucuucgccaacuucauccugcacgacgugaacagcgggcugaccugcuccaccgaccuccagaaggccaacaccgacaucauccugggcgugugcgucaacuacgaccuguacgggauccucggccagggcaucuucguggaggugaacgccacguacuacaacagcuggcagaaccugcuguacgacuccaacgggaaccucuacggcuuccgggacuacaucaucaaccgcaccuucaugauccggagcugcuacuccgggcgcgucagcgccgcguuccacgccaacuccagcgagcccgcccugcuguuccggaacaucaagugcaacuacguguucaacaacucccucacccgccagcugcagcccaucaacuacuucgacagcuaccugggcugcguggucaacgccuacaacuccaccgcgaucagcgugcagacgugcgaccucaccgugggguccggcuacugcgucgacuacagcaagaaccgccggucccgcggcgccaucaccaccggguaccgguucacgaacuucgagcccuucaccgugaacagcgugaacgacagccuggagccggucggcgggcuguacgagauccagauccccuccgaguucaccaucggcaacaugguggaguucauccagaccagcucccccaaggugacgaucgacugcgccgccuucgucugcggggacuacgccgcgugcaagagccagcucguggaguacggcuccuucugcgacaacaucaacgccauccugaccgaggugaacgagcugcucgacaccacccagcugcaggucgccaacagccugaugaacggcgugacgcucuccaccaagcugaaggacggggugaacuucaacgucgacgacaucaacuucagccccgugcugggcugccucggguccgagugcagcaaggccuccagccgcuccgccaucgaggaccugcuguucgacaaggugaagcucagcgacgucggcuucguggaggcguacaacaacugcaccgggggcgccgagauccgggaccugaucugcgugcaguccuacaagggcaucaagguccugccgccccuccugagcgagaaccagaucuccggguacacccuggccgccacgagcgccucccucuucccgcccuggaccgcggccgccggcgugcccuucuaccugaacgugcaguaccgcaucaacgggcugggcgucaccauggacgugcucagccagaaccagaagcugaucgccaacgcguucaacaacgcccuguacgccauccaggagggguucgacgccaccaacagcgcccucgugaagauccaggcggucgugaacgccaacgccgaggcccugaacaaccugcuccagcagcuguccaaccgguucggcgccaucagcgcgucccugcaggagauccucagccgccuggacgcccuggaggccgaggcccagaucgaccggcucaucaacggccgccugacggcccugaacgcguacgugucccagcagcucagcgacuccacccuggucaaguucagcgccgcccaggccauggagaaggugaacgagugcgugaagucccagagcucccggaucaacuucugcgggaacggcaaccacaucaucagccugguccagaacgcgcccuacgggcucuacuucauccacuucuccuacgugcccaccaaguacgucaccgcccgcgugagccccggccugugcaucgccggcgaccgggggaucgccccgaaguccggcuacuucgugaacgucaacaacacguggauguacaccgggagcggcuacuacuaccccgagcccaucaccgagaacaacgugguggucauguccacgugcgccgugaacuacaccaaggcgcccuacgugaugcugaacaccagcaucccgaaccuccccgacuucaaggaggagcuggaccagugguucaagaaccagaccuccgucgcccccgaccugagccucgacuacaucaacgugaccuuccuggaccuccagguggagaugaaccgccugcaggaggccaucaagguccugaaccagagcuacaucaaccugaaggacaucgggaccuacgaguacuacgugaaguggcccugguacguguggcuccugaucugccuggccggcgucgccaugcucgugcugcuguucuucaucugcugcugcacgggcugcgggaccuccugcuucaagaagugcggcgggugcugcgacgacuacaccggcuaccaggagcucgugaucaagaccagccacgacgacugaggacuagucccuguucccagagcccacuuuuuuuucuuuuuuugaaauaaaauagccugucuuucagaucucaaaggcucuuuucagagccaccaaaaaaaaaaaaaaaaaaaaaaaaaaaaaaaaaaaaaaaaaaaaaaaaaaaaaaaaaaaaaaaaaaaaaaaaaaaaaaaaaaaaaaaaaaaaaaaaaaaaa

SEQ ID NO: 15049 - RNA, 4334 nt, Artificial Sequence
  HCoV/OC43__P36334.1 spike protein mRNA gc (1-1353)(A1070P_L1071P)
aggagagucccgcagucggcguccagcggcucugcuuguucgugugugugucguugcaggccuuauucaagcuuaccauguuccugauccuccugaucagccugcccaccgccuucgccgugaucggcgaccucaagugcaccuccgacaacaucaacgacaaggacacggggccgccgcccaucagcaccgacaccgucgacgugaccaacggccuggggacguacuacgugcuggaccgcgucuaccucaacaccacccuguuccugaacggcuacuaccccaccuccgggagcacguaccggaacauggcgcucaagggcuccgugcugcugagccgccucugguucaagccgcccuuccuguccgacuucaucaacggcaucuucgccaaggugaagaacaccaaggucaucaaggaccgggugauguacagcgaguuccccgccaucaccaucggguccaccuucgugaacacgagcuacuccgucguggugcagccccgcaccaucaacagcacccaggacggcgacaacaagcugcaggggcuccuggaggucuccgugugccaguacaacaugugcgaguacccccagaccaucugccaccccaaccugggcaaccaccggaaggagcucuggcaccuggacacggggguggucagcugccuguacaagcgcaacuucaccuacgacgugaacgccgacuaccucuacuuccacuucuaccaggagggcggcaccuucuacgccuacuucaccgacacggggguggucaccaaguuccuguucaacguguaccugggcauggcgcucucccacuacuacgugaugccccugaccugcaacagcaagcugacccucgaguacugggucacgccccugaccucccggcaguaccugcucgccuucaaccaggacgggaucaucuucaacgccgaggacugcaugagcgacuucauguccgagaucaagugcaagacccagagcaucgccccgcccaccggcguguacgagcugaacggcuacacggugcagcccaucgcggacgucuaccgccggaagcccaaccugccgaacugcaacaucgaggccuggcucaacgacaagagcgugcccagcccccugaacugggagcgcaagaccuucuccaacugcaacuucaacauguccagccugauguccuucauccaggccgacagcuucacgugcaacaacaucgacgccgccaagaucuacgggaugugcuucuccagcaucaccaucgacaaguucgcgauccccaacggccggaaggucgaccuccagcuggggaaccugggcuaccuccaguccuucaacuaccgcaucgacaccaccgccaccagcugccagcuguacuacaaccugccggccgccaacguguccgugagccgguucaaccccuccaccuggaacaagcgcuucggguucaucgaggacagcgucuucaagccccggcccgccggcgugcucacgaaccacgacguggucuacgcgcagcacugcuucaaggccccgaagaacuucugccccugcaagcugaacggcuccugcguggggagcggccccgggaagaacaacggcaucgggaccugccccgccggcaccaacuaccugaccugcgacaaccucugcaccccggaccccaucacguucaccggcaccuacaagugcccccagaccaagucccugguggggaucggcgagcacugcagcgggcuggccgucaaguccgacuacugcggcgggaacagcugcacgugccgcccgcaggccuuccugggcuggagcgcggacuccugccuccagggcgacaagugcaacaucuucgccaacuucauccugcacgacgugaacagcgggcugaccugcuccaccgaccuccagaaggccaacaccgacaucauccugggcgugugcgucaacuacgaccuguacgggauccucggccagggcaucuucguggaggugaacgccacguacuacaacagcuggcagaaccugcuguacgacuccaacgggaaccucuacggcuuccgggacuacaucaucaaccgcaccuucaugauccggagcugcuacuccgggcgcgucagcgccgcguuccacgccaacuccagcgagcccgcccugcuguuccggaacaucaagugcaacuacguguucaacaacucccucacccgccagcugcagcccaucaacuacuucgacagcuaccugggcugcguggucaacgccuacaacuccaccgcgaucagcgugcagacgugcgaccucaccgugggguccggcuacugcgucgacuacagcaagaaccgccggucccgcggcgccaucaccaccggguaccgguucacgaacuucgagcccuucaccgugaacagcgugaacgacagccuggagccggucggcgggcuguacgagauccagauccccuccgaguucaccaucggcaacaugguggaguucauccagaccagcucccccaaggugacgaucgacugcgccgccuucgucugcggggacuacgccgcgugcaagagccagcucguggaguacggcuccuucugcgacaacaucaacgccauccugaccgaggugaacgagcugcucgacaccacccagcugcaggucgccaacagccugaugaacggcgugacgcucuccaccaagcugaaggacggggugaacuucaacgucgacgacaucaacuucagccccgugcugggcugccucggguccgagugcagcaaggccuccagccgcuccgccaucgaggaccugcuguucgacaaggugaagcucagcgacgucggcuucguggaggcguacaacaacugcaccgggggcgccgagauccgggaccugaucugcgugcaguccuacaagggcaucaagguccugccgccccuccugagcgagaaccagaucuccggguacacccuggccgccacgagcgccucccucuucccgcccuggaccgcggccgccggcgugcccuucuaccugaacgugcaguaccgcaucaacgggcugggcgucaccauggacgugcucagccagaaccagaagcugaucgccaacgcguucaacaacgcccuguacgccauccaggagggguucgacgccaccaacagcgcccucgugaagauccaggcggucgugaacgccaacgccgaggcccugaacaaccugcuccagcagcuguccaaccgguucggcgccaucagcgcgucccugcaggagauccucagccgccuggacccgcccgaggccgaggcccagaucgaccggcugaucaacggccgccucacggcccugaacgccuacgugucccagcagcugagcgacuccacccucgucaaguucagcgcggcccaggccauggagaaggugaacgagugcgugaagucccagagcucccggaucaacuucugcgggaacggcaaccacaucaucagccugguccagaacgcccccuacgggcuguacuucauccacuucuccuacgugcccaccaaguacgucaccgcgcgcgugagccccggccucugcaucgccggcgaccgggggaucgcccccaaguccggcuacuucgugaacgucaacaacacguggauguacaccgggagcggcuacuacuaccccgagccgaucaccgagaacaacgugguggucauguccacgugcgccgugaacuacaccaaggcccccuacgugaugcugaacaccagcauccccaaccugcccgacuucaaggaggagcucgaccagugguucaagaaccagaccuccgucgcgccggaccugagccuggacuacaucaacgugaccuuccucgaccuccagguggagaugaaccgccugcaggaggccaucaagguccugaaccagagcuacaucaaccugaaggacaucgggaccuacgaguacuacgugaaguggcccugguacguguggcugcucaucugccuggccggcgucgccaugcuggugcuccuguucuucaucugcugcugcacgggcugcgggaccuccugcuucaagaagugcggcgggugcugcgacgacuacaccggcuaccaggagcuggugaucaagaccagccacgacgacugaggacuagucccuguucccagagcccacuuuuuuuucuuuuuuugaaauaaaauagccugucuuucagaucucaaaggcucuuuucagagccaccaaaaaaaaaaaaaaaaaaaaaaaaaaaaaaaaaaaaaaaaaaaaaaaaaaaaaaaaaaaaaaaaaaaaaaaaaaaaaaaaaaaaaaaaaaaaaaaaaaaaa

SEQ ID NO: 15050 - RNA, 4361 nt, Artificial Sequence
  HCoV/OC43/1783A_10__AIL49484.1 spike protein mRNA gc (1-1362)
aggagagucccgcagucggcguccagcggcucugcuuguucgugugugugucguugcaggccuuauucaagcuuaccauguuccugauccuccugaucagccugcccaccgccuucgccgugaucggcgaccucaagugcccgcuggacucccgcaccgggagccugaacaacaucgacacgggcccgcccuccaucagcaccgcgaccgucgacgugaccaacgggcucggcacguacuacgugcuggaccgggucuaccugaacaccacccucuuccugaacggguacuaccccaccuccggcagcacguaccgcaacauggcccugaagggcaccgacaagcucuccacccugugguucaagccgcccuuccugagcgacuucaucaacgggaucuucgccaaggugaagaacaccaagguguucaaggacggcgucauguacuccgaguuccccgccaucacgaucgggagcaccuucgugaacaccuccuacagcguggucgugcagccccggaccaucaacuccacgcaggacggcgugaacaagcuccaggggcugcuggaggucagcgugugccaguacaacaugugcgaguacccccacaccaucugccaccccaagcucggcaaccacuucaaggagcuguggcacauggacaccggcguggucuccugccuguacaagcgcaacuucaccuacgacgugaacgccacguaccucuacuuccacuucuaccaggagggcggcaccuucuacgcguacuucaccgacaccgggguggucacgaaguuccuguucaacguguaccugggcauggcccucagccacuacuacgugaugccccugaccugcaucucccggcgcgacaucggcuucacccuggaguacugggucacgccccucaccagccggcaguaccugcuggccuucaaccaggacgggaucaucuucaacgccguggacugcauguccgacuucaugagcgagaucaagugcaagacccagagcaucgcgccgcccaccggcguguacgagcucaacggguacaccguccagcccaucgccgacguguaccgccggaagcccgaccugccgaacugcaacaucgaggccuggcugaacgacaaguccguccccagcccccucaacugggagcgcaagacguucuccaacugcaacuucaacaugagcucccugaugagcuucauccaggccgacuccuucacgugcaacaacaucgacgccgcgaagaucuacggcaugugcuucagcuccaucaccaucgacaaguucgccauccccaacgggcggaagguggaccugcagcucggcaaccugggcuaccugcagagcuucaacuaccgcaucgacaccaccgccaccuccugccagcucuacuacaaccugccggccgccaacgugagcgucucccgguucaaccccagcaccuggaacaagcgcuucggguucaucgagaacuccguguucaagccccagcccgcgggcgugcugaccaaccacgacgucguguacgcccagcacugcuucaaggccccgaagaacuucugccccugcaagcucaacagcucccugugcguggggagcggccccgggaagaacaacggcaucgggaccugccccgccgggacgaacuaccugaccugccacaaccucugcaacccggaccccaucaccuucaccggccccuacaagugcccgcagacgaagucccuggucgggaucggcgagcacugcagcgggcuggccgucaagagcgacuacugcggcggcaaccccugcacgugccagccccaggcguuccuggggugguccgccgacagcugccuccagggcgacaagugcaacaucuucgccaaccugauccugcacgacgugaacuccgggcugaccugcagcaccgaccugcagaaggccaacaccgacaucaagcugggcgugugcgugaacuacgaccucuacggcaucuccgggcagggcaucuucguggaggucaacgccaccuacuacaacagcuggcagaaccugcuguacgacuccaacgggaaccucuacggcuuccgggacuacaucaccaaccgcaccuucaugauccggagcugcuacuccgggcgcgugagcgcggccuuccacgccaacuccagcgagcccgcccugcuguuccggaacaucaagugcaacuacguguucaacaacucccucauccgccagcugcagccgaucaacuacuucgacagcuaccugggcugcgucgugaacgcguacaacuccacggccaucagcgugcagaccugcgaccucaccgucggcuccggguacugcguggacuacagcaagaaccggcgcagccgccgggccaucaccacgggcuaccgcuucaccaacuucgagcccuucaccgugaacuccgucaacgacagccuggagcccgucgggggccuguacgagauccagauccccuccgaguucaccaucgggaacauggaggaguucauccagacgagcuccccgaaggugaccaucgacugcgccgccuucgugugcggcgacuacgcggccugcaagagccagcucguggaguacggcuccuucugcgacaacaucaacgccauccugaccgaggugaacgagcugcucgacaccacgcagcugcaggucgccaacagccugaugaacggggugacccucuccaccaagcugaaggacggcgugaacuucaacgucgacgacaucaacuucagcuccgugcuggggugccucggcagcgagugcuccaaggccagcucccggagcgcgaucgaggaccugcuguucgacaaggugaagcucuccgacgucggguucguggccgccuacaacaacugcaccggcggcgccgagauccgcgaccugaucugcgugcagagcuacaaggggaucaagguccugccgccccuccuguccgagaaccagaucagcggcuacacgcuggccgcgaccagcgccucccucuucccgcccuggaccgccgccgcgggggugcccuucuaccugaacgugcaguaccggaucaacggccugggggucaccauggacgugcucagccagaaccagaagcugaucgccaacgccuucaacaacgcccuggacgccauccaggagggcuucgacgcgacgaacuccgcccucgugaagauccaggccgucgugaacgccaacgccgaggcgcugaacaaccugcuccagcagcugagcaaccgcuucggcgccaucuccagcucccugcaggagauccucagccggcuggacgcccuggaggccgaggcccagaucgaccgccucaucaacgggcggcugaccgcgcugaacgccuacgugucccagcagcucagcgacuccacccuggucaaguucagcgccgcccaggcgauggagaaggugaacgagugcgugaagucccagagcucccgcaucaacuucugcggcaacgggaaccacaucaucagccugguccagaacgcccccuacggccucuacuucauccacuucuccuacgugcccaccaaguacgucacggccaaggugagccccggccugugcaucgccggggaccggggcaucgcccccaaguccggguacuucgugaacgucaacaacaccuggauguacaccggcagcggguacuacuaccccgagcccaucaccgagaacaacgugguggucaugagcacgugcgcggugaacuacaccaaggccccguacgugaugcugaacaccuccacccccaaccuccccgacuuccgcgaggagcuggaccagugguucaagaaccagaccagcgucgcccccgaccugucccucgacuacaucaacgugacguuccuggaccuccagguggagaugaaccggcuccaggaggccaucaagguccugaaccagagcuacaucaaccugaaggacaucggcaccuacgaguacuacgugaaguggccgugguacguguggcuccugaucggccuggccggggucgcgaugcucgugcugcuguucuucaucugcugcugcaccggcugcgggaccuccugcuucaagaagugcggcgggugcugcgacgacuacacgggcuaccaggagcucgugaucaagaccagccacgacgacugaggacuagucccuguucccagagcccacuuuuuuuucuuuuuuugaaauaaaauagccugucuuucagaucucaaaggcucuuuucagagccaccaaaaaaaaaaaaaaaaaaaaaaaaaaaaaaaaaaaaaaaaaaaaaaaaaaaaaaaaaaaaaaaaaaaaaaaaaaaaaaaaaaaaaaaaaaaaaaaaaaaaa

SEQ ID NO: 15051 - RNA, 4361 nt, Artificial Sequence
  HCoV/OC43/1783A_10__AIL49484.1 spike protein mRNA gc (1-1362)(A1079P_L1080P)
aggagagucccgcagucggcguccagcggcucugcuuguucgugugugugucguugcaggccuuauucaagcuuaccauguuccugauccuccugaucagccugcccaccgccuucgccgugaucggcgaccucaagugcccgcuggacucccgcaccgggagccugaacaacaucgacacgggcccgcccuccaucagcaccgcgaccgucgacgugaccaacgggcucggcacguacuacgugcuggaccgggucuaccugaacaccacccucuuccugaacggguacuaccccaccuccggcagcacguaccgcaacauggcccugaagggcaccgacaagcucuccacccugugguucaagccgcccuuccugagcgacuucaucaacgggaucuucgccaaggugaagaacaccaagguguucaaggacggcgucauguacuccgaguuccccgccaucacgaucgggagcaccuucgugaacaccuccuacagcguggucgugcagccccggaccaucaacuccacgcaggacggcgugaacaagcuccaggggcugcuggaggucagcgugugccaguacaacaugugcgaguacccccacaccaucugccaccccaagcucggcaaccacuucaaggagcuguggcacauggacaccggcguggucuccugccuguacaagcgcaacuucaccuacgacgugaacgccacguaccucuacuuccacuucuaccaggagggcggcaccuucuacgcguacuucaccgacaccgggguggucacgaaguuccuguucaacguguaccugggcauggcccucagccacuacuacgugaugccccugaccugcaucucccggcgcgacaucggcuucacccuggaguacugggucacgccccucaccagccggcaguaccugcuggccuucaaccaggacgggaucaucuucaacgccguggacugcauguccgacuucaugagcgagaucaagugcaagacccagagcaucgcgccgcccaccggcguguacgagcucaacggguacaccguccagcccaucgccgacguguaccgccggaagcccgaccugccgaacugcaacaucgaggccuggcugaacgacaaguccguccccagcccccucaacugggagcgcaagacguucuccaacugcaacuucaacaugagcucccugaugagcuucauccaggccgacuccuucacgugcaacaacaucgacgccgcgaagaucuacggcaugugcuucagcuccaucaccaucgacaaguucgccauccccaacgggcggaagguggaccugcagcucggcaaccugggcuaccugcagagcuucaacuaccgcaucgacaccaccgccaccuccugccagcucuacuacaaccugccggccgccaacgugagcgucucccgguucaaccccagcaccuggaacaagcgcuucggguucaucgagaacuccguguucaagccccagcccgcgggcgugcugaccaaccacgacgucguguacgcccagcacugcuucaaggccccgaagaacuucugccccugcaagcucaacagcucccugugcguggggagcggccccgggaagaacaacggcaucgggaccugccccgccgggacgaacuaccugaccugccacaaccucugcaacccggaccccaucaccuucaccggccccuacaagugcccgcagacgaagucccuggucgggaucggcgagcacugcagcgggcuggccgucaagagcgacuacugcggcggcaaccccugcacgugccagccccaggcguuccuggggugguccgccgacagcugccuccagggcgacaagugcaacaucuucgccaaccugauccugcacgacgugaacuccgggcugaccugcagcaccgaccugcagaaggccaacaccgacaucaagcugggcgugugcgugaacuacgaccucuacggcaucuccgggcagggcaucuucguggaggucaacgccaccuacuacaacagcuggcagaaccugcuguacgacuccaacgggaaccucuacggcuuccgggacuacaucaccaaccgcaccuucaugauccggagcugcuacuccgggcgcgugagcgcggccuuccacgccaacuccagcgagcccgcccugcuguuccggaacaucaagugcaacuacguguucaacaacucccucauccgccagcugcagccgaucaacuacuucgacagcuaccugggcugcgucgugaacgcguacaacuccacggccaucagcgugcagaccugcgaccucaccgucggcuccggguacugcguggacuacagcaagaaccggcgcagccgccgggccaucaccacgggcuaccgcuucaccaacuucgagcccuucaccgugaacuccgucaacgacagccuggagcccgucgggggccuguacgagauccagauccccuccgaguucaccaucgggaacauggaggaguucauccagacgagcuccccgaaggugaccaucgacugcgccgccuucgugugcggcgacuacgcggccugcaagagccagcucguggaguacggcuccuucugcgacaacaucaacgccauccugaccgaggugaacgagcugcucgacaccacgcagcugcaggucgccaacagccugaugaacggggugacccucuccaccaagcugaaggacggcgugaacuucaacgucgacgacaucaacuucagcuccgugcuggggugccucggcagcgagugcuccaaggccagcucccggagcgcgaucgaggaccugcuguucgacaaggugaagcucuccgacgucggguucguggccgccuacaacaacugcaccggcggcgccgagauccgcgaccugaucugcgugcagagcuacaaggggaucaagguccugccgccccuccuguccgagaaccagaucagcggcuacacgcuggccgcgaccagcgccucccucuucccgcccuggaccgccgccgcgggggugcccuucuaccugaacgugcaguaccggaucaacggccugggggucaccauggacgugcucagccagaaccagaagcugaucgccaacgccuucaacaacgcccuggacgccauccaggagggcuucgacgcgacgaacuccgcccucgugaagauccaggccgucgugaacgccaacgccgaggcgcugaacaaccugcuccagcagcugagcaaccgcuucggcgccaucuccagcucccugcaggagauccucagccggcuggacccgcccgaggccgaggcccagaucgaccgccugaucaacgggcggcucaccgcccugaacgcguacgugucccagcagcugagcgacuccacccucgucaaguucagcgccgcccaggccauggagaaggugaacgagugcgugaagucccagagcucccgcaucaacuucugcggcaacgggaaccacaucaucagccugguccagaacgcgcccuacggccuguacuucauccacuucuccuacgugcccaccaaguacgucacggccaaggugagccccggccucugcaucgccggggaccggggcaucgcccccaaguccggguacuucgugaacgucaacaacaccuggauguacaccggcagcggguacuacuaccccgagcccaucaccgagaacaacgugguggucauguccacgugcgccgugaacuacaccaaggcgcccuacgugaugcugaacaccagcacccccaaccugccggacuuccgcgaggagcucgaccagugguucaagaaccagaccagcgucgcccccgaccugucccuggacuacaucaacgugacguuccucgaccuccagguggagaugaaccggcugcaggaggccaucaagguccucaaccagagcuacaucaaccugaaggacaucggcaccuacgaguacuacgugaaguggcccugguacguguggcugcucaucggccuggccggggucgccaugcuggugcuccuguucuucaucugcugcugcaccggcugcgggaccuccugcuucaagaagugcggcgggugcugcgacgacuacacgggcuaccaggagcuggugaucaagaccagccacgacgacugaggacuagucccuguucccagagcccacuuuuuuuucuuuuuuugaaauaaaauagccugucuuucagaucucaaaggcucuuuucagagccaccaaaaaaaaaaaaaaaaaaaaaaaaaaaaaaaaaaaaaaaaaaaaaaaaaaaaaaaaaaaaaaaaaaaaaaaaaaaaaaaaaaaaaaaaaaaaaaaaaaaaa

SEQ ID NO: 15052 - RNA, 4136 nt, Artificial Sequence
  HCoV/OC43/1783A_10__AIL49484.1 spike protein mRNA gc (variant)
aggagagucccgcagucggcguccagcggcucugcuuguucgugugugugucguugcaggccuuauucaagcuuaccauguuccugauccuccugaucagccugcccaccgccuucgccgugaucggcgaccucaagugcccgcuggacucccgcaccgggagccugaacaacaucgacacgggcccgcccuccaucagcaccgcgaccgucgacgugaccaacgggcucggcacguacuacgugcuggaccgggucuaccugaacaccacccucuuccugaacggguacuaccccaccuccggcagcacguaccgcaacauggcccugaagggcaccgacaagcucuccacccugugguucaagccgcccuuccugagcgacuucaucaacgggaucuucgccaaggugaagaacaccaagguguucaaggacggcgucauguacuccgaguuccccgccaucacgaucgggagcaccuucgugaacaccuccuacagcguggucgugcagccccggaccaucaacuccacgcaggacggcgugaacaagcuccaggggcugcuggaggucagcgugugccaguacaacaugugcgaguacccccacaccaucugccaccccaagcucggcaaccacuucaaggagcuguggcacauggacaccggcguggucuccugccuguacaagcgcaacuucaccuacgacgugaacgccacguaccucuacuuccacuucuaccaggagggcggcaccuucuacgcguacuucaccgacaccgggguggucacgaaguuccuguucaacguguaccugggcauggcccucagccacuacuacgugaugccccugaccugcaucucccggcgcgacaucggcuucacccuggaguacugggucacgccccucaccagccggcaguaccugcuggccuucaaccaggacgggaucaucuucaacgccguggacugcauguccgacuucaugagcgagaucaagugcaagacccagagcaucgcgccgcccaccggcguguacgagcucaacggguacaccguccagcccaucgccgacguguaccgccggaagcccgaccugccgaacugcaacaucgaggccuggcugaacgacaaguccguccccagcccccucaacugggagcgcaagacguucuccaacugcaacuucaacaugagcucccugaugagcuucauccaggccgacuccuucacgugcaacaacaucgacgccgcgaagaucuacggcaugugcuucagcuccaucaccaucgacaaguucgccauccccaacgggcggaagguggaccugcagcucggcaaccugggcuaccugcagagcuucaacuaccgcaucgacaccaccgccaccuccugccagcucuacuacaaccugccggccgccaacgugagcgucucccgguucaaccccagcaccuggaacaagcgcuucggguucaucgagaacuccguguucaagccccagcccgcgggcgugcugaccaaccacgacgucguguacgcccagcacugcuucaaggccccgaagaacuucugccccugcaagcucaacagcucccugugcguggggagcggccccgggaagaacaacggcaucgggaccugccccgccgggacgaacuaccugaccugccacaaccucugcaacccggaccccaucaccuucaccggccccuacaagugcccgcagacgaagucccuggucgggaucggcgagcacugcagcgggcuggccgucaagagcgacuacugcggcggcaaccccugcacgugccagccccaggcguuccuggggugguccgccgacagcugccuccagggcgacaagugcaacaucuucgccaaccugauccugcacgacgugaacuccgggcugaccugcagcaccgaccugcagaaggccaacaccgacaucaagcugggcgugugcgugaacuacgaccucuacggcaucuccgggcagggcaucuucguggaggucaacgccaccuacuacaacagcuggcagaaccugcuguacgacuccaacgggaaccucuacggcuuccgggacuacaucaccaaccgcaccuucaugauccggagcugcuacuccgggcgcgugagcgcggccuuccacgccaacuccagcgagcccgcccugcuguuccggaacaucaagugcaacuacguguucaacaacucccucauccgccagcugcagccgaucaacuacuucgacagcuaccugggcugcgucgugaacgcguacaacuccacggccaucagcgugcagaccugcgaccucaccgucggcuccggguacugcguggacuacagcaagaacggcgggagcggcuccgccaucaccacgggguaccgguucaccaacuucgagcccuucaccgugaacagcgucaacgacucccuggagcccgugggcggccuguacgagauccagauccccagcgaguucaccaucgggaacauggaggaguucauccagacguccagcccgaaggugaccaucgacugcgccgccuucgucugcggcgacuacgcggccugcaagucccagcucguggaguacgggagcuucugcgacaacaucaacgccauccugaccgaggugaacgagcugcucgacaccacgcagcugcaggucgccaacucccugaugaacggcgugacccucagcaccaagcugaaggacggggugaacuucaacgucgacgacaucaacuucuccagcgugcugggcugccucggcuccgagugcagcaaggccuccagccgcuccgcgaucgaggaccugcuguucgacaaggugaagcucagcgacgucggguucguggccgccuacaacaacugcaccggcggggccgagauccgcgaccugaucugcgugcaguccuacaagggcaucaagguccugccgccccuccugagcgagaaccagaucagcggguacacgcuggccgcgaccuccgccagccucuucccgcccuggaccgccgccgcgggcgugcccuucuaccugaacgugcaguaccggaucaacggccugggggucaccauggacgugcucucccagaaccagaagcugaucgccaacgccuucaacaacgcccuggacgccauccaggagggcuucgacgcgacgaacagcgcccucgugaagauccaggccgucgugaacgccaacgccgaggcgcugaacaaccugcuccagcagcuguccaaccgcuucggggccaucagcuccagccugcaggagauccucucccggcuggacccgcccgaggccgaggcccagaucgaccgccugaucaacggccggcucaccgcccugaacgcguacgugagccagcagcuguccgacagcacccucgucaaguucuccgccgcccaggccauggagaaggugaacgagugcgucaagagccaguccagccgcaucaacuucugcggcaacgggaaccacaucaucucccuggugcagaacgcgcccuacggccuguacuucauccacuucagcuacgugcccaccaaguacgucacggccaaggugucccccgggcucugcaucgccggcgaccgggggaucgcccccaagagcggcuacuucgugaacgucaacaacaccuggauguacaccggcagcggguacuacuaccccgagcccaucaccgagaacaacgugguggucaugagcacgugcgccgugaacuacaccaaggcgcccuacgugaugcugaacaccuccacccccaaccugccggacuuccgcgaggagcucgaccagugguucaagaaccagaccuccgucgcccccgaccugagccuggacuacaucaacgugacguuccucgaccuccagguggagaugaaccggcugcaggaggccaucaagguccucaacugaggacuagucccuguucccagagcccacuuuuuuuucuuuuuuugaaauaaaauagccugucuuucagaucucaaaggcucuuuucagagccaccaaaaaaaaaaaaaaaaaaaaaaaaaaaaaaaaaaaaaaaaaaaaaaaaaaaaaaaaaaaaaaaaaaaaaaaaaaaaaaaaaaaaaaaaaaaaaaaaaaaaa

SEQ ID NO: 15053 - RNA, 4217 nt, Artificial Sequence
  HCoV/OC43/1783A_10__AIL49484.1 spike protein mRNA gc (variant)
aggagagucccgcagucggcguccagcggcucugcuuguucgugugugugucguugcaggccuuauucaagcuuaccauguuccugauccuccugaucagccugcccaccgccuucgccgugaucggcgaccucaagugcccgcuggacucccgcaccgggagccugaacaacaucgacacgggcccgcccuccaucagcaccgcgaccgucgacgugaccaacgggcucggcacguacuacgugcuggaccgggucuaccugaacaccacccucuuccugaacggguacuaccccaccuccggcagcacguaccgcaacauggcccugaagggcaccgacaagcucuccacccugugguucaagccgcccuuccugagcgacuucaucaacgggaucuucgccaaggugaagaacaccaagguguucaaggacggcgucauguacuccgaguuccccgccaucacgaucgggagcaccuucgugaacaccuccuacagcguggucgugcagccccggaccaucaacuccacgcaggacggcgugaacaagcuccaggggcugcuggaggucagcgugugccaguacaacaugugcgaguacccccacaccaucugccaccccaagcucggcaaccacuucaaggagcuguggcacauggacaccggcguggucuccugccuguacaagcgcaacuucaccuacgacgugaacgccacguaccucuacuuccacuucuaccaggagggcggcaccuucuacgcguacuucaccgacaccgggguggucacgaaguuccuguucaacguguaccugggcauggcccucagccacuacuacgugaugccccugaccugcaucucccggcgcgacaucggcuucacccuggaguacugggucacgccccucaccagccggcaguaccugcuggccuucaaccaggacgggaucaucuucaacgccguggacugcauguccgacuucaugagcgagaucaagugcaagacccagagcaucgcgccgcccaccggcguguacgagcucaacggguacaccguccagcccaucgccgacguguaccgccggaagcccgaccugccgaacugcaacaucgaggccuggcugaacgacaaguccguccccagcccccucaacugggagcgcaagacguucuccaacugcaacuucaacaugagcucccugaugagcuucauccaggccgacuccuucacgugcaacaacaucgacgccgcgaagaucuacggcaugugcuucagcuccaucaccaucgacaaguucgccauccccaacgggcggaagguggaccugcagcucggcaaccugggcuaccugcagagcuucaacuaccgcaucgacaccaccgccaccuccugccagcucuacuacaaccugccggccgccaacgugagcgucucccgguucaaccccagcaccuggaacaagcgcuucggguucaucgagaacuccguguucaagccccagcccgcgggcgugcugaccaaccacgacgucguguacgcccagcacugcuucaaggccccgaagaacuucugccccugcaagcucaacagcucccugugcguggggagcggccccgggaagaacaacggcaucgggaccugccccgccgggacgaacuaccugaccugccacaaccucugcaacccggaccccaucaccuucaccggccccuacaagugcccgcagacgaagucccuggucgggaucggcgagcacugcagcgggcuggccgucaagagcgacuacugcggcggcaaccccugcacgugccagccccaggcguuccuggggugguccgccgacagcugccuccagggcgacaagugcaacaucuucgccaaccugauccugcacgacgugaacuccgggcugaccugcagcaccgaccugcagaaggccaacaccgacaucaagcugggcgugugcgugaacuacgaccucuacggcaucuccgggcagggcaucuucguggaggucaacgccaccuacuacaacagcuggcagaaccugcuguacgacuccaacgggaaccucuacggcuuccgggacuacaucaccaaccgcaccuucaugauccggagcugcuacuccgggcgcgugagcgcggccuuccacgccaacuccagcgagcccgcccugcuguuccggaacaucaagugcaacuacguguucaacaacucccucauccgccagcugcagccgaucaacuacuucgacagcuaccugggcugcgucgugaacgcguacaacuccacggccaucagcgugcagaccugcgaccucaccgucggcuccggguacugcguggacuacagcaagaacggcgggagcggcuccgccaucaccacgggguaccgguucaccaacuucgagcccuucaccgugaacagcgucaacgacucccuggagcccgugggcggccuguacgagauccagauccccagcgaguucaccaucgggaacauggaggaguucauccagacguccagcccgaaggugaccaucgacugcgccgccuucgucugcggcgacuacgcggccugcaagucccagcucguggaguacgggagcuucugcgacaacaucaacgccauccugaccgaggugaacgagcugcucgacaccacgcagcugcaggucgccaacucccugaugaacggcgugacccucagcaccaagcugaaggacggggugaacuucaacgucgacgacaucaacuucuccagcgugcugggcugccucggcuccgagugcagcaaggccuccagccgcuccgcgaucgaggaccugcuguucgacaaggugaagcucagcgacgucggguucguggccgccuacaacaacugcaccggcggggccgagauccgcgaccugaucugcgugcaguccuacaagggcaucaagguccugccgccccuccugagcgagaaccagaucagcggguacacgcuggccgcgaccuccgccagccucuucccgcccuggaccgccgccgcgggcgugcccuucuaccugaacgugcaguaccggaucaacggccugggggucaccauggacgugcucucccagaaccagaagcugaucgccaacgccuucaacaacgcccuggacgccauccaggagggcuucgacgcgacgaacagcgcccucgugaagauccaggccgucgugaacgccaacgccgaggcgcugaacaaccugcuccagcagcuguccaaccgcuucggggccaucagcuccagccugcaggagauccucucccggcuggacccgcccgaggccgaggcccagaucgaccgccugaucaacggccggcucaccgcccugaacgcguacgugagccagcagcuguccgacagcacccucgucaaguucuccgccgcccaggccauggagaaggugaacgagugcgucaagagccaguccagccgcaucaacuucugcggcaacgggaaccacaucaucucccuggugcagaacgcgcccuacggccuguacuucauccacuucagcuacgugcccaccaaguacgucacggccaaggugucccccgggcucugcaucgccggcgaccgggggaucgcccccaagagcggcuacuucgugaacgucaacaacaccuggauguacaccggcagcggguacuacuaccccgagcccaucaccgagaacaacgugguggucaugagcacgugcgccgugaacuacaccaaggcgcccuacgugaugcugaacaccuccacccccaaccugccggacuuccgcgaggagcucgaccagugguucaagaaccagaccuccgucgcccccgaccugagccuggacuacaucaacgugacguuccucgaccuccagguggagaugaaccggcugcaggaggccaucaagguccucaacggcggguacauccccgaggccccgcgcgacggccaggccuacgugcggaaggacggggagugggugcugcuguccaccuucugaggacuagucccuguucccagagcccacuuuuuuuucuuuuuuugaaauaaaauagccugucuuucagaucucaaaggcucuuuucagagccaccaaaaaaaaaaaaaaaaaaaaaaaaaaaaaaaaaaaaaaaaaaaaaaaaaaaaaaaaaaaaaaaaaaaaaaaaaaaaaaaaaaaaaaaaaaaaaaaaaaaaa

SEQ ID NO: 15054 - RNA, 4328 nt, Artificial Sequence
  HCoV/HKU1/N5__Q0ZME7.1 spike protein mRNA gc (1-1351)
aggagagucccgcagucggcguccagcggcucugcuuguucgugugugugucguugcaggccuuauucaagcuuaccauguuccugaucaucuucauccuccccaccacccuggccgugaucggcgacuucaacugcacgaacagcuucaucaacgacuacaacaagaccaucccgcgcaucuccgaggacgucguggacgugagccuggggcucggcaccuacuacguccugaaccggguguaccugaacaccacgcuccuguucaccggguacuuccccaaguccggcgccaacuuccgcgaccuggcgcucaaggggagcaucuaccuguccacccugugguacaagccgcccuuccucagcgacuucaacaacggcaucuucuccaaggugaagaacaccaagcuguacgucaacaacacgcuguacagcgaguucuccaccaucgugaucggcagcguguucgucaacaccuccuacaccaucguggugcagccccacaacgggauccucgagaucacggccugccaguacaccaugugcgaguacccccacaccgucugcaagagcaagggcuccauccggaacgagagcuggcacaucgacuccagcgagccccugugccuguucaagaagaacuucaccuacaacguguccgccgacuggcucuacuuccacuucuaccaggagcgcgggguguucuacgccuacuacgccgacgucggcaugcccacgaccuuccuguucagccuguaccucgggaccauccugucccacuacuacgugaugccgcugaccugcaacgcgaucagcagcaacacggacaacgagacccucgaguacugggugacgccccugucccggcgccaguaccugcucaacuucgacgagcacggcgucaucaccaacgccguggacugcagcuccagcuuccuguccgagauccagugcaagacccagagcuucgcccccaacaccggcguguacgaccuguccggguucaccgucaagcccguggccaccguguaccggcgcaucccgaaccuccccgacugcgacaucgacaacuggcugaacaacgucagcgugcccagcccccugaacugggagcggcgcaucuucuccaacugcaacuucaaccucuccacgcugcugcggcucguccacguggacagcuucuccugcaacaaccuggacaagagcaagaucuucggcuccugcuucaacagcaucaccguggacaaguucgcgaucccgaaccgccggcgcgacgaccugcagcucggguccagcggcuuccugcaguccagcaacuacaagaucgacaucagcuccagcuccugccagcuguacuacagccucccccuggucaacgugaccaucaacaacuucaaccccuccagcuggaaccggcgcuacggcuucggguccuucaaccugagcuccuacgacguggucuacagcgaccacugcuucuccgugaacagcgacuucugccccugcgccgacccguccguggucaacagcugcgccaaguccaagccgcccagcgccaucugccccgccggcaccaaguaccggcacugcgaccucgacacgacccuguacgugaagaacuggugccgcugcuccugccugcccgaccccaucagcaccuacagccccaacacgugcccccagaagaagguggucguggggaucggcgagcacugcccggggcugggcaucaacgaggagaagugcggcacccagcucaaccacuccagcugcuucugcucccccgacgcguuccugggguggagcuucgacuccugcaucagcaacaaccggugcaacaucuucuccaacuucaucuucaacggcaucaacagcgggacgaccugcuccaacgaccugcucuacagcaacaccgagaucuccaccggcgugugcgucaacuacgaccuguacgggaucaccggccagggcaucuucaaggaggugagcgccgccuacuacaacaacuggcagaaccugcucuacgacuccaacgggaacaucaucggcuucaaggacuuccugaccaacaagaccuacaccauccugcccugcuacagcgggcgcguguccgccgccuucuaccagaacagcuccagcccggcgcuccuguaccggaaccugaagugcuccuacguccucaacaacaucagcuucaucagccagcccuucuacuucgacuccuaccugggcugcgugcugaacgccgugaaccucacgagcuacuccgucagcuccugcgaccugcgcauggggagcggcuucugcaucgacuacgcccugcccuccagccgccggaagcgccggggcaucuccagccccuaccgcuucgugaccuucgagccguucaacguguccuucgucaacgacagcguggagaccgucgggggccucuucgagauccagauccccaccaacuucacgaucgccgggcacgaggaguucauccagaccuccagccccaaggugaccaucgacugcuccgccuucgugugcagcaacuacgcggccugccacgaccugcuguccgaguacggcaccuucugcgacaacaucaacagcauccucaacgaggugaacgaccugcuggacaucacgcagcuccaggucgccaacgcccugaugcagggcgugacccuguccagcaaccucaacaccaaccugcacagcgacguggacaacaucgacuucaagucccugcucgggugccugggcagccagugcggguccagcucccggagccugcucgaggaccugcuguucaacaaggucaagcucuccgacgugggcuucguggaggccuacaacaacugcaccgggggcagcgagauccgcgaccugcugugcguccaguccuucaacggcaucaaggugcugcccccgauccucagcgagacgcagaucuccggguacaccaccgcggccaccguggccgccauguucccgcccuggagcgcggccgccggcguccccuucucccugaacgugcaguaccggaucaacgggcucggcgugacgauggacguccugaacaagaaccagaagcugaucgccaacgccuucaacaaggcgcuccugagcauccagaacggguucaccgccaccaacuccgcccuggccaagauccagagcguggugaacgccaacgcgcaggcccucaacucccugcugcagcagcuguucaacaaguucggcgccaucagcuccagccuccaggagauccugagccgccucgacaaccuggaggcccagguccagaucgaccggcugaucaacggccgccucaccgcccugaacgcguacgugucccagcagcugagcgacaucacgcucaucaaggccggggccucccgggccaucgagaaggugaacgagugcgucaagagccagagcccccgcaucaacuucugcggcaacgggaaccacauccugucccuggugcagaacgcgcccuacggccuccuguucauccacuucuccuacaagcccaccagcuucaagaccgugcuggucucccccgggcucugccugagcggcgaccggggcaucgccccgaagcagggguacuucaucaagcagaacgacuccuggauguucaccggcagcuccuacuacuaccccgagcccaucagcgacaagaacguggucuucaugaacuccugcagcgugaacuucacgaaggcccccuucaucuaccugaacaacuccaucccgaaccucagcgacuucgaggccgagcugucccugugguucaagaaccacaccagcaucgcccccaaccucaccuucaacagccacaucaacgcgaccuuccuggaccuguacuacgagaugaacgugauccaggaguccaucaagagccucaacuccagcuucaucaaccugaaggagaucgggacguacgagauguacgucaaguggcccugguacaucuggcugcucaucgugauccuguucaucaucuuccugaugauccucuucuucaucugcugcugcaccggcugcggguccgccugcuucagcaagugccacaacugcugcgacgaguacggcggccacaacgacuucgugaucaaggccucccacgacgacugaggacuagucccuguucccagagcccacuuuuuuuucuuuuuuugaaauaaaauagccugucuuucagaucucaaaggcucuuuucagagccaccaaaaaaaaaaaaaaaaaaaaaaaaaaaaaaaaaaaaaaaaaaaaaaaaaaaaaaaaaaaaaaaaaaaaaaaaaaaaaaaaaaaaaaaaaaaaaaaaaaaaa

SEQ ID NO: 15055 - RNA, 4328 nt, Artificial Sequence
  HCoV/HKU1/N5__Q0ZME7.1 spike protein mRNA gc (1-1351)(N1067P_L1068P)
aggagagucccgcagucggcguccagcggcucugcuuguucgugugugugucguugcaggccuuauucaagcuuaccauguuccugaucaucuucauccuccccaccacccuggccgugaucggcgacuucaacugcacgaacagcuucaucaacgacuacaacaagaccaucccgcgcaucuccgaggacgucguggacgugagccuggggcucggcaccuacuacguccugaaccggguguaccugaacaccacgcuccuguucaccggguacuuccccaaguccggcgccaacuuccgcgaccuggcgcucaaggggagcaucuaccuguccacccugugguacaagccgcccuuccucagcgacuucaacaacggcaucuucuccaaggugaagaacaccaagcuguacgucaacaacacgcuguacagcgaguucuccaccaucgugaucggcagcguguucgucaacaccuccuacaccaucguggugcagccccacaacgggauccucgagaucacggccugccaguacaccaugugcgaguacccccacaccgucugcaagagcaagggcuccauccggaacgagagcuggcacaucgacuccagcgagccccugugccuguucaagaagaacuucaccuacaacguguccgccgacuggcucuacuuccacuucuaccaggagcgcgggguguucuacgccuacuacgccgacgucggcaugcccacgaccuuccuguucagccuguaccucgggaccauccugucccacuacuacgugaugccgcugaccugcaacgcgaucagcagcaacacggacaacgagacccucgaguacugggugacgccccugucccggcgccaguaccugcucaacuucgacgagcacggcgucaucaccaacgccguggacugcagcuccagcuuccuguccgagauccagugcaagacccagagcuucgcccccaacaccggcguguacgaccuguccggguucaccgucaagcccguggccaccguguaccggcgcaucccgaaccuccccgacugcgacaucgacaacuggcugaacaacgucagcgugcccagcccccugaacugggagcggcgcaucuucuccaacugcaacuucaaccucuccacgcugcugcggcucguccacguggacagcuucuccugcaacaaccuggacaagagcaagaucuucggcuccugcuucaacagcaucaccguggacaaguucgcgaucccgaaccgccggcgcgacgaccugcagcucggguccagcggcuuccugcaguccagcaacuacaagaucgacaucagcuccagcuccugccagcuguacuacagccucccccuggucaacgugaccaucaacaacuucaaccccuccagcuggaaccggcgcuacggcuucggguccuucaaccugagcuccuacgacguggucuacagcgaccacugcuucuccgugaacagcgacuucugccccugcgccgacccguccguggucaacagcugcgccaaguccaagccgcccagcgccaucugccccgccggcaccaaguaccggcacugcgaccucgacacgacccuguacgugaagaacuggugccgcugcuccugccugcccgaccccaucagcaccuacagccccaacacgugcccccagaagaagguggucguggggaucggcgagcacugcccggggcugggcaucaacgaggagaagugcggcacccagcucaaccacuccagcugcuucugcucccccgacgcguuccugggguggagcuucgacuccugcaucagcaacaaccggugcaacaucuucuccaacuucaucuucaacggcaucaacagcgggacgaccugcuccaacgaccugcucuacagcaacaccgagaucuccaccggcgugugcgucaacuacgaccuguacgggaucaccggccagggcaucuucaaggaggugagcgccgccuacuacaacaacuggcagaaccugcucuacgacuccaacgggaacaucaucggcuucaaggacuuccugaccaacaagaccuacaccauccugcccugcuacagcgggcgcguguccgccgccuucuaccagaacagcuccagcccggcgcuccuguaccggaaccugaagugcuccuacguccucaacaacaucagcuucaucagccagcccuucuacuucgacuccuaccugggcugcgugcugaacgccgugaaccucacgagcuacuccgucagcuccugcgaccugcgcauggggagcggcuucugcaucgacuacgcccugcccuccagccgccggaagcgccggggcaucuccagccccuaccgcuucgugaccuucgagccguucaacguguccuucgucaacgacagcguggagaccgucgggggccucuucgagauccagauccccaccaacuucacgaucgccgggcacgaggaguucauccagaccuccagccccaaggugaccaucgacugcuccgccuucgugugcagcaacuacgcggccugccacgaccugcuguccgaguacggcaccuucugcgacaacaucaacagcauccucaacgaggugaacgaccugcuggacaucacgcagcuccaggucgccaacgcccugaugcagggcgugacccuguccagcaaccucaacaccaaccugcacagcgacguggacaacaucgacuucaagucccugcucgggugccugggcagccagugcggguccagcucccggagccugcucgaggaccugcuguucaacaaggucaagcucuccgacgugggcuucguggaggccuacaacaacugcaccgggggcagcgagauccgcgaccugcugugcguccaguccuucaacggcaucaaggugcugcccccgauccugagcgagacgcagaucuccggguacaccaccgcggccaccguggccgccauguucccgcccuggagcgcggccgccggcguccccuucucccugaacgugcaguaccggaucaacgggcucggcgugacgauggacguccugaacaagaaccagaagcugaucgccaacgccuucaacaaggcgcuccugagcauccagaacggguucaccgccaccaacuccgcccuggccaagauccagagcguggugaacgccaacgcgcaggcccucaacucccugcugcagcagcuguucaacaaguucggcgccaucagcuccagccuccaggagauccugagccgccucgacccgcccgaggcccagguccagaucgaccggcugaucaacggccgccugaccgcccucaacgcguacgugucccagcagcugagcgacaucacgcugaucaaggccggggccucccgggccaucgagaaggugaacgagugcgucaagagccagagcccccgcaucaacuucugcggcaacgggaaccacauccucucccuggugcagaacgcgcccuacggccuccucuucauccacuucuccuacaagcccaccagcuucaagaccgugcuggucucccccgggcugugccucagcggcgaccggggcaucgcccccaagcagggguacuucaucaagcagaacgacuccuggauguucaccggcagcuccuacuacuaccccgagccgaucagcgacaagaacguggucuucaugaacuccugcagcgugaacuucacgaaggcccccuucaucuaccugaacaacuccauccccaaccugagcgacuucgaggccgagcucucccugugguucaagaaccacaccagcaucgcccccaaccugaccuucaacagccacaucaacgcgaccuuccucgaccuguacuacgagaugaacgugauccaggaguccaucaagagccugaacuccagcuucaucaaccucaaggagaucgggacguacgagauguacgucaaguggccgugguacaucuggcugcugaucgugauccucuucaucaucuuccugaugauccuguucuucaucugcugcugcaccggcugcggguccgccugcuucagcaagugccacaacugcugcgacgaguacggcggccacaacgacuucgugaucaaggccucccacgacgacugaggacuagucccuguucccagagcccacuuuuuuuucuuuuuuugaaauaaaauagccugucuuucagaucucaaaggcucuuuucagagccaccaaaaaaaaaaaaaaaaaaaaaaaaaaaaaaaaaaaaaaaaaaaaaaaaaaaaaaaaaaaaaaaaaaaaaaaaaaaaaaaaaaaaaaaaaaaaaaaaaaaaa

SEQ ID NO: 15056 - RNA, 4103 nt, Artificial Sequence
  HCoV/HKU1/N5__Q0ZME7.1 spike protein mRNA gc (variant)
aggagagucccgcagucggcguccagcggcucugcuuguucgugugugugucguugcaggccuuauucaagcuuaccauguuccugaucaucuucauccuccccaccacccuggccgugaucggcgacuucaacugcacgaacagcuucaucaacgacuacaacaagaccaucccgcgcaucuccgaggacgucguggacgugagccuggggcucggcaccuacuacguccugaaccggguguaccugaacaccacgcuccuguucaccggguacuuccccaaguccggcgccaacuuccgcgaccuggcgcucaaggggagcaucuaccuguccacccugugguacaagccgcccuuccucagcgacuucaacaacggcaucuucuccaaggugaagaacaccaagcuguacgucaacaacacgcuguacagcgaguucuccaccaucgugaucggcagcguguucgucaacaccuccuacaccaucguggugcagccccacaacgggauccucgagaucacggccugccaguacaccaugugcgaguacccccacaccgucugcaagagcaagggcuccauccggaacgagagcuggcacaucgacuccagcgagccccugugccuguucaagaagaacuucaccuacaacguguccgccgacuggcucuacuuccacuucuaccaggagcgcgggguguucuacgccuacuacgccgacgucggcaugcccacgaccuuccuguucagccuguaccucgggaccauccugucccacuacuacgugaugccgcugaccugcaacgcgaucagcagcaacacggacaacgagacccucgaguacugggugacgccccugucccggcgccaguaccugcucaacuucgacgagcacggcgucaucaccaacgccguggacugcagcuccagcuuccuguccgagauccagugcaagacccagagcuucgcccccaacaccggcguguacgaccuguccggguucaccgucaagcccguggccaccguguaccggcgcaucccgaaccuccccgacugcgacaucgacaacuggcugaacaacgucagcgugcccagcccccugaacugggagcggcgcaucuucuccaacugcaacuucaaccucuccacgcugcugcggcucguccacguggacagcuucuccugcaacaaccuggacaagagcaagaucuucggcuccugcuucaacagcaucaccguggacaaguucgcgaucccgaaccgccggcgcgacgaccugcagcucggguccagcggcuuccugcaguccagcaacuacaagaucgacaucagcuccagcuccugccagcuguacuacagccucccccuggucaacgugaccaucaacaacuucaaccccuccagcuggaaccggcgcuacggcuucggguccuucaaccugagcuccuacgacguggucuacagcgaccacugcuucuccgugaacagcgacuucugccccugcgccgacccguccguggucaacagcugcgccaaguccaagccgcccagcgccaucugccccgccggcaccaaguaccggcacugcgaccucgacacgacccuguacgugaagaacuggugccgcugcuccugccugcccgaccccaucagcaccuacagccccaacacgugcccccagaagaagguggucguggggaucggcgagcacugcccggggcugggcaucaacgaggagaagugcggcacccagcucaaccacuccagcugcuucugcucccccgacgcguuccugggguggagcuucgacuccugcaucagcaacaaccggugcaacaucuucuccaacuucaucuucaacggcaucaacagcgggacgaccugcuccaacgaccugcucuacagcaacaccgagaucuccaccggcgugugcgucaacuacgaccuguacgggaucaccggccagggcaucuucaaggaggugagcgccgccuacuacaacaacuggcagaaccugcucuacgacuccaacgggaacaucaucggcuucaaggacuuccugaccaacaagaccuacaccauccugcccugcuacagcgggcgcguguccgccgccuucuaccagaacagcuccagcccggcgcuccuguaccggaaccugaagugcuccuacguccucaacaacaucagcuucaucagccagcccuucuacuucgacuccuaccugggcugcgugcugaacgccgugaaccucacgagcuacuccgucagcuccugcgaccugcgcauggggagcggcuucugcaucgacuacgcccugcccuccagcggcggguccggcagcgggaucuccagccccuaccgcuucgugaccuucgagccguucaacguguccuucgucaacgacagcguggagaccgugggcggccucuucgagauccagauccccaccaacuucacgaucgccgggcacgaggaguucauccagaccuccagccccaaggucaccaucgacugcuccgccuucgugugcagcaacuacgcggccugccacgaccugcuguccgaguacggcaccuucugcgacaacaucaacagcauccucaacgaggugaacgaccugcuggacaucacgcagcuccaggucgccaacgcccugaugcagggggugacccugagcuccaaccucaacaccaaccugcacagcgacguggacaacaucgacuucaagucccugcucggcugccuggggagccagugcggcuccagcucccggagccugcucgaggaccugcuguucaacaaggucaagcucuccgacgugggcuucguggaggccuacaacaacugcaccgggggcagcgagauccgcgaccugcugugcguccaguccuucaacgggaucaaggugcugcccccgauccugagcgagacgcagaucuccggcuacaccaccgcggccaccguggccgccauguucccgcccuggagcgcggccgccgggguccccuucucccugaacgugcaguaccggaucaacggccucggcgugacgauggacguccugaacaagaaccagaagcugaucgccaacgccuucaacaaggcgcuccugagcauccagaacggguucaccgccaccaacuccgcccuggccaagauccagagcguggugaacgccaacgcgcaggcccucaacucccugcugcagcagcuguucaacaaguucggcgccaucagcagcucccuccaggagauccugagccgccucgacccgcccgaggcccagguccagaucgaccggcugaucaacgggcgccugaccgcccucaacgcguacgugucccagcagcugagcgacaucacgcugaucaaggccggcgccucccgggccaucgagaaggugaacgagugcgucaagagccagagcccccgcaucaacuucugcgggaacggcaaccacauccucucccuggugcagaacgcgcccuacggccuccucuucauccacuucuccuacaagcccaccagcuucaagaccgugcuggucucccccgggcugugccucagcggcgaccgggggaucgcccccaagcagggcuacuucaucaagcagaacgacuccuggauguucaccgggagcuccuacuacuaccccgagccgaucagcgacaagaacguggucuucaugaacuccugcagcgugaacuucacgaaggcccccuucaucuaccugaacaacuccauccccaaccugagcgacuucgaggccgagcucagccugugguucaagaaccacaccuccaucgcccccaaccugaccuucaacagccacaucaacgcgaccuuccucgaccuguacuacgagaugaacgugauccaggaguccaucaagagccugaacugaggacuagucccuguucccagagcccacuuuuuuuucuuuuuuugaaauaaaauagccugucuuucagaucucaaaggcucuuuucagagccaccaaaaaaaaaaaaaaaaaaaaaaaaaaaaaaaaaaaaaaaaaaaaaaaaaaaaaaaaaaaaaaaaaaaaaaaaaaaaaaaaaaaaaaaaaaaaaaaaaaaaa

SEQ ID NO: 15057 - RNA, 4184 nt, Artificial Sequence
  HCoV/HKU1/N5__Q0ZME7.1 spike protein mRNA gc (variant)
aggagagucccgcagucggcguccagcggcucugcuuguucgugugugugucguugcaggccuuauucaagcuuaccauguuccugaucaucuucauccuccccaccacccuggccgugaucggcgacuucaacugcacgaacagcuucaucaacgacuacaacaagaccaucccgcgcaucuccgaggacgucguggacgugagccuggggcucggcaccuacuacguccugaaccggguguaccugaacaccacgcuccuguucaccggguacuuccccaaguccggcgccaacuuccgcgaccuggcccucaaggggagcaucuaccuguccacccugugguacaagccgcccuuccucagcgacuucaacaacggcaucuucuccaaggugaagaacaccaagcuguacgucaacaacacgcuguacagcgaguucuccaccaucgugaucggcagcguguucgucaacaccuccuacaccaucguggugcagccccacaacgggauccucgagaucacggccugccaguacaccaugugcgaguacccccacaccgucugcaagagcaagggcuccauccggaacgagagcuggcacaucgacuccagcgagccccugugccuguucaagaagaacuucaccuacaacguguccgccgacuggcucuacuuccacuucuaccaggagcgcgggguguucuacgccuacuacgccgacgucggcaugcccacgaccuuccuguucagccuguaccucgggaccauccugucccacuacuacgugaugccgcugaccugcaacgcgaucagcagcaacacggacaacgagacccucgaguacugggugacgccccugucccggcgccaguaccugcucaacuucgacgagcacggcgucaucaccaacgccguggacugcagcuccagcuuccuguccgagauccagugcaagacccagagcuucgcccccaacaccggcguguacgaccuguccggguucaccgucaagcccguggccaccguguaccggcgcaucccgaaccuccccgacugcgacaucgacaacuggcugaacaacgucagcgugcccagcccccugaacugggagcggcgcaucuucuccaacugcaacuucaaccucuccacgcugcugcggcucguccacguggacagcuucuccugcaacaaccuggacaagagcaagaucuucggcuccugcuucaacagcaucaccguggacaaguucgcgaucccgaaccgccggcgcgacgaccugcagcucggguccagcggcuuccugcaguccagcaacuacaagaucgacaucagcuccagcuccugccagcuguacuacagccucccccuggucaacgugaccaucaacaacuucaaccccuccagcuggaaccggcgcuacggcuucggguccuucaaccugagcuccuacgacguggucuacagcgaccacugcuucuccgugaacagcgacuucugccccugcgccgacccguccguggucaacagcugcgccaaguccaagccgcccagcgccaucugccccgccggcaccaaguaccggcacugcgaccucgacacgacccuguacgugaagaacuggugccgcugcuccugccugcccgaccccaucagcaccuacagccccaacacgugcccccagaagaagguggucguggggaucggcgagcacugcccggggcugggcaucaacgaggagaagugcggcacccagcucaaccacuccagcugcuucugcucccccgacgcguuccugggguggagcuucgacuccugcaucagcaacaaccggugcaacaucuucuccaacuucaucuucaacggcaucaacagcgggacgaccugcuccaacgaccugcucuacagcaacaccgagaucuccaccggcgugugcgucaacuacgaccuguacgggaucaccggccagggcaucuucaaggaggugagcgccgccuacuacaacaacuggcagaaccugcucuacgacuccaacgggaacaucaucggcuucaaggacuuccugaccaacaagaccuacaccauccugcccugcuacagcgggcgcguguccgccgccuucuaccagaacagcuccagcccggcgcuccuguaccggaaccugaagugcuccuacguccucaacaacaucagcuucaucagccagcccuucuacuucgacuccuaccugggcugcgugcugaacgccgugaaccucacgagcuacuccgucagcuccugcgaccugcgcauggggagcggcuucugcaucgacuacgcccugcccuccagcggcggguccggcagcgggaucuccagccccuaccgcuucgugaccuucgagccguucaacguguccuucgucaacgacagcguggagaccgugggcggccucuucgagauccagauccccaccaacuucacgaucgccgggcacgaggaguucauccagaccuccagccccaaggucaccaucgacugcuccgccuucgugugcagcaacuacgcggccugccacgaccugcuguccgaguacggcaccuucugcgacaacaucaacagcauccucaacgaggugaacgaccugcuggacaucacgcagcuccaggucgccaacgcccugaugcagggggugacccugagcuccaaccucaacaccaaccugcacagcgacguggacaacaucgacuucaagucccugcucggcugccuggggagccagugcggcuccagcucccggagccugcucgaggaccugcuguucaacaaggucaagcucuccgacgugggcuucguggaggccuacaacaacugcaccgggggcagcgagauccgcgaccugcugugcguccaguccuucaacgggaucaaggugcugcccccgauccugagcgagacgcagaucuccggcuacaccaccgcggccaccguggccgccauguucccgcccuggagcgcggccgccgggguccccuucucccugaacgugcaguaccggaucaacggccucggcgugacgauggacguccugaacaagaaccagaagcugaucgccaacgccuucaacaaggcgcuccugagcauccagaacggguucaccgccaccaacuccgcccuggccaagauccagagcguggugaacgccaacgcgcaggcccucaacucccugcugcagcagcuguucaacaaguucggcgccaucagcagcucccuccaggagauccugagccgccucgacccgcccgaggcccagguccagaucgaccggcugaucaacgggcgccugaccgcccucaacgcguacgugucccagcagcugagcgacaucacgcugaucaaggccggcgccucccgggccaucgagaaggugaacgagugcgucaagagccagagcccccgcaucaacuucugcgggaacggcaaccacauccucucccuggugcagaacgcgcccuacggccuccucuucauccacuucuccuacaagcccaccagcuucaagaccgugcuggucucccccgggcugugccucagcggcgaccgggggaucgcccccaagcagggcuacuucaucaagcagaacgacuccuggauguucaccgggagcuccuacuacuaccccgagccgaucagcgacaagaacguggucuucaugaacuccugcagcgugaacuucacgaaggcccccuucaucuaccugaacaacuccauccccaaccugagcgacuucgaggccgagcucagccugugguucaagaaccacaccuccaucgcccccaaccugaccuucaacagccacaucaacgcgaccuuccucgaccuguacuacgagaugaacgugauccaggaguccaucaagagccugaacggcggcuacaucccggaggcgccccgcgacgggcaggccuacguccggaaggacggcgagugggugcuccuguccacguucugaggacuagucccuguucccagagcccacuuuuuuuucuuuuuuugaaauaaaauagccugucuuucagaucucaaaggcucuuuucagagccaccaaaaaaaaaaaaaaaaaaaaaaaaaaaaaaaaaaaaaaaaaaaaaaaaaaaaaaaaaaaaaaaaaaaaaaaaaaaaaaaaaaaaaaaaaaaaaaaaaaaaa

SEQ ID NO: 15058 - RNA, 3788 nt, Artificial Sequence
  HCoV/229E/BN1/GER/2015__AOG74783.1 spike protein mRNA gc (1-1171)
aggagagucccgcagucggcguccagcggcucugcuuguucgugugugugucguugcaggccuuauucaagcuuaccauguucgugcugcucgucgccuacgcccugcugcacaucgcgggcugccagaccaccaacgggacgaacaccagccacuccgugugcaacggcugcguggggcacagcgagaacgucuucgccguggaguccggcggguacauccccagcaacuucgccuucaacaacugguuccuccugaccaacaccuccagcguggucgacggcguggugcgcuccuuccagccgcugcuccugaacugccuguggagcgucuccggcagccaguucacgaccggguucguguacuucaacggcaccgggcggggcgccugcaagggguucuacuccaacgccagcuccgacgugauccgcuacaacaucaacuucgaggagaaccuccggcgcggcaccauccuguucaagacgagcuacggcgcggucguguucuacugcaccaacaacacccugguguccggggacgcccacauccccagcggcaccguccucgggaacuucuacugcuucgugaacacgaccaucggcaacgagaccaccuccgccuucgugggcgcccugcccaagacgguccgggaguucgugaucagccgcaccgggcacuucuacaucaacggcuaccgguacuucucccugggggacguggaggcggucaacuucaacgugaccaacgccgccaccacggugugcaccgucgcccucgccagcuacgcggacgugcuggucaacgugagccagaccgccaucgccaacaucaucuacugcaacuccgugaucaaccgccugcggugcgaccagcucagcuucgacguccccgacggcuucuacuccaccagcccgauccagcccguggagcugcccguguccaucgucagccugcccguguaccacaagcacacguucaucgugcucuacgucaacuucgagcaccgccgggggccgggcaagugcuacaacugccgccccgccgugaucaacaucacccuggccaacuucaacgagaccaagggcccccugugcguggacaccucccacuucacgacccaguucgucgacaacgugaagcucgcgcgguggagcgccuccaucaacaccgggaacugccccuucagcuucggcaaggugaacaacuucgucaaguucggguccgugugcuucagccugaaggacaucccgggcgggugcgccaugcccaucauggccaaccuggugaacuccaagagccacaacaucggcucccucuacgucagcugguccgacggcgacgugaucaccggggugcccaagcccgucgagggcgugagcuccuucaugaacgugacgcugaacaagugcaccaaguacaacaucuacgacgucagcggggugggcgugauccgcaucagcaacgacaccuuccugaacgggaucaccuacacguccaccagcggcaaccuccugggcuucaaggacgucaccaacgggaccaucuacuccaucaccccgugcaacccgcccgaccagcuggugguguaccagcaggccgucgugggcgcgaugcucagcgagaacuucacguccuacggguucagcaacguggucgagaugcccaaguucuucuacgccuccaacggcaccuacaacugcaccgacgccgugcugaccuacagcuccuucggcgugugcgccgacgggagcaucaucgccguccagccccggaacguguccuacgacagcguguccgcgaucgucacggccaaccugagcauccccuucaacuggaccaccuccguccagguggaguaccuccagaucaccagcacgcccaucgugguggacugcuccaccuacgugugcaacggcaacguccgcugcguggagcugcugaagcaguacaccagcgccugcaagaccaucgaggacgcccuccggaacagcgcgaugcuggaguccgccgacgugagcgagaugcugacguucgacaagaaggccuucacccucgccaacgucuccagcuucggggacuacaaccuguccagcgugauccccucccugccgcgcagcggcucccggguggccgggcgcagcgcgaucgaggacauccucuucuccaagcuggucaccagcggccugggcaccguggacgccgacuacaagaagugcacgaaggggcuguccaucgccgaccucgccugcgcccaguacuacaacggcaucaugguccugcccgggguggcggacgccgagcggauggccauguacaccggcagccugaucgggggcaucgcccucggcgggcugaccuccgccgcgagcauccccuucucccuggccauccagagccgccucaacuacguggcccugcagaccgacguccugcaggagaaccagcgcauccucgccgcguccuucaacaaggccaugacgaacaucguggacgccuucaccggcgugaacgacgccaucacccagaccagccaggcccugcagacggucgcgaccgcccugaacaagauccaggacguggugaaccagcaggggaacagccucaaccaccugaccucccagcugcggcagaacuuccaggccaucagcuccagcauccaggccaucuacgaccgccucgacaucauccaggccgaccagcaggucgaccggcugaucaccggccgccuggcggcccucaacguguucgugucccacacgcugaccaaguacaccgagguccgggccagccgccagcuggcccagcagaaggugaacgagugcgugaagucccagagcaagcgguacggguucugcggcaacggcacccacaucuucucccucgucaacgccgcgcccgaggggcugguguuccugcacacggugcuccugccgacccaguacaaggacgucgaggccuggagcggccugugcguggacgggaucaacggcuacgugcuccgccagcccaaccuggcccuguacaaggaggggaacuacuaccggaucaccucccgcaucauguucgagccccggaucccgaccaucgccgacuucguccagaucgagaacugcaacgugacguucgugaacaucagccgcuccgagcuccagaccaucguccccgaguacaucgacgugaacaagacccugcaggagcugagcuacaagcuccccaacuacaccgugcccgaccuggucguggagcaguacaaccagaccauccugaaccucacguccgagaucagcacccuggagaacaaguccgcggagcugaacuacaccgugcagaagcuccagacccugaucgacaacaucaacagcacgcuggucgaccucaaguggcugaaccggguggagaccuacaucaaguggccgugguggguguggcugugcaucuccgucgugcucaucuucguggucagcaugcugcugcucugcugcugcagcaccggcugcugcggcuucuucuccugcuucgccagcuccauccgcgggugcugcgagagcaccaagcugcccuacuacgacguggagaagauccacauccagugaggacuagucccuguucccagagcccacuuuuuuuucuuuuuuugaaauaaaauagccugucuuucagaucucaaaggcucuuuucagagccaccaaaaaaaaaaaaaaaaaaaaaaaaaaaaaaaaaaaaaaaaaaaaaaaaaaaaaaaaaaaaaaaaaaaaaaaaaaaaaaaaaaaaaaaaaaaaaaaaaaaaa

SEQ ID NO: 15059 - RNA, 3788 nt, Artificial Sequence
  HCoV/229E/BN1/GER/2015__AOG74783.1 spike protein mRNA gc (1-1171)(I869P_I870P)
aggagagucccgcagucggcguccagcggcucugcuuguucgugugugugucguugcaggccuuauucaagcuuaccauguucgugcugcucgucgccuacgcccugcugcacaucgcgggcugccagaccaccaacgggacgaacaccagccacuccgugugcaacggcugcguggggcacagcgagaacgucuucgccguggaguccggcggguacauccccagcaacuucgccuucaacaacugguuccuccugaccaacaccuccagcguggucgacggcguggugcgcuccuuccagccgcugcuccugaacugccuguggagcgucuccggcagccaguucacgaccggguucguguacuucaacggcaccgggcggggcgccugcaagggguucuacuccaacgccagcuccgacgugauccgcuacaacaucaacuucgaggagaaccuccggcgcggcaccauccuguucaagacgagcuacggcgcggucguguucuacugcaccaacaacacccugguguccggggacgcccacauccccagcggcaccguccucgggaacuucuacugcuucgugaacacgaccaucggcaacgagaccaccuccgccuucgugggcgcccugcccaagacgguccgggaguucgugaucagccgcaccgggcacuucuacaucaacggcuaccgguacuucucccugggggacguggaggcggucaacuucaacgugaccaacgccgccaccacggugugcaccgucgcccucgccagcuacgcggacgugcuggucaacgugagccagaccgccaucgccaacaucaucuacugcaacuccgugaucaaccgccugcggugcgaccagcucagcuucgacguccccgacggcuucuacuccaccagcccgauccagcccguggagcugcccguguccaucgucagccugcccguguaccacaagcacacguucaucgugcucuacgucaacuucgagcaccgccgggggccgggcaagugcuacaacugccgccccgccgugaucaacaucacccuggccaacuucaacgagaccaagggcccccugugcguggacaccucccacuucacgacccaguucgucgacaacgugaagcucgcgcgguggagcgccuccaucaacaccgggaacugccccuucagcuucggcaaggugaacaacuucgucaaguucggguccgugugcuucagccugaaggacaucccgggcgggugcgccaugcccaucauggccaaccuggugaacuccaagagccacaacaucggcucccucuacgucagcugguccgacggcgacgugaucaccggggugcccaagcccgucgagggcgugagcuccuucaugaacgugacgcugaacaagugcaccaaguacaacaucuacgacgucagcggggugggcgugauccgcaucagcaacgacaccuuccugaacgggaucaccuacacguccaccagcggcaaccuccugggcuucaaggacgucaccaacgggaccaucuacuccaucaccccgugcaacccgcccgaccagcuggugguguaccagcaggccgucgugggcgcgaugcucagcgagaacuucacguccuacggguucagcaacguggucgagaugcccaaguucuucuacgccuccaacggcaccuacaacugcaccgacgccgugcugaccuacagcuccuucggcgugugcgccgacgggagcaucaucgccguccagccccggaacguguccuacgacagcguguccgcgaucgucacggccaaccugagcauccccuucaacuggaccaccuccguccagguggaguaccuccagaucaccagcacgcccaucgugguggacugcuccaccuacgugugcaacggcaacguccgcugcguggagcugcugaagcaguacaccagcgccugcaagaccaucgaggacgcccuccggaacagcgcgaugcuggaguccgccgacgugagcgagaugcugacguucgacaagaaggccuucacccucgccaacgucuccagcuucggggacuacaaccuguccagcgugauccccucccugccgcgcagcggcucccggguggccgggcgcagcgcgaucgaggacauccucuucuccaagcuggucaccagcggccugggcaccguggacgccgacuacaagaagugcacgaaggggcuguccaucgccgaccucgccugcgcccaguacuacaacggcaucaugguccugcccgggguggcggacgccgagcggauggccauguacaccggcagccugaucgggggcaucgcccucggcgggcugaccuccgccgcgagcauccccuucucccuggccauccagagccgccucaacuacguggcccugcagaccgacguccugcaggagaaccagcgcauccucgccgcguccuucaacaaggccaugacgaacaucguggacgccuucaccggcgugaacgacgccaucacccagaccagccaggcccugcagacggucgcgaccgcccugaacaagauccaggacguggugaaccagcaggggaacagccucaaccaccugaccucccagcugcggcagaacuuccaggccaucagcuccagcauccaggccaucuacgaccgccucgacccgccccaggccgaccagcaggucgaccggcugaucaccggccgccuggcggcccucaacguguucgugucccacacgcugaccaaguacaccgagguccgggccagccgccagcuggcccagcagaaggugaacgagugcgugaagucccagagcaagcgguacggguucugcggcaacggcacccacaucuucucccucgucaacgccgcgcccgaggggcugguguuccugcacacggugcuccugcccacccaguacaaggacgucgaggccuggagcggccugugcguggacgggaucaacggcuacgugcuccgccagccgaaccuggcccuguacaaggaggggaacuacuaccggaucaccucccgcaucauguucgagccccggauccccaccaucgccgacuucguccagaucgagaacugcaacgugacguucgugaacaucagccgcuccgagcuccagaccaucguccccgaguacaucgacgugaacaagacccugcaggagcugagcuacaagcucccgaacuacaccgugcccgaccuggucguggagcaguacaaccagaccauccugaaccucacguccgagaucagcacccuggagaacaaguccgcggagcugaacuacaccgugcagaagcuccagacccugaucgacaacaucaacagcacgcuggucgaccucaaguggcugaaccggguggagaccuacaucaaguggcccugguggguguggcugugcaucuccgucgugcucaucuucguggucagcaugcugcugcucugcugcugcagcaccggcugcugcggcuucuucuccugcuucgccagcuccauccgcgggugcugcgagagcaccaagcugcccuacuacgacguggagaagauccacauccagugaggacuagucccuguucccagagcccacuuuuuuuucuuuuuuugaaauaaaauagccugucuuucagaucucaaaggcucuuuucagagccaccaaaaaaaaaaaaaaaaaaaaaaaaaaaaaaaaaaaaaaaaaaaaaaaaaaaaaaaaaaaaaaaaaaaaaaaaaaaaaaaaaaaaaaaaaaaaaaaaaaaaa

SEQ ID NO: 15060 - RNA, 3599 nt, Artificial Sequence
  HCoV/229E/BN1/GER/2015__AOG74783.1 spike protein mRNA gc (variant)
aggagagucccgcagucggcguccagcggcucugcuuguucgugugugugucguugcaggccuuauucaagcuuaccauguucgugcugcucgucgccuacgcccugcugcacaucgcgggcugccagaccaccaacgggacgaacaccagccacuccgugugcaacggcugcguggggcacagcgagaacgucuucgccguggaguccggcggguacauccccagcaacuucgccuucaacaacugguuccuccugaccaacaccuccagcguggucgacggcguggugcgcuccuuccagccgcugcuccugaacugccuguggagcgucuccggcagccaguucacgaccggguucguguacuucaacggcaccgggcggggcgccugcaagggguucuacuccaacgccagcuccgacgugauccgcuacaacaucaacuucgaggagaaccuccggcgcggcaccauccuguucaagacgagcuacggcgcggucguguucuacugcaccaacaacacccugguguccggggacgcccacauccccagcggcaccguccucgggaacuucuacugcuucgugaacacgaccaucggcaacgagaccaccuccgccuucgugggcgcccugcccaagacgguccgggaguucgugaucagccgcaccgggcacuucuacaucaacggcuaccgguacuucucccugggggacguggaggcggucaacuucaacgugaccaacgccgccaccacggugugcaccgucgcccucgccagcuacgcggacgugcuggucaacgugagccagaccgccaucgccaacaucaucuacugcaacuccgugaucaaccgccugcggugcgaccagcucagcuucgacguccccgacggcuucuacuccaccagcccgauccagcccguggagcugcccguguccaucgucagccugcccguguaccacaagcacacguucaucgugcucuacgucaacuucgagcaccgccgggggccgggcaagugcuacaacugccgccccgccgugaucaacaucacccuggccaacuucaacgagaccaagggcccccugugcguggacaccucccacuucacgacccaguucgucgacaacgugaagcucgcgcgguggagcgccuccaucaacaccgggaacugccccuucagcuucggcaaggugaacaacuucgucaaguucggguccgugugcuucagccugaaggacaucccgggcgggugcgccaugcccaucauggccaaccuggugaacuccaagagccacaacaucggcucccucuacgucagcugguccgacggcgacgugaucaccggggugcccaagcccgucgagggcgugagcuccuucaugaacgugacgcugaacaagugcaccaaguacaacaucuacgacgucagcggggugggcgugauccgcaucagcaacgacaccuuccugaacgggaucaccuacacguccaccagcggcaaccuccugggcuucaaggacgucaccaacgggaccaucuacuccaucaccccgugcaacccgcccgaccagcuggugguguaccagcaggccgucgugggcgcgaugcucagcgagaacuucacguccuacggguucagcaacguggucgagaugcccaaguucuucuacgccuccaacggcaccuacaacugcaccgacgccgugcugaccuacagcuccuucggcgugugcgccgacgggagcaucaucgccguccagccccggaacguguccuacgacagcguguccgcgaucgucacggccaaccugagcauccccuucaacuggaccaccuccguccagguggaguaccuccagaucaccagcacgcccaucgugguggacugcuccaccuacgugugcaacggcaacguccgcugcguggagcugcugaagcaguacaccagcgccugcaagaccaucgaggacgcccuccggaacagcgcgaugcuggaguccgccgacgugagcgagaugcugacguucgacaagaaggccuucacccucgccaacgucuccagcuucggggacuacaaccuguccagcgugauccccucccugccgcgcagcggcucccggguggccgggcgcagcgcgaucgaggacauccucuucuccaagcuggucaccagcggccugggcaccguggacgccgacuacaagaagugcacgaaggggcuguccaucgccgaccucgccugcgcccaguacuacaacggcaucaugguccugcccgggguggcggacgccgagcggauggccauguacaccggcagccugaucgggggcaucgcccucggcgggcugaccuccgccgcgagcauccccuucucccuggccauccagagccgccucaacuacguggcccugcagaccgacguccugcaggagaaccagcgcauccucgccgcguccuucaacaaggccaugacgaacaucguggacgccuucaccggcgugaacgacgccaucacccagaccagccaggcccugcagacggucgcgaccgcccugaacaagauccaggacguggugaaccagcaggggaacagccucaaccaccugaccucccagcugcggcagaacuuccaggccaucagcuccagcauccaggccaucuacgaccgccucgacccgccccaggccgaccagcaggucgaccggcugaucaccggccgccuggcggcccucaacguguucgugucccacacgcugaccaaguacaccgagguccgggccagccgccagcuggcccagcagaaggugaacgagugcgugaagucccagagcaagcgguacggguucugcggcaacggcacccacaucuucucccucgucaacgccgcgcccgaggggcugguguuccugcacacggugcuccugcccacccaguacaaggacgucgaggccuggagcggccugugcguggacgggaucaacggcuacgugcuccgccagccgaaccuggcccuguacaaggaggggaacuacuaccggaucaccucccgcaucauguucgagccccggauccccaccaucgccgacuucguccagaucgagaacugcaacgugacguucgugaacaucagccgcuccgagcuccagaccaucguccccgaguacaucgacgugaacaagacccugcaggagcugagcuacaagcucccgaacuacaccgugcccgaccuggucguggagcaguacaaccagaccauccugaaccucacguccgagaucagcacccuggagaacaaguccgcggagcugaacuacaccgugcagaagcuccagacccugaucgacaacaucaacagcacgcuggucgaccucaaguggcugaaccggguggagaccugaggacuagucccuguucccagagcccacuuuuuuuucuuuuuuugaaauaaaauagccugucuuucagaucucaaaggcucuuuucagagccaccaaaaaaaaaaaaaaaaaaaaaaaaaaaaaaaaaaaaaaaaaaaaaaaaaaaaaaaaaaaaaaaaaaaaaaaaaaaaaaaaaaaaaaaaaaaaaaaaaaaaa

SEQ ID NO: 15061 - RNA, 3680 nt, Artificial Sequence
  HCoV/229E/BN1/GER/2015__AOG74783.1 spike protein mRNA gc (variant)
aggagagucccgcagucggcguccagcggcucugcuuguucgugugugugucguugcaggccuuauucaagcuuaccauguucgugcugcucgucgccuacgcccugcugcacaucgccggcugccagaccaccaacgggacgaacaccagccacuccgugugcaacggcugcguggggcacagcgagaacgucuucgccguggaguccggcggguacauccccagcaacuucgccuucaacaacugguuccuccugaccaacaccuccagcguggucgacggcguggugcgcuccuuccagccgcugcuccugaacugccuguggagcgucuccggcagccaguucacgaccggguucguguacuucaacggcaccgggcggggcgccugcaagggguucuacuccaacgccagcuccgacgugauccgcuacaacaucaacuucgaggagaaccuccggcgcggcaccauccuguucaagacgagcuacggcgcggucguguucuacugcaccaacaacacccugguguccggggacgcccacauccccagcggcaccguccucgggaacuucuacugcuucgugaacacgaccaucggcaacgagaccaccuccgccuucgugggcgcccugcccaagacgguccgggaguucgugaucagccgcaccgggcacuucuacaucaacggcuaccgguacuucucccugggggacguggaggcggucaacuucaacgugaccaacgccgccaccacggugugcaccgucgcccucgccagcuacgcggacgugcuggucaacgugagccagaccgccaucgccaacaucaucuacugcaacuccgugaucaaccgccugcggugcgaccagcucagcuucgacguccccgacggcuucuacuccaccagcccgauccagcccguggagcugcccguguccaucgucagccugcccguguaccacaagcacacguucaucgugcucuacgucaacuucgagcaccgccgggggccgggcaagugcuacaacugccgccccgccgugaucaacaucacccuggccaacuucaacgagaccaagggcccccugugcguggacaccucccacuucacgacccaguucgucgacaacgugaagcucgcgcgguggagcgccuccaucaacaccgggaacugccccuucagcuucggcaaggugaacaacuucgucaaguucggguccgugugcuucagccugaaggacaucccgggcgggugcgccaugcccaucauggccaaccuggugaacuccaagagccacaacaucggcucccucuacgucagcugguccgacggcgacgugaucaccggggugcccaagcccgucgagggcgugagcuccuucaugaacgugacgcugaacaagugcaccaaguacaacaucuacgacgucagcggggugggcgugauccgcaucagcaacgacaccuuccugaacgggaucaccuacacguccaccagcggcaaccuccugggcuucaaggacgucaccaacgggaccaucuacuccaucaccccgugcaacccgcccgaccagcuggugguguaccagcaggccgucgugggcgcgaugcucagcgagaacuucacguccuacggguucagcaacguggucgagaugcccaaguucuucuacgccuccaacggcaccuacaacugcaccgacgccgugcugaccuacagcuccuucggcgugugcgccgacgggagcaucaucgccguccagccccggaacguguccuacgacagcguguccgcgaucgucacggccaaccugagcauccccuucaacuggaccaccuccguccagguggaguaccuccagaucaccagcacgcccaucgugguggacugcuccaccuacgugugcaacggcaacguccgcugcguggagcugcugaagcaguacaccagcgccugcaagaccaucgaggacgcccuccggaacagcgcgaugcuggaguccgccgacgugagcgagaugcugacguucgacaagaaggccuucacccucgccaacgucuccagcuucggggacuacaaccuguccagcgugauccccucccugccgcgcagcggcucccggguggccgggcgcagcgcgaucgaggacauccucuucuccaagcuggucaccagcggccugggcaccguggacgccgacuacaagaagugcacgaaggggcuguccaucgccgaccucgccugcgcccaguacuacaacggcaucaugguccugcccgggguggcggacgccgagcggauggccauguacaccggcagccugaucgggggcaucgcccucggcgggcugaccuccgccgcgagcauccccuucucccuggccauccagagccgccucaacuacguggcccugcagaccgacguccugcaggagaaccagcgcauccucgccgcguccuucaacaaggccaugacgaacaucguggacgccuucaccggcgugaacgacgccaucacccagaccagccaggcccugcagacggucgcgaccgcccugaacaagauccaggacguggugaaccagcaggggaacagccucaaccaccugaccucccagcugcggcagaacuuccaggccaucagcuccagcauccaggccaucuacgaccgccucgacccgccccaggccgaccagcaggucgaccggcugaucaccggccgccuggcggcccucaacguguucgugucccacacgcugaccaaguacaccgagguccgggccagccgccagcuggcccagcagaaggugaacgagugcgugaagucccagagcaagcgguacggguucugcggcaacggcacccacaucuucucccucgucaacgccgcgcccgaggggcugguguuccugcacacggugcuccugcccacccaguacaaggacgucgaggccuggagcggccugugcguggacgggaucaacggcuacgugcuccgccagccgaaccuggcccuguacaaggaggggaacuacuaccggaucaccucccgcaucauguucgagccccggauccccaccaucgccgacuucguccagaucgagaacugcaacgugacguucgugaacaucagccgcuccgagcuccagaccaucguccccgaguacaucgacgugaacaagacccugcaggagcugagcuacaagcucccgaacuacaccgugcccgaccuggucguggagcaguacaaccagaccauccugaaccucacguccgagaucagcacccuggagaacaaguccgcggagcugaacuacaccgugcagaagcuccagacccugaucgacaacaucaacagcacgcuggucgaccucaaguggcugaaccggguggagaccggcggcuacauccccgaggcgccccgcgacgggcaggccuacgugcggaaggacggcgaguggguccugcucuccaccuucugaggacuagucccuguucccagagcccacuuuuuuuucuuuuuuugaaauaaaauagccugucuuucagaucucaaaggcucuuuucagagccaccaaaaaaaaaaaaaaaaaaaaaaaaaaaaaaaaaaaaaaaaaaaaaaaaaaaaaaaaaaaaaaaaaaaaaaaaaaaaaaaaaaaaaaaaaaaaaaaaaaaaa

SEQ ID NO: 15062 - RNA, 4343 nt, Artificial Sequence
  HCoV/NL63/RPTEC/2004__AFV53148.1 spike protein mRNA gc (1-1356)
aggagagucccgcagucggcguccagcggcucugcuuguucgugugugugucguugcaggccuuauucaagcuuaccaugaagcuguuccucauccugcuggugcucccccuggccagcugcuucuucacgugcaacuccaacgccaaccugagcaugcuccagcugggcgucccggacaacuccagcaccaucgugaccgggcugcuccccacccacugguucugcgcgaaccaguccaccagcguguacuccgccaacggcuucuucuacaucgacgucgggaaccaccgcagcgccuucgcccugcacaccggcuacuacgacgccaaccaguacuacaucuacgugacgaacgagaucgggcugaacgcguccgugacccucaagaucugcaaguucagccggaacaccaccuucgacuuccuguccaacgccagcuccagcuucgacugcaucgucaaccuccucuucacggagcagcugggcgcgccccugggcaucaccaucuccggggagaccgugcgccuccaccuguacaacgugacccggacguucuacguccccgccgccuacaagcugaccaagcucagcgugaagugcuacuucaacuacuccugcguguucagcgucgugaacgccaccgugaccgucaacgugacgacccacaacggccgcguggucaacuacaccgugugcgacgacugcaacggguacaccgacaacaucuucuccgugcagcaggacggccggaucccgaacggguuccccuucaacaacugguuccugcugacgaacggcagcacccucgucgacggcgugagccgccuguaccagccccugcggcugaccugccuguggcccgugccggggcugaaguccagcaccggcuucgucuacuucaacgccacgggguccgacgugaacugcaacggcuaccagcacaacagcgucguggacgugaugcgcuacaaccucaacuucuccgccaacagccuggacaaccugaaguccggcgucaucguguucaagacccuccaguacgacgugcuguucuacugcagcaacuccagcuccgggguccuggacaccaccauccccuucggccccagcucccagcccuacuacugcuucaucaacagcacgaucaacaccacccacguguccaccuucguggggauccucccgcccacgguccgggagaucgugguggcccgcaccggccaguucuacaucaacggguucaaguacuucgaccugggcuucaucgaggcggucaacuucaacgugaccaccgccagcgccacggacuucuggaccguggccuucgccaccuucgucgacgugcuggugaacgucuccgcgaccaacauccagaaccuccuguacugcgacagccccuucgagaagcugcagugcgagcaccuccaguucggccugcaggacggguucuacuccgccaacuuccuggacgacaacgugcuccccgagaccuacguggcccugccgaucuacuaccagcacacggacaucaacuucaccgccaccgccagcuucggcgggagcugcuacgucugcaagccccaccaggugaacaucucccugaacggcaacaccagcgugugcguccggacgucccacuucagcauccgcuacaucuacaaccgggugaaguccgggagccccggcgacuccagcuggcacaucuaccugaaguccgggaccugccccuucagcuucuccaagcucaacaacuuccagaaguucaagaccaucugcuucagcaccguggaggucccgggguccugcaacuucccccuggaggcgacguggcacuacaccagcuacaccaucgugggcgcccuguacgugaccugguccgaggggaacagcaucacgggcguccccuaccccguguccgggauccgcgaguucagcaaccucgugcugaacaacugcaccaaguacaacaucuacgacuacgucggcaccggcaucauccggagcuccaaccagagccuggccgggggcaucaccuacguguccaacagcgggaaccuccugggcuucaagaacguguccacgggcaacaucuucaucgucaccccgugcaaccagcccgaccagguggccguguaccagcagagcaucaucggggccaugaccgcggucaacgagucccgcuacggccugcagaaccuccugcagcugcccaacuucuacuacgugagcaacgggggcaacaacugcaccacggccgugaugaccuacuccaacuucgggaucugcgccgacggcagccucauccccguccggccgcgcaacuccagcgacaacggcaucuccgccaucaucaccgcgaaccugagcauccccuccaacuggaccacgagcguccagguggaguaccugcagaucaccuccacccccaucgugguggacugcgccaccuacgugugcaacgggaacccgcggugcaagaaccuccugaagcaguacacgagcgccugcaagaccaucgaggacgcccugcgccucuccgcccaccuggagaccaacgacgucagcagcaugcugaccuucgacuccaacgcguucagccucgccaacgugacguccuucggcgacuacaaccugagcuccgugcugccccagcggaacauccgcagcucccgcaucgccgggcggagcgcccucgaggaccugcuguucuccaaggucgugaccagcggccucgggaccgucgacguggacuacaaguccugcaccaagggccugagcaucgccgaccuggcgugcgcccaguacuacaacggcaucauggugcuccccggggucgccgacgccgagcgcauggccauguacacgggcucccugaucgggggcauggugcugggcggccucaccagcgcggccgccauccccuucucccuggcccugcaggcgcggcucaacuacguggcccugcagaccgacguccugcaggagaaccagaagauccucgccgccagcuucaacaaggccaucaacaacaucguggcguccuucagcuccgugaacgacgccaucacccagaccgccgaggccauccacacggucaccaucgcccugaacaagauccaggacguggugaaccagcagggcagcgcgcugaaccaccucaccagccagcugcgccacaacuuccaggccaucuccaacagcauccaggccaucuacgaccggcuggacuccauccaggccgaccagcaggucgaccgccucaucaccgggcggcuggccgcgcugaacgccuucgugagccaggugcucaacaaguacacggagguccgcggcucccggcgccuggcccagcagaagaucaacgagugcgucaagagccaguccaaccgguacggguucugcggcaacgggacccacaucuucagcaucgugaacuccgccccggacggccuccuguuccugcacaccgugcugcuccccaccgacuacaagaacgugaaggcguggagcggcaucugcguggacgggaucuacggcuacguccugcgccagcccaaccuggugcucuacuccgacaacgggguguuccgggucacgagccgcaucauguuccagccccggcugccggugcuguccgacuucgugcagaucuacaacugcaacgucaccuucgugaacaucagccgcguggagcuccacaccgucauccccgacuacguggacgugaacaagacccugcaggaguucgcccagaaccugcccaaguacgucaagcccaacuucgaccucacgccguucaaccugaccuaccugaaccucuccagcgagcugaagcagcuggaggccaagaccgccucccucuuccagaccacgguggagcugcagggccugaucgaccagaucaacagcaccuacguggaccucaagcugcugaaccgguucgagaacuacaucaaguggcccuggugggucuggcucaucaucuccgugguguucgucgugcugcugagccuccugguguucugcugccugagcaccggcugcugcgggugcugcaacugccucaccuccagcaugcgcggcugcugcgacugcggguccacgaagcugcccuacuacgaguucgagaagguccacgugcagugaggacuagucccuguucccagagcccacuuuuuuuucuuuuuuugaaauaaaauagccugucuuucagaucucaaaggcucuuuucagagccaccaaaaaaaaaaaaaaaaaaaaaaaaaaaaaaaaaaaaaaaaaaaaaaaaaaaaaaaaaaaaaaaaaaaaaaaaaaaaaaaaaaaaaaaaaaaaaaaaaaaaa

SEQ ID NO: 15063 - RNA, 4343 nt, Artificial Sequence
  HCoV/NL63/RPTEC/2004__AFV53148.1 spike protein mRNA gc (1-1356)(S1052P_I1053P)
aggagagucccgcagucggcguccagcggcucugcuuguucgugugugugucguugcaggccuuauucaagcuuaccaugaagcuguuccucauccugcuggugcucccccuggccagcugcuucuucacgugcaacuccaacgccaaccugagcaugcuccagcugggcgucccggacaacuccagcaccaucgugaccgggcugcuccccacccacugguucugcgcgaaccaguccaccagcguguacuccgccaacggcuucuucuacaucgacgucgggaaccaccgcagcgccuucgcccugcacaccggcuacuacgacgccaaccaguacuacaucuacgugacgaacgagaucgggcugaacgcguccgugacccucaagaucugcaaguucagccggaacaccaccuucgacuuccuguccaacgccagcuccagcuucgacugcaucgucaaccuccucuucacggagcagcugggcgcgccccugggcaucaccaucuccggggagaccgugcgccuccaccuguacaacgugacccggacguucuacguccccgccgccuacaagcugaccaagcucagcgugaagugcuacuucaacuacuccugcguguucagcgucgugaacgccaccgugaccgucaacgugacgacccacaacggccgcguggucaacuacaccgugugcgacgacugcaacggguacaccgacaacaucuucuccgugcagcaggacggccggaucccgaacggguuccccuucaacaacugguuccugcugacgaacggcagcacccucgucgacggcgugagccgccuguaccagccccugcggcugaccugccuguggcccgugccggggcugaaguccagcaccggcuucgucuacuucaacgccacgggguccgacgugaacugcaacggcuaccagcacaacagcgucguggacgugaugcgcuacaaccucaacuucuccgccaacagccuggacaaccugaaguccggcgucaucguguucaagacccuccaguacgacgugcuguucuacugcagcaacuccagcuccgggguccuggacaccaccauccccuucggccccagcucccagcccuacuacugcuucaucaacagcacgaucaacaccacccacguguccaccuucguggggauccucccgcccacgguccgggagaucgugguggcccgcaccggccaguucuacaucaacggguucaaguacuucgaccugggcuucaucgaggcggucaacuucaacgugaccaccgccagcgccacggacuucuggaccguggccuucgccaccuucgucgacgugcuggugaacgucuccgcgaccaacauccagaaccuccuguacugcgacagccccuucgagaagcugcagugcgagcaccuccaguucggccugcaggacggguucuacuccgccaacuuccuggacgacaacgugcuccccgagaccuacguggcccugccgaucuacuaccagcacacggacaucaacuucaccgccaccgccagcuucggcgggagcugcuacgucugcaagccccaccaggugaacaucucccugaacggcaacaccagcgugugcguccggacgucccacuucagcauccgcuacaucuacaaccgggugaaguccgggagccccggcgacuccagcuggcacaucuaccugaaguccgggaccugccccuucagcuucuccaagcucaacaacuuccagaaguucaagaccaucugcuucagcaccguggaggucccgggguccugcaacuucccccuggaggcgacguggcacuacaccagcuacaccaucgugggcgcccuguacgugaccugguccgaggggaacagcaucacgggcguccccuaccccguguccgggauccgcgaguucagcaaccucgugcugaacaacugcaccaaguacaacaucuacgacuacgucggcaccggcaucauccggagcuccaaccagagccuggccgggggcaucaccuacguguccaacagcgggaaccuccugggcuucaagaacguguccacgggcaacaucuucaucgucaccccgugcaaccagcccgaccagguggccguguaccagcagagcaucaucggggccaugaccgcggucaacgagucccgcuacggccugcagaaccuccugcagcugcccaacuucuacuacgugagcaacgggggcaacaacugcaccacggccgugaugaccuacuccaacuucgggaucugcgccgacggcagccucauccccguccggccgcgcaacuccagcgacaacggcaucuccgccaucaucaccgcgaaccugagcauccccuccaacuggaccacgagcguccagguggaguaccugcagaucaccuccacccccaucgugguggacugcgccaccuacgugugcaacgggaacccgcggugcaagaaccuccugaagcaguacacgagcgccugcaagaccaucgaggacgcccugcgccucuccgcccaccuggagaccaacgacgucagcagcaugcugaccuucgacuccaacgcguucagccucgccaacgugacguccuucggcgacuacaaccugagcuccgugcugccccagcggaacauccgcagcucccgcaucgccgggcggagcgcccucgaggaccugcuguucuccaaggucgugaccagcggccucgggaccgucgacguggacuacaaguccugcaccaagggccugagcaucgccgaccuggcgugcgcccaguacuacaacggcaucauggugcuccccggggucgccgacgccgagcgcauggccauguacacgggcucccugaucgggggcauggugcugggcggccucaccagcgcggccgccauccccuucucccuggcccugcaggcgcggcucaacuacguggcccugcagaccgacguccugcaggagaaccagaagauccucgccgccagcuucaacaaggccaucaacaacaucguggcguccuucagcuccgugaacgacgccaucacccagaccgccgaggccauccacacggucaccaucgcccugaacaagauccaggacguggugaaccagcagggcagcgcgcugaaccaccucaccagccagcugcgccacaacuuccaggccaucuccaacagcauccaggccaucuacgaccggcuggacccgccccaggccgaccagcaggucgaccgccucaucaccgggcggcuggccgcgcugaacgccuucgugucccaggugcucaacaaguacacggagguccgcggcagccggcgccuggcccagcagaagaucaacgagugcgugaagucccagagcaaccgguacggguucugcggcaacgggacccacaucuucuccaucgugaacagcgcccccgacggccuccuguuccugcacaccguccugcuccccaccgacuacaagaacgugaaggcgugguccggcaucugcguggacgggaucuacggcuacguccugcgccagccgaaccuggugcucuacagcgacaacgggguguuccgggucacgucccgcaucauguuccagccccggcugcccgugcugagcgacuucgugcagaucuacaacugcaacgucaccuucgugaacaucucccgcguggagcuccacaccgucauccccgacuacguggacgugaacaagacccugcaggaguucgcccagaaccugccgaaguacgucaagcccaacuucgaccucacgcccuucaaccugaccuaccugaaccucagcuccgagcugaagcagcuggaggccaagaccgccagccucuuccagaccacgguggagcugcagggccugaucgaccagaucaacuccaccuacguggaccucaagcugcugaaccgguucgagaacuacaucaaguggcccuggugggucuggcucaucaucagcgugguguucgucgugcugcugucccuccugguguucugcugccugagcaccggcugcugcgggugcugcaacugccucaccagcuccaugcgcggcugcugcgacugcgggagcacgaagcugccguacuacgaguucgagaagguccacgugcagugaggacuagucccuguucccagagcccacuuuuuuuucuuuuuuugaaauaaaauagccugucuuucagaucucaaaggcucuuuucagagccaccaaaaaaaaaaaaaaaaaaaaaaaaaaaaaaaaaaaaaaaaaaaaaaaaaaaaaaaaaaaaaaaaaaaaaaaaaaaaaaaaaaaaaaaaaaaaaaaaaaaaa

SEQ ID NO: 15064 - RNA, 4148 nt, Artificial Sequence
  HCoV/NL63/RPTEC/2004__AFV53148.1 spike protein mRNA gc (variant)
aggagagucccgcagucggcguccagcggcucugcuuguucgugugugugucguugcaggccuuauucaagcuuaccaugaagcuguuccucauccugcuggugcucccccuggccagcugcuucuucacgugcaacuccaacgccaaccugagcaugcuccagcugggcgucccggacaacuccagcaccaucgugaccgggcugcuccccacccacugguucugcgcgaaccaguccaccagcguguacuccgccaacggcuucuucuacaucgacgucgggaaccaccgcagcgccuucgcccugcacaccggcuacuacgacgccaaccaguacuacaucuacgugacgaacgagaucgggcugaacgcguccgugacccucaagaucugcaaguucagccggaacaccaccuucgacuuccuguccaacgccagcuccagcuucgacugcaucgucaaccuccucuucacggagcagcugggcgcgccccugggcaucaccaucuccggggagaccgugcgccuccaccuguacaacgugacccggacguucuacguccccgccgccuacaagcugaccaagcucagcgugaagugcuacuucaacuacuccugcguguucagcgucgugaacgccaccgugaccgucaacgugacgacccacaacggccgcguggucaacuacaccgugugcgacgacugcaacggguacaccgacaacaucuucuccgugcagcaggacggccggaucccgaacggguuccccuucaacaacugguuccugcugacgaacggcagcacccucgucgacggcgugagccgccuguaccagccccugcggcugaccugccuguggcccgugccggggcugaaguccagcaccggcuucgucuacuucaacgccacgggguccgacgugaacugcaacggcuaccagcacaacagcgucguggacgugaugcgcuacaaccucaacuucuccgccaacagccuggacaaccugaaguccggcgucaucguguucaagacccuccaguacgacgugcuguucuacugcagcaacuccagcuccgggguccuggacaccaccauccccuucggccccagcucccagcccuacuacugcuucaucaacagcacgaucaacaccacccacguguccaccuucguggggauccucccgcccacgguccgggagaucgugguggcccgcaccggccaguucuacaucaacggguucaaguacuucgaccugggcuucaucgaggcggucaacuucaacgugaccaccgccagcgccacggacuucuggaccguggccuucgccaccuucgucgacgugcuggugaacgucuccgcgaccaacauccagaaccuccuguacugcgacagccccuucgagaagcugcagugcgagcaccuccaguucggccugcaggacggguucuacuccgccaacuuccuggacgacaacgugcuccccgagaccuacguggcccugccgaucuacuaccagcacacggacaucaacuucaccgccaccgccagcuucggcgggagcugcuacgucugcaagccccaccaggugaacaucucccugaacggcaacaccagcgugugcguccggacgucccacuucagcauccgcuacaucuacaaccgggugaaguccgggagccccggcgacuccagcuggcacaucuaccugaaguccgggaccugccccuucagcuucuccaagcucaacaacuuccagaaguucaagaccaucugcuucagcaccguggaggucccgggguccugcaacuucccccuggaggcgacguggcacuacaccagcuacaccaucgugggcgcccuguacgugaccugguccgaggggaacagcaucacgggcguccccuaccccguguccgggauccgcgaguucagcaaccucgugcugaacaacugcaccaaguacaacaucuacgacuacgucggcaccggcaucauccggagcuccaaccagagccuggccgggggcaucaccuacguguccaacagcgggaaccuccugggcuucaagaacguguccacgggcaacaucuucaucgucaccccgugcaaccagcccgaccagguggccguguaccagcagagcaucaucggggccaugaccgcggucaacgagucccgcuacggccugcagaaccuccugcagcugcccaacuucuacuacgugagcaacgggggcaacaacugcaccacggccgugaugaccuacuccaacuucgggaucugcgccgacggcagccucauccccguccggccgcgcaacuccagcgacaacggcaucuccgccaucaucaccgcgaaccugagcauccccuccaacuggaccacgagcguccagguggaguaccugcagaucaccuccacccccaucgugguggacugcgccaccuacgugugcaacgggaacccgcggugcaagaaccuccugaagcaguacacgagcgccugcaagaccaucgaggacgcccugcgccucuccgcccaccuggagaccaacgacgucagcagcaugcugaccuucgacuccaacgcguucagccucgccaacgugacguccuucggcgacuacaaccugagcuccgugcugccccagcggaacauccgcagcucccgcaucgccgggcggagcgcccucgaggaccugcuguucuccaaggucgugaccagcggccucgggaccgucgacguggacuacaaguccugcaccaagggccugagcaucgccgaccuggcgugcgcccaguacuacaacggcaucauggugcuccccggggucgccgacgccgagcgcauggccauguacacgggcucccugaucgggggcauggugcugggcggccucaccagcgcggccgccauccccuucucccuggcccugcaggcgcggcucaacuacguggcccugcagaccgacguccugcaggagaaccagaagauccucgccgccagcuucaacaaggccaucaacaacaucguggcguccuucagcuccgugaacgacgccaucacccagaccgccgaggccauccacacggucaccaucgcccugaacaagauccaggacguggugaaccagcagggcagcgcgcugaaccaccucaccagccagcugcgccacaacuuccaggccaucuccaacagcauccaggccaucuacgaccggcuggacccgccccaggccgaccagcaggucgaccgccucaucaccgggcggcuggccgcgcugaacgccuucgugucccaggugcucaacaaguacacggagguccgcggcagccggcgccuggcccagcagaagaucaacgagugcgugaagucccagagcaaccgguacggguucugcggcaacgggacccacaucuucuccaucgugaacagcgcccccgacggccuccuguuccugcacaccguccugcuccccaccgacuacaagaacgugaaggcgugguccggcaucugcguggacgggaucuacggcuacguccugcgccagccgaaccuggugcucuacagcgacaacgggguguuccgggucacgucccgcaucauguuccagccccggcugcccgugcugagcgacuucgugcagaucuacaacugcaacgucaccuucgugaacaucucccgcguggagcuccacaccgucauccccgacuacguggacgugaacaagacccugcaggaguucgcccagaaccugccgaaguacgucaagcccaacuucgaccucacgcccuucaaccugaccuaccugaaccucagcuccgagcugaagcagcuggaggccaagaccgccagccucuuccagaccacgguggagcugcagggccugaucgaccagaucaacuccaccuacguggaccucaagcugcugaaccgguucgagaacugaggacuagucccuguucccagagcccacuuuuuuuucuuuuuuugaaauaaaauagccugucuuucagaucucaaaggcucuuuucagagccaccaaaaaaaaaaaaaaaaaaaaaaaaaaaaaaaaaaaaaaaaaaaaaaaaaaaaaaaaaaaaaaaaaaaaaaaaaaaaaaaaaaaaaaaaaaaaaaaaaaaaa

SEQ ID NO: 15065 - RNA, 4229 nt, Artificial Sequence
  HCoV/NL63/RPTEC/2004__AFV53148.1 spike protein mRNA gc (variant)
aggagagucccgcagucggcguccagcggcucugcuuguucgugugugugucguugcaggccuuauucaagcuuaccaugaagcuguuccucauccugcuggugcucccccuggccagcugcuucuucacgugcaacuccaacgccaaccugagcaugcuccagcugggcgucccggacaacuccagcaccaucgugaccgggcugcuccccacccacugguucugcgcgaaccaguccaccagcguguacuccgccaacggcuucuucuacaucgacgucgggaaccaccgcagcgccuucgcccugcacaccggcuacuacgacgccaaccaguacuacaucuacgugacgaacgagaucgggcugaacgcguccgugacccucaagaucugcaaguucagccggaacaccaccuucgacuuccuguccaacgccagcuccagcuucgacugcaucgucaaccuccucuucacggagcagcugggcgcgccccugggcaucaccaucuccggggagaccgugcgccuccaccuguacaacgugacccggacguucuacguccccgccgccuacaagcugaccaagcucagcgugaagugcuacuucaacuacuccugcguguucagcgucgugaacgccaccgugaccgucaacgugacgacccacaacggccgcguggucaacuacaccgugugcgacgacugcaacggguacaccgacaacaucuucuccgugcagcaggacggccggaucccgaacggguuccccuucaacaacugguuccugcugacgaacggcagcacccucgucgacggcgugagccgccuguaccagccccugcggcugaccugccuguggcccgugccggggcugaaguccagcaccggcuucgucuacuucaacgccacgggguccgacgugaacugcaacggcuaccagcacaacagcgucguggacgugaugcgcuacaaccucaacuucuccgccaacagccuggacaaccugaaguccggcgucaucguguucaagacccuccaguacgacgugcuguucuacugcagcaacuccagcuccgggguccuggacaccaccauccccuucggccccagcucccagcccuacuacugcuucaucaacagcacgaucaacaccacccacguguccaccuucguggggauccucccgcccacgguccgggagaucgugguggcccgcaccggccaguucuacaucaacggguucaaguacuucgaccugggcuucaucgaggcggucaacuucaacgugaccaccgccagcgccacggacuucuggaccguggccuucgccaccuucgucgacgugcuggugaacgucuccgcgaccaacauccagaaccuccuguacugcgacagccccuucgagaagcugcagugcgagcaccuccaguucggccugcaggacggguucuacuccgccaacuuccuggacgacaacgugcuccccgagaccuacguggcccugccgaucuacuaccagcacacggacaucaacuucaccgccaccgccagcuucggcgggagcugcuacgucugcaagccccaccaggugaacaucucccugaacggcaacaccagcgugugcguccggacgucccacuucagcauccgcuacaucuacaaccgggugaaguccgggagccccggcgacuccagcuggcacaucuaccugaaguccgggaccugccccuucagcuucuccaagcucaacaacuuccagaaguucaagaccaucugcuucagcaccguggaggucccgggguccugcaacuucccccuggaggcgacguggcacuacaccagcuacaccaucgugggcgcccuguacgugaccugguccgaggggaacagcaucacgggcguccccuaccccguguccgggauccgcgaguucagcaaccucgugcugaacaacugcaccaaguacaacaucuacgacuacgucggcaccggcaucauccggagcuccaaccagagccuggccgggggcaucaccuacguguccaacagcgggaaccuccugggcuucaagaacguguccacgggcaacaucuucaucgucaccccgugcaaccagcccgaccagguggccguguaccagcagagcaucaucggggccaugaccgcggucaacgagucccgcuacggccugcagaaccuccugcagcugcccaacuucuacuacgugagcaacgggggcaacaacugcaccacggccgugaugaccuacuccaacuucgggaucugcgccgacggcagccucauccccguccggccgcgcaacuccagcgacaacggcaucuccgccaucaucaccgcgaaccugagcauccccuccaacuggaccacgagcguccagguggaguaccugcagaucaccuccacccccaucgugguggacugcgccaccuacgugugcaacgggaacccgcggugcaagaaccuccugaagcaguacacgagcgccugcaagaccaucgaggacgcccugcgccucuccgcccaccuggagaccaacgacgucagcagcaugcugaccuucgacuccaacgcguucagccucgccaacgugacguccuucggcgacuacaaccugagcuccgugcugccccagcggaacauccgcagcucccgcaucgccgggcggagcgcccucgaggaccugcuguucuccaaggucgugaccagcggccucgggaccgucgacguggacuacaaguccugcaccaagggccugagcaucgccgaccuggcgugcgcccaguacuacaacggcaucauggugcuccccggggucgccgacgccgagcgcauggccauguacacgggcucccugaucgggggcauggugcugggcggccucaccagcgcggccgccauccccuucucccuggcccugcaggcgcggcucaacuacguggcccugcagaccgacguccugcaggagaaccagaagauccucgccgccagcuucaacaaggccaucaacaacaucguggcguccuucagcuccgugaacgacgccaucacccagaccgccgaggccauccacacggucaccaucgcccugaacaagauccaggacguggugaaccagcagggcagcgcgcugaaccaccucaccagccagcugcgccacaacuuccaggccaucuccaacagcauccaggccaucuacgaccggcuggacccgccccaggccgaccagcaggucgaccgccucaucaccgggcggcuggccgcgcugaacgccuucgugucccaggugcucaacaaguacacggagguccgcggcagccggcgccuggcccagcagaagaucaacgagugcgugaagucccagagcaaccgguacggguucugcggcaacgggacccacaucuucuccaucgugaacagcgcccccgacggccuccuguuccugcacaccguccugcuccccaccgacuacaagaacgugaaggcgugguccggcaucugcguggacgggaucuacggcuacguccugcgccagccgaaccuggugcucuacagcgacaacgggguguuccgggucacgucccgcaucauguuccagccccggcugcccgugcugagcgacuucgugcagaucuacaacugcaacgucaccuucgugaacaucucccgcguggagcuccacaccgucauccccgacuacguggacgugaacaagacccugcaggaguucgcccagaaccugccgaaguacgucaagcccaacuucgaccucacgcccuucaaccugaccuaccugaaccucagcuccgagcugaagcagcuggaggccaagaccgccagccucuuccagaccacgguggagcugcagggccugaucgaccagaucaacuccaccuacguggaccucaagcugcugaaccgguucgagaacggcggguacauccccgaggccccgcgcgacggccaggcguacguccggaaggacggggagugggugcuccugagcaccuucugaggacuagucccuguucccagagcccacuuuuuuuucuuuuuuugaaauaaaauagccugucuuucagaucucaaaggcucuuuucagagccaccaaaaaaaaaaaaaaaaaaaaaaaaaaaaaaaaaaaaaaaaaaaaaaaaaaaaaaaaaaaaaaaaaaaaaaaaaaaaaaaaaaaaaaaaaaaaaaaaaaaaa

SEQ ID NO: 15066 - RNA, 4043 nt, Artificial Sequence
  Bat SARS-like CoV/WIV1__AGZ48828.1 spike protein mRNA gc (1-1256)
aggagagucccgcagucggcguccagcggcucugcuuguucgugugugugucguugcaggccuuauucaagcuuaccaugaagcugcucgugcuggucuucgccacccuggugagcuccuacaccaucgagaagugccucgacuucgacgaccgcacgcccccggccaacacccaguuccugagcucccaccggggcguguacuaccccgacgacaucuuccgcagcaacguccugcaccucgugcaggaccacuuccugcccuucgacuccaacgugacccgguucaucaccuucgggcugaacuucgacaaccccaucaucccguucaaggacggcaucuacuucgcggccacggagaaguccaacgucauccgcggguggguguucggcagcaccaugaacaacaagagccaguccgugaucaucaugaacaacagcaccaaccucgucauccgggccugcaacuucgagcugugcgacaaccccuucuucguggugcugaaguccaacaacacccagauccccagcuacaucuucaacaacgccuucaacugcacguucgaguacgucuccaaggacuucaaccucgaccugggggagaagcccggcaacuucaaggaccugcgcgaguucguguuccggaacaaggacggcuuccuccacguguacagcggguaccagccgaucuccgccgcgagcggccugcccaccggguucaacgcccugaagcccaucuucaagcucccccugggcaucaacaucaccaacuuccgcacccugcucacggccuucccgccccggcccgacuacugggggaccuccgccgcggccuacuucgucggcuaccugaagcccaccaccuucaugcugaaguacgacgagaacggcacgaucaccgacgccguggacugcagccagaacccgcucgccgagcugaagugcuccgucaagagcuucgagaucgacaaggggaucuaccagaccagcaacuuccgcguggcccccuccaaggagguggugcgguuccccaacaucaccaaccugugccccuucggcgaggucuucaacgcgacgaccuucccgagcguguacgccugggagcgcaagcggaucuccaacugcguggccgacuacagcguccucuacaacuccaccagcuucuccaccuucaagugcuacggggugagcgccacgaagcugaacgaccugugcuucuccaacgucuacgccgacagcuucguggugaagggcgacgacguccgccagaucgcgcccggccagaccggggugaucgccgacuacaacuacaagcuccccgacgacuucaccggcugcgugcuggccuggaacacccggaacaucgacgccacgcagaccgggaacuacaacuacaaguaccgcucccugcggcacggcaagcuccgccccuucgagcgggacaucagcaacgucccguucucccccgacgggaagcccugcacgcccccggccuucaacugcuacuggccccugaacgacuacggcuucuacaucaccaacggcaucggguaccagcccuaccgcguggugguccugagcuucgagcuccugaacgcgccggccaccgugugcggccccaagcuguccaccgaccucaucaagaaccagugcgugaacuucaacuucaacgggcugaccggcaccgggguccugacgcccagcuccaagcgguuccagcccuuccagcaguucggccgcgacgugagcgacuucaccgacuccgugcgcgacccgaagaccagcgagauccucgacaucagccccugcuccuucggcggggucagcgugaucacccccggcaccaacacguccagcgagguggccguccuguaccaggacgugaacugcaccgacgugcccgucgccauccacgccgaccagcugaccccguccuggcgggugcacagcaccgggaacaacguguuccagacgcaggcgggcugccucaucggggccgagcacgucgacaccuccuacgagugcgacauccccaucggcgccggcaucugcgccagcuaccacaccguguccagccugcgcuccaccagccagaaguccaucguggcguacacgaugagccugggggccgacuccagcaucgccuacuccaacaacaccaucgccauccccaccaacuucagcaucagcaucaccacggaggucaugcccguguccauggccaagaccagcguggacugcaacauguacaucugcggcgacuccaccgagugcgcgaaccugcuccugcaguacgggagcuucugcacccagcugaaccgggcccucuccggcaucgccgucgagcaggaccgcaacacgcgggagguguucgcccaggugaagcagauguacaagaccccgacccugaaggacuucggcggguucaacuucagccagauccugcccgacccccucaagcccaccaagcgcuccuucaucgaggaccugcuguucaacaaggucacgcucgccgacgcgggcuucaugaagcaguacggggagugccugggcgacaucaacgcccgggaccugaucugcgcccagaaguucaacgggcucaccgugcugccgccccugcucaccgacgacaugaucgccgccuacaccgcggcccuggugagcggcacggccaccgccggcuggaccuucggggcgggcgccgcccugcagauccccuucgccaugcagauggccuaccgcuucaacgggaucggcgucacccagaacgugcucuacgagaaccagaagcagaucgcgaaccaguucaacaaggccaucucccagauccaggagagccugacgaccaccuccaccgcccuggggaagcuccaggacguggucaaccagaacgcccaggcccugaacacgcuggugaagcagcucagcuccaacuucggcgcgaucagcuccgugcugaacgacauccugagccggcucgacaaggucgaggccgaggugcagaucgaccgccugaucaccggccggcugcagucccuccagaccuacgugacccagcagcugauccgcgccgccgagauccgggccagcgcgaaccuggccgccacgaagauguccgagugcguccucgggcagagcaagcgcguggacuucugcggcaagggguaccaccugaugagcuucccccaggccgcgccgcacggcguggucuuccugcacgugaccuacgugcccucccaggagcggaacuucaccaccgcccccgccaucugccacgaggggaaggccuacuucccccgcgagggcgucuucguguucaacggcaccagcugguucaucacgcagcggaacuucuucuccccgcagaucaucaccaccgacaacaccuucgucagcggguccugcgacguggugaucggcaucaucaacaacacggucuacgacccccuccagcccgagcuggacagcuucaaggaggagcuggacaaguacuucaagaaccacaccuccccggacguggaccucggggacaucagcggcaucaacgccuccguggucaacauccagaaggagaucgaccgccugaacgagguggcgaagaaccugaacgagagccucaucgaccugcaggagcuggggaaguacgagcaguacaucaaguggcccugguacguguggcucggcuucaucgccggccugaucgccaucgucauggugaccauccugcucugcugcaugaccuccugcugcagcugccugaagggggccugcuccugcggcagcugcugcaaguucgacgaggacgacuccgagcccgugcugaagggggucaagcuccacuacacgugaggacuagucccuguucccagagcccacuuuuuuuucuuuuuuugaaauaaaauagccugucuuucagaucucaaaggcucuuuucagagccaccaaaaaaaaaaaaaaaaaaaaaaaaaaaaaaaaaaaaaaaaaaaaaaaaaaaaaaaaaaaaaaaaaaaaaaaaaaaaaaaaaaaaaaaaaaaaaaaaaaaaa

SEQ ID NO: 15067 - RNA, 4043 nt, Artificial Sequence
  Bat SARS-like CoV/WIV1__AGZ48828.1 spike protein mRNA gc (1-1256)(K969P_V970P)
aggagagucccgcagucggcguccagcggcucugcuuguucgugugugugucguugcaggccuuauucaagcuuaccaugaagcugcucgugcuggucuucgccacccuggugagcuccuacaccaucgagaagugccucgacuucgacgaccgcacgcccccggccaacacccaguuccugagcucccaccggggcguguacuaccccgacgacaucuuccgcagcaacguccugcaccucgugcaggaccacuuccugcccuucgacuccaacgugacccgguucaucaccuucgggcugaacuucgacaaccccaucaucccguucaaggacggcaucuacuucgcggccacggagaaguccaacgucauccgcggguggguguucggcuccaccaugaacaacaagagccaguccgugaucaucaugaacaacagcaccaaccucgucauccgggccugcaacuucgagcugugcgacaaccccuucuucguggugcugaaguccaacaacacccagauccccagcuacaucuucaacaacgccuucaacugcacguucgaguacgucuccaaggacuucaaccucgaccugggggagaagcccggcaacuucaaggaccugcgcgaguucguguuccggaacaaggacggcuuccuccacguguacagcggguaccagccgaucuccgccgcgagcggccugcccaccggguucaacgcccugaagcccaucuucaagcucccccugggcaucaacaucaccaacuuccgcacccugcucacggccuucccgccccggcccgacuacugggggaccuccgccgcggccuacuucgucggcuaccugaagcccaccaccuucaugcugaaguacgacgagaacggcacgaucaccgacgccguggacugcagccagaacccgcucgccgagcugaagugcuccgucaagagcuucgagaucgacaaggggaucuaccagaccagcaacuuccgcguggcccccuccaaggagguggugcgguuccccaacaucaccaaccugugccccuucggcgaggucuucaacgcgacgaccuucccgagcguguacgccugggagcgcaagcggaucuccaacugcguggccgacuacagcguccucuacaacuccaccagcuucuccaccuucaagugcuacggggugagcgccacgaagcugaacgaccugugcuucuccaacgucuacgccgacagcuucguggugaagggcgacgacguccgccagaucgcgcccggccagaccggggugaucgccgacuacaacuacaagcuccccgacgacuucaccggcugcgugcuggccuggaacacccggaacaucgacgccacgcagaccgggaacuacaacuacaaguaccgcucccugcggcacggcaagcuccgccccuucgagcgggacaucagcaacgucccguucucccccgacgggaagcccugcacgcccccggccuucaacugcuacuggccccugaacgacuacggcuucuacaucaccaacggcaucggguaccagcccuaccgcguggugguccugagcuucgagcuccugaacgcgccggccaccgugugcggccccaagcuguccaccgaccucaucaagaaccagugcgugaacuucaacuucaacgggcugaccggcaccgggguccugacgcccagcuccaagcgguuccagcccuuccagcaguucggccgcgacgugagcgacuucaccgacuccgugcgcgacccgaagaccagcgagauccucgacaucagccccugcuccuucggcggggucagcgugaucacccccggcaccaacacguccagcgagguggccguccuguaccaggacgugaacugcaccgacgugcccgucgccauccacgccgaccagcugaccccguccuggcgggugcacagcaccgggaacaacguguuccagacgcaggcgggcugccucaucggggccgagcacgucgacaccuccuacgagugcgacauccccaucggcgccggcaucugcgccagcuaccacaccguguccagccugcgcuccaccagccagaaguccaucguggcguacacgaugagccugggggccgacuccagcaucgccuacuccaacaacaccaucgccauccccaccaacuucagcaucagcaucaccacggaggucaugcccguguccauggccaagaccagcguggacugcaacauguacaucugcggcgacuccaccgagugcgcgaaccugcuccugcaguacgggagcuucugcacccagcugaaccgggcccucuccggcaucgccgucgagcaggaccgcaacacgcgggagguguucgcccaggugaagcagauguacaagaccccgacccugaaggacuucggcggguucaacuucagccagauccugcccgacccccucaagcccaccaagcgcuccuucaucgaggaccugcuguucaacaaggucacgcucgccgacgcgggcuucaugaagcaguacggggagugccugggcgacaucaacgcccgggaccugaucugcgcccagaaguucaacgggcucaccgugcugccgccccugcucaccgacgacaugaucgccgccuacaccgcggcccuggugagcggcacggccaccgccggcuggaccuucggggcgggcgccgcccugcagauccccuucgccaugcagauggccuaccgcuucaacgggaucggcgucacccagaacgugcucuacgagaaccagaagcagaucgcgaaccaguucaacaaggccaucucccagauccaggagagccugacgaccaccuccaccgcccuggggaagcuccaggacguggucaaccagaacgcccaggcccugaacacgcuggugaagcagcucagcuccaacuucggcgcgaucagcuccgugcugaacgacauccugagccggcucgacccgcccgaggccgagguccagaucgaccgccugaucaccggccggcugcagucccuccagaccuacgugacccagcagcugauccgcgccgccgagauccgggccagcgcgaaccuggccgccacgaagauguccgagugcgugcucgggcagagcaagcgcgucgacuucugcggcaagggguaccaccugaugagcuucccccaggccgcgccccacggcgugguguuccugcacgucaccuacgugcccucccaggagcggaacuucaccaccgccccggccaucugccacgaggggaaggccuacuucccccgcgagggcguguucgucuucaacggcaccagcugguucaucacgcagcggaacuucuucagcccccagaucaucaccaccgacaacaccuucgugagcggguccugcgacgucgugaucggcaucaucaacaacacgguguacgacccgcuccagcccgagcuggacagcuucaaggaggagcuggacaaguacuucaagaaccacaccucccccgacgucgaccucggggacaucagcggcaucaacgccuccguggugaacauccagaaggagaucgaccgccugaacgaggucgcgaagaaccugaacgagagccucaucgaccugcaggagcuggggaaguacgagcaguacaucaaguggcccugguacguguggcucggcuucaucgccggccugaucgccaucgugauggucaccauccugcucugcugcaugaccuccugcugcagcugccugaagggggccugcuccugcggcagcugcugcaaguucgacgaggacgacuccgagccggugcugaagggggugaagcuccacuacacgugaggacuagucccuguucccagagcccacuuuuuuuucuuuuuuugaaauaaaauagccugucuuucagaucucaaaggcucuuuucagagccaccaaaaaaaaaaaaaaaaaaaaaaaaaaaaaaaaaaaaaaaaaaaaaaaaaaaaaaaaaaaaaaaaaaaaaaaaaaaaaaaaaaaaaaaaaaaaaaaaaaaaa

SEQ ID NO: 15068 - RNA, 3848 nt, Artificial Sequence
  Bat SARS-like CoV/WIV1__AGZ48828.1 spike protein mRNA gc (variant)
aggagagucccgcagucggcguccagcggcucugcuuguucgugugugugucguugcaggccuuauucaagcuuaccaugaagcugcucgugcuggucuucgccacccuggugagcuccuacaccaucgagaagugccucgacuucgacgaccgcacgcccccggccaacacccaguuccugagcucccaccggggcguguacuaccccgacgacaucuuccgcagcaacguccugcaccucgugcaggaccacuuccugcccuucgacuccaacgugacccgguucaucaccuucgggcugaacuucgacaaccccaucaucccguucaaggacggcaucuacuucgcggccacggagaaguccaacgucauccgcggguggguguucggcuccaccaugaacaacaagagccaguccgugaucaucaugaacaacagcaccaaccucgucauccgggccugcaacuucgagcugugcgacaaccccuucuucguggugcugaaguccaacaacacccagauccccagcuacaucuucaacaacgccuucaacugcacguucgaguacgucuccaaggacuucaaccucgaccugggggagaagcccggcaacuucaaggaccugcgcgaguucguguuccggaacaaggacggcuuccuccacguguacagcggguaccagccgaucuccgccgcgagcggccugcccaccggguucaacgcccugaagcccaucuucaagcucccccugggcaucaacaucaccaacuuccgcacccugcucacggccuucccgccccggcccgacuacugggggaccuccgccgcggccuacuucgucggcuaccugaagcccaccaccuucaugcugaaguacgacgagaacggcacgaucaccgacgccguggacugcagccagaacccgcucgccgagcugaagugcuccgucaagagcuucgagaucgacaaggggaucuaccagaccagcaacuuccgcguggcccccuccaaggagguggugcgguuccccaacaucaccaaccugugccccuucggcgaggucuucaacgcgacgaccuucccgagcguguacgccugggagcgcaagcggaucuccaacugcguggccgacuacagcguccucuacaacuccaccagcuucuccaccuucaagugcuacggggugagcgccacgaagcugaacgaccugugcuucuccaacgucuacgccgacagcuucguggugaagggcgacgacguccgccagaucgcgcccggccagaccggggugaucgccgacuacaacuacaagcuccccgacgacuucaccggcugcgugcuggccuggaacacccggaacaucgacgccacgcagaccgggaacuacaacuacaaguaccgcucccugcggcacggcaagcuccgccccuucgagcgggacaucagcaacgucccguucucccccgacgggaagcccugcacgcccccggccuucaacugcuacuggccccugaacgacuacggcuucuacaucaccaacggcaucggguaccagcccuaccgcguggugguccugagcuucgagcuccugaacgcgccggccaccgugugcggccccaagcuguccaccgaccucaucaagaaccagugcgugaacuucaacuucaacgggcugaccggcaccgggguccugacgcccagcuccaagcgguuccagcccuuccagcaguucggccgcgacgugagcgacuucaccgacuccgugcgcgacccgaagaccagcgagauccucgacaucagccccugcuccuucggcggggucagcgugaucacccccggcaccaacacguccagcgagguggccguccuguaccaggacgugaacugcaccgacgugcccgucgccauccacgccgaccagcugaccccguccuggcgggugcacagcaccgggaacaacguguuccagacgcaggcgggcugccucaucggggccgagcacgucgacaccuccuacgagugcgacauccccaucggcgccggcaucugcgccagcuaccacaccguguccagccugcgcuccaccagccagaaguccaucguggcguacacgaugagccugggggccgacuccagcaucgccuacuccaacaacaccaucgccauccccaccaacuucagcaucagcaucaccacggaggucaugcccguguccauggccaagaccagcguggacugcaacauguacaucugcggcgacuccaccgagugcgcgaaccugcuccugcaguacgggagcuucugcacccagcugaaccgggcccucuccggcaucgccgucgagcaggaccgcaacacgcgggagguguucgcccaggugaagcagauguacaagaccccgacccugaaggacuucggcggguucaacuucagccagauccugcccgacccccucaagcccaccaagcgcuccuucaucgaggaccugcuguucaacaaggucacgcucgccgacgcgggcuucaugaagcaguacggggagugccugggcgacaucaacgcccgggaccugaucugcgcccagaaguucaacgggcucaccgugcugccgccccugcucaccgacgacaugaucgccgccuacaccgcggcccuggugagcggcacggccaccgccggcuggaccuucggggcgggcgccgcccugcagauccccuucgccaugcagauggccuaccgcuucaacgggaucggcgucacccagaacgugcucuacgagaaccagaagcagaucgcgaaccaguucaacaaggccaucucccagauccaggagagccugacgaccaccuccaccgcccuggggaagcuccaggacguggucaaccagaacgcccaggcccugaacacgcuggugaagcagcucagcuccaacuucggcgcgaucagcuccgugcugaacgacauccugagccggcucgacccgcccgaggccgagguccagaucgaccgccugaucaccggccggcugcagucccuccagaccuacgugacccagcagcugauccgcgccgccgagauccgggccagcgcgaaccuggccgccacgaagauguccgagugcgugcucgggcagagcaagcgcgucgacuucugcggcaagggguaccaccugaugagcuucccccaggccgcgccccacggcgugguguuccugcacgucaccuacgugcccucccaggagcggaacuucaccaccgccccggccaucugccacgaggggaaggccuacuucccccgcgagggcguguucgucuucaacggcaccagcugguucaucacgcagcggaacuucuucagcccccagaucaucaccaccgacaacaccuucgugagcggguccugcgacgucgugaucggcaucaucaacaacacgguguacgacccgcuccagcccgagcuggacagcuucaaggaggagcuggacaaguacuucaagaaccacaccucccccgacgucgaccucggggacaucagcggcaucaacgccuccguggugaacauccagaaggagaucgaccgccugaacgaggucgcgaagaaccugaacgagagccucaucgaccugcaggagcuggggaaguacgagcagugaggacuagucccuguucccagagcccacuuuuuuuucuuuuuuugaaauaaaauagccugucuuucagaucucaaaggcucuuuucagagccaccaaaaaaaaaaaaaaaaaaaaaaaaaaaaaaaaaaaaaaaaaaaaaaaaaaaaaaaaaaaaaaaaaaaaaaaaaaaaaaaaaaaaaaaaaaaaaaaaaaaaa

SEQ ID NO: 15069 - RNA, 3929 nt, Artificial Sequence
  Bat SARS-like CoV/WIV1__AGZ48828.1 spike protein mRNA gc (variant)
aggagagucccgcagucggcguccagcggcucugcuuguucgugugugugucguugcaggccuuauucaagcuuaccaugaagcugcucgugcuggucuucgccacccuggugagcuccuacaccaucgagaagugccucgacuucgacgaccgcacgcccccggccaacacccaguuccugagcucccaccggggcguguacuaccccgacgacaucuuccgcagcaacguccugcaccucgugcaggaccacuuccugcccuucgacuccaacgugacccgguucaucaccuucgggcugaacuucgacaaccccaucaucccguucaaggacggcaucuacuucgcggccacggagaaguccaacgucauccgcggguggguguucggcuccaccaugaacaacaagagccaguccgugaucaucaugaacaacagcaccaaccucgucauccgggccugcaacuucgagcugugcgacaaccccuucuucguggugcugaaguccaacaacacccagauccccagcuacaucuucaacaacgccuucaacugcacguucgaguacgucuccaaggacuucaaccucgaccugggggagaagcccggcaacuucaaggaccugcgcgaguucguguuccggaacaaggacggcuuccuccacguguacagcggguaccagccgaucuccgccgcgagcggccugcccaccggguucaacgcccugaagcccaucuucaagcucccccugggcaucaacaucaccaacuuccgcacccugcucacggccuucccgccccggcccgacuacugggggaccuccgccgcggccuacuucgucggcuaccugaagcccaccaccuucaugcugaaguacgacgagaacggcacgaucaccgacgccguggacugcagccagaacccgcucgccgagcugaagugcuccgucaagagcuucgagaucgacaaggggaucuaccagaccagcaacuuccgcguggcccccuccaaggagguggugcgguuccccaacaucaccaaccugugccccuucggcgaggucuucaacgcgacgaccuucccgagcguguacgccugggagcgcaagcggaucuccaacugcguggccgacuacagcguccucuacaacuccaccagcuucuccaccuucaagugcuacggggugagcgccacgaagcugaacgaccugugcuucuccaacgucuacgccgacagcuucguggugaagggcgacgacguccgccagaucgcgcccggccagaccggggugaucgccgacuacaacuacaagcuccccgacgacuucaccggcugcgugcuggccuggaacacccggaacaucgacgccacgcagaccgggaacuacaacuacaaguaccgcucccugcggcacggcaagcuccgccccuucgagcgggacaucagcaacgucccguucucccccgacgggaagcccugcacgcccccggccuucaacugcuacuggccccugaacgacuacggcuucuacaucaccaacggcaucggguaccagcccuaccgcguggugguccugagcuucgagcuccugaacgcgccggccaccgugugcggccccaagcuguccaccgaccucaucaagaaccagugcgugaacuucaacuucaacgggcugaccggcaccgggguccugacgcccagcuccaagcgguuccagcccuuccagcaguucggccgcgacgugagcgacuucaccgacuccgugcgcgacccgaagaccagcgagauccucgacaucagccccugcuccuucggcggggucagcgugaucacccccggcaccaacacguccagcgagguggccguccuguaccaggacgugaacugcaccgacgugcccgucgccauccacgccgaccagcugaccccguccuggcgggugcacagcaccgggaacaacguguuccagacgcaggcgggcugccucaucggggccgagcacgucgacaccuccuacgagugcgacauccccaucggcgccggcaucugcgccagcuaccacaccguguccagccugcgcuccaccagccagaaguccaucguggcguacacgaugagccugggggccgacuccagcaucgccuacuccaacaacaccaucgccauccccaccaacuucagcaucagcaucaccacggaggucaugcccguguccauggccaagaccagcguggacugcaacauguacaucugcggcgacuccaccgagugcgcgaaccugcuccugcaguacgggagcuucugcacccagcugaaccgggcccucuccggcaucgccgucgagcaggaccgcaacacgcgggagguguucgcccaggugaagcagauguacaagaccccgacccugaaggacuucggcggguucaacuucagccagauccugcccgacccccucaagcccaccaagcgcuccuucaucgaggaccugcuguucaacaaggucacgcucgccgacgcgggcuucaugaagcaguacggggagugccugggcgacaucaacgcccgggaccugaucugcgcccagaaguucaacgggcucaccgugcugccgccccugcucaccgacgacaugaucgccgccuacaccgcggcccuggugagcggcacggccaccgccggcuggaccuucggggcgggcgccgcccugcagauccccuucgccaugcagauggccuaccgcuucaacgggaucggcgucacccagaacgugcucuacgagaaccagaagcagaucgcgaaccaguucaacaaggccaucucccagauccaggagagccugacgaccaccuccaccgcccuggggaagcuccaggacguggucaaccagaacgcccaggcccugaacacgcuggugaagcagcucagcuccaacuucggcgcgaucagcuccgugcugaacgacauccugagccggcucgacccgcccgaggccgagguccagaucgaccgccugaucaccggccggcugcagucccuccagaccuacgugacccagcagcugauccgcgccgccgagauccgggccagcgcgaaccuggccgccacgaagauguccgagugcgugcucgggcagagcaagcgcgucgacuucugcggcaagggguaccaccugaugagcuucccccaggccgcgccccacggcgugguguuccugcacgucaccuacgugcccucccaggagcggaacuucaccaccgccccggccaucugccacgaggggaaggccuacuucccccgcgagggcguguucgucuucaacggcaccagcugguucaucacgcagcggaacuucuucagcccccagaucaucaccaccgacaacaccuucgugagcggguccugcgacgucgugaucggcaucaucaacaacacgguguacgacccgcuccagcccgagcuggacagcuucaaggaggagcuggacaaguacuucaagaaccacaccucccccgacgucgaccucggggacaucagcggcaucaacgccuccguggugaacauccagaaggagaucgaccgccugaacgaggucgcgaagaaccugaacgagagccucaucgaccugcaggagcuggggaaguacgagcagggcggcuacauccccgaggccccgcgggacgggcaggccuacgugcgcaaggacggcgagugggugcuccuguccaccuucugaggacuagucccuguucccagagcccacuuuuuuuucuuuuuuugaaauaaaauagccugucuuucagaucucaaaggcucuuuucagagccaccaaaaaaaaaaaaaaaaaaaaaaaaaaaaaaaaaaaaaaaaaaaaaaaaaaaaaaaaaaaaaaaaaaaaaaaaaaaaaaaaaaaaaaaaaaaaaaaaaaaaa

SEQ ID NO: 15070 - RNA, 4097 nt, Artificial Sequence
  BatCoV/HKU9-1 BF_005I__YP_001039971.1 spike protein mRNA gc (1-1274)
aggagagucccgcagucggcguccagcggcucugcuuguucgugugugugucguugcaggccuuauucaagcuuaccaugcugcucauccuggugcugggcgucagccucgccgccgcgucccgccccgagugcuucaacccgcgguucacccugacgccccugaaccacacccucaacuacaccagcaucaaggccaagguguccaacgugcugcugcccgaccccuacaucgccuacagcgggcagacccuccgccagaaccuguucauggccgacauguccaacaccauccuguacccggucacgccgcccgccaacggcgcgaacgggggcuucaucuacaacaccagcaucauccccguguccgccggccucuucgugaacaccuggauguaccggcagcccgccagcucccgcgccuacugccaggagcccuucggggucgcguucggcgacaccuucgagaacgaccggaucgccauccugaucauggcccccgacaaccuggggagcugguccgccguggcgccccgcaaccagacgaacaucuaccuccuggugugcagcaacgccacccugugcaucaacccgggcuucaaccggugggggcccgccggcuccuucaucgcccccgacgcccucgucgaccacagcaacuccugcuucgugaacaacaccuucagcgugaacaucuccaccagccgcaucucccuggccuuccuguucaaggacggggaccuccugaucuaccacagcggcuggcugcccacgagcaacuucgagcacggcuucucccgggggagccacccgaugaccuacuucaugucccuccccgucggcgggaaccugccccgcgcgcaguucuuccagagcaucgugcgguccaacgccaucgacaagggcgacggcaugugcaccaacuucgacgugaaccugcacgucgcccaccucaucaaccgcgaccugcuggugagcuacuucaacaacggguccguggccaacgccgcggacugcgccgacagcgccgccgaggagcucuacugcgucaccggcuccuucgacccgcccacggggguguacccccugagccgguaccgcgcccagguggcgggcuucguccgggugacccagcgcggguccuacugcaccccgcccuacagcgugcugcaggacccgccccagcccgucguguggcggcgcuacaugcucuacgacugcgucuucgacuucaccgugguggucgacucccugcccacgcaccagcugcagugcuacggcgugagcccccggcgccucgccuccaugugcuacggcagcgugacccuggacgucaugcggaucaacgagacccaccugaacaaccucuucaaccgcgugcccgacaccuucucccuguacaacuacgcccugcccgacaacuucuacgggugccuccacgccuucuaccugaacagcacggcgccguacgccguggccaaccgcuuccccaucaagcccggcgggcggcaguccaacagcgccuucaucgacaccgucaucaacgccgcgcacuacagccccuucuccuacguguacggccuggccgugaucacccucaagccggccgccgggagcaagcuggucugccccguggccaacgacaccguggucaucacggaccgcugcgugcaguacaaccuguacggcuacaccggcaccggggugcuguccaagaacaccagccucgucauccccgacggcaagguguucacggcguccagcaccgggaccaucaucggcguguccaucaacagcaccacguacuccaucaugcccugcgucaccgugccggugagcgucggguaccaccccaacuucgagcgggcccugcuguucaacggccucuccugcagccagcgcucccgggccgugaccgagcccgugagcguccugugguccgccagcgccaccgcgcaggacgccuucgacacccccuccggcugcguggugaacgucgagcugcgcaacacgaccaucgugaacacgugcgccaugccgaucgggaacagccucugcuucaucaacggcagcaucgccaccgcgaacgccgacucccugccccggcugcagcucgugaacuacgacccccuguacgacaacagcaccgccacccccaugaccccggucuacugggugaaggugcccaccaacuucacgcuguccgccaccgaggaguacauccagaccaccgcccccaagaucacgaucgacugcgcgcgcuaccucugcggggacagcucccggugccugaacguccugcuccacuacggcaccuucugcaacgacaucaacaaggcccugagccgcguguccaccauccuggacagcgcccuccugucccuggugaaggagcucagcaucaacacccgggacgaggucacgaccuucuccuucgacggcgacuacaacuucaccgggcugaugggcugccuggggcccaacugcggcgccaccacguaccgcagcgccuucuccgaccuccuguacgacaaggugcggaucaccgacccgggguucaugcagagcuaccagaagugcaucgacucccaguggggcggcagcauccgcgaccugcucugcacccagaccuacaacgggaucgcggugcugccgcccaucgucucccccgccaugcaggcccuguacacgagccuccuggugggcgccguggccuccagcggguacaccuucggcaucaccagcgcgggggucauccccuucgccacccagcugcaguuccggcucaacggcaucggcgugacgacccaggugcuggucgagaaccagaagcugaucgccuccagcuucaacaacgcccucgugaacauccagaagggguucaccgagaccuccaucgcgcugagcaagaugcaggacgugaucaaccagcacgccgcccagcugcacacgcucgucgugcagcugggcaacuccuucggggccaucagcuccagcaucaacgagaucuucucccgccuggagggccucgccgcgaacgccgaggucgaccggcugaucaacgggcgcaugauggugcugaacaccuacgugacccagcuccugauccaggccagcgaggccaaggcccagaacgcgcuggccgcccagaagaucuccgagugcgucaaggcccagagccuccggaacgacuucugcggcaacggcacccacgugcuguccaucccccagcuggcccccaacgggguccucuucauccacuacgcguacacgccgaccgaguacgccuucgugcagaccagcgccggccugugccacaacgggaccggcuacgcgccccgccaggggauguucgugcugcccaacaacaccaacauguggcacuucacgaccaugcaguucuacaaccccgugaacaucuccgccagcaacacccagguccucaccuccugcagcgugaacuacacguccgugaacuacaccguccuggagccgagcgugcccggcgacuacgacuuccagaaggaguucgacaaguucuacaagaaccugagcaccaucuucaacaacaccuucaaccccaacgacuucaacuucuccacgguggacgucaccgcccagaucaagagccuccacgacguggugaaccagcugaaccaguccuucaucgaccugaagaagcucaacgucuacgagaagaccaucaaguggcccugguacguguggcuggccaugaucgccggcaucguggggcugguccucgccgugaucaugcugaugugcaugaccaacugcugcagcugcuucaagggcaugugcgacugccgccggugcugcggguccuacgacagcuacgacgacguguacccggcgguccgcgugaacaagaagcggacggugugaggacuagucccuguucccagagcccacuuuuuuuucuuuuuuugaaauaaaauagccugucuuucagaucucaaaggcucuuuucagagccaccaaaaaaaaaaaaaaaaaaaaaaaaaaaaaaaaaaaaaaaaaaaaaaaaaaaaaaaaaaaaaaaaaaaaaaaaaaaaaaaaaaaaaaaaaaaaaaaaaaaaa

SEQ ID NO: 15071 - RNA, 4097 nt, Artificial Sequence
  BatCoV/HKU9-1 BF_005I__YP_001039971.1 spike protein mRNA gc (1-1274)(G983P_L984P)
aggagagucccgcagucggcguccagcggcucugcuuguucgugugugugucguugcaggccuuauucaagcuuaccaugcugcucauccuggugcugggcgucagccucgccgccgcgucccgccccgagugcuucaacccgcgguucacccugacgccccugaaccacacccucaacuacaccagcaucaaggccaagguguccaacgugcugcugcccgaccccuacaucgccuacagcgggcagacccuccgccagaaccuguucauggccgacauguccaacaccauccuguacccggucacgccgcccgccaacggcgcgaacgggggcuucaucuacaacaccagcaucauccccguguccgccggccucuucgugaacaccuggauguaccggcagcccgccagcucccgcgccuacugccaggagcccuucggggucgcguucggcgacaccuucgagaacgaccggaucgccauccugaucauggcccccgacaaccuggggagcugguccgccguggcgccccgcaaccagacgaacaucuaccuccuggugugcagcaacgccacccugugcaucaacccgggcuucaaccggugggggcccgccggcuccuucaucgcccccgacgcccucgucgaccacagcaacuccugcuucgugaacaacaccuucagcgugaacaucuccaccagccgcaucucccuggccuuccuguucaaggacggggaccuccugaucuaccacagcggcuggcugcccacgagcaacuucgagcacggcuucucccgggggagccacccgaugaccuacuucaugucccuccccgucggcgggaaccugccccgcgcgcaguucuuccagagcaucgugcgguccaacgccaucgacaagggcgacggcaugugcaccaacuucgacgugaaccugcacgucgcccaccucaucaaccgcgaccugcuggugagcuacuucaacaacggguccguggccaacgccgcggacugcgccgacagcgccgccgaggagcucuacugcgucaccggcuccuucgacccgcccacggggguguacccccugagccgguaccgcgcccagguggcgggcuucguccgggugacccagcgcggguccuacugcaccccgcccuacagcgugcugcaggacccgccccagcccgucguguggcggcgcuacaugcucuacgacugcgucuucgacuucaccgugguggucgacucccugcccacgcaccagcugcagugcuacggcgugagcccccggcgccucgccuccaugugcuacggcagcgugacccuggacgucaugcggaucaacgagacccaccugaacaaccucuucaaccgcgugcccgacaccuucucccuguacaacuacgcccugcccgacaacuucuacgggugccuccacgccuucuaccugaacagcacggcgccguacgccguggccaaccgcuuccccaucaagcccggcgggcggcaguccaacagcgccuucaucgacaccgucaucaacgccgcgcacuacagccccuucuccuacguguacggccuggccgugaucacccucaagccggccgccgggagcaagcuggucugccccguggccaacgacaccguggucaucacggaccgcugcgugcaguacaaccuguacggcuacaccggcaccggggugcuguccaagaacaccagccucgucauccccgacggcaagguguucacggcguccagcaccgggaccaucaucggcguguccaucaacagcaccacguacuccaucaugcccugcgucaccgugccggugagcgucggguaccaccccaacuucgagcgggcccugcuguucaacggccucuccugcagccagcgcucccgggccgugaccgagcccgugagcguccugugguccgccagcgccaccgcgcaggacgccuucgacacccccuccggcugcguggugaacgucgagcugcgcaacacgaccaucgugaacacgugcgccaugccgaucgggaacagccucugcuucaucaacggcagcaucgccaccgcgaacgccgacucccugccccggcugcagcucgugaacuacgacccccuguacgacaacagcaccgccacccccaugaccccggucuacugggugaaggugcccaccaacuucacgcuguccgccaccgaggaguacauccagaccaccgcccccaagaucacgaucgacugcgcgcgcuaccucugcggggacagcucccggugccugaacguccugcuccacuacggcaccuucugcaacgacaucaacaaggcccugagccgcguguccaccauccuggacagcgcccuccugucccuggugaaggagcucagcaucaacacccgggacgaggucacgaccuucuccuucgacggcgacuacaacuucaccgggcugaugggcugccuggggcccaacugcggcgccaccacguaccgcagcgccuucuccgaccuccuguacgacaaggugcggaucaccgacccgggguucaugcagagcuaccagaagugcaucgacucccaguggggcggcagcauccgcgaccugcucugcacccagaccuacaacgggaucgcggugcugccgcccaucgucucccccgccaugcaggcccuguacacgagccuccuggugggcgccguggccuccagcggguacaccuucggcaucaccagcgcgggggucauccccuucgccacccagcugcaguuccggcucaacggcaucggcgugacgacccaggugcuggucgagaaccagaagcugaucgccuccagcuucaacaacgcccucgugaacauccagaagggguucaccgagaccuccaucgcgcugagcaagaugcaggacgugaucaaccagcacgccgcccagcugcacacgcucgucgugcagcugggcaacuccuucggggccaucagcuccagcaucaacgagaucuucucccgccuggagccgcccgccgcgaacgccgaggucgaccggcucaucaacggccgcaugauggugcugaacaccuacgugacccagcugcucauccaggccagcgaggccaaggcccagaacgcgcuggccgcccagaagaucuccgagugcgucaaggcccagagccugcggaacgacuucugcgggaacggcacccacgugcucuccaucccccagcuggcccccaacggcgugcuguucauccacuacgcguacacgcccaccgaguacgccuucguccagaccagcgccgggcucugccacaacggcaccggguacgcgccccgccagggcauguucgugcugccgaacaacaccaacauguggcacuucacgaccaugcaguucuacaaccccgugaacaucuccgccagcaacacccagguccugaccuccugcagcgugaacuacacguccgugaacuacaccguccucgagcccagcgugcccggggacuacgacuuccagaaggaguucgacaaguucuacaagaaccugagcaccaucuucaacaacaccuucaacccgaacgacuucaacuucuccacgguggacgucaccgcccagaucaagagccugcacgacguggugaaccagcucaaccaguccuucaucgaccugaagaagcugaacgucuacgagaagaccaucaaguggcccugguacguguggcucgccaugaucgccggcaucgugggccugguccuggccgugaucaugcucaugugcaugaccaacugcugcagcugcuucaaggggaugugcgacugccgccggugcugcggcuccuacgacagcuacgacgacguguaccccgcgguccgcgugaacaagaagcggacggugugaggacuagucccuguucccagagcccacuuuuuuuucuuuuuuugaaauaaaauagccugucuuucagaucucaaaggcucuuuucagagccaccaaaaaaaaaaaaaaaaaaaaaaaaaaaaaaaaaaaaaaaaaaaaaaaaaaaaaaaaaaaaaaaaaaaaaaaaaaaaaaaaaaaaaaaaaaaaaaaaaaaaa

SEQ ID NO: 15072 - RNA, 3896 nt, Artificial Sequence
  BatCoV/HKU9-1 BF_005I__YP_001039971.1 spike protein mRNA gc (variant)
aggagagucccgcagucggcguccagcggcucugcuuguucgugugugugucguugcaggccuuauucaagcuuaccaugcugcucauccuggugcugggcgucagccucgccgccgcgucccgccccgagugcuucaacccgcgguucacccugacgccccugaaccacacccucaacuacaccagcaucaaggccaagguguccaacgugcugcugcccgaccccuacaucgccuacagcgggcagacccuccgccagaaccuguucauggccgacauguccaacaccauccuguacccggucacgccgcccgccaacggcgcgaacgggggcuucaucuacaacaccagcaucauccccguguccgccggccucuucgugaacaccuggauguaccggcagcccgccagcucccgcgccuacugccaggagcccuucggggucgcguucggcgacaccuucgagaacgaccggaucgccauccugaucauggcccccgacaaccuggggagcugguccgccguggcgccccgcaaccagacgaacaucuaccuccuggugugcagcaacgccacccugugcaucaacccgggcuucaaccggugggggcccgccggcuccuucaucgcccccgacgcccucgucgaccacagcaacuccugcuucgugaacaacaccuucagcgugaacaucuccaccagccgcaucucccuggccuuccuguucaaggacggggaccuccugaucuaccacagcggcuggcugcccacgagcaacuucgagcacggcuucucccgggggagccacccgaugaccuacuucaugucccuccccgucggcgggaaccugccccgcgcgcaguucuuccagagcaucgugcgguccaacgccaucgacaagggcgacggcaugugcaccaacuucgacgugaaccugcacgucgcccaccucaucaaccgcgaccugcuggugagcuacuucaacaacggguccguggccaacgccgcggacugcgccgacagcgccgccgaggagcucuacugcgucaccggcuccuucgacccgcccacggggguguacccccugagccgguaccgcgcccagguggcgggcuucguccgggugacccagcgcggguccuacugcaccccgcccuacagcgugcugcaggacccgccccagcccgucguguggcggcgcuacaugcucuacgacugcgucuucgacuucaccgugguggucgacucccugcccacgcaccagcugcagugcuacggcgugagcccccggcgccucgccuccaugugcuacggcagcgugacccuggacgucaugcggaucaacgagacccaccugaacaaccucuucaaccgcgugcccgacaccuucucccuguacaacuacgcccugcccgacaacuucuacgggugccuccacgccuucuaccugaacagcacggcgccguacgccguggccaaccgcuuccccaucaagcccggcgggcggcaguccaacagcgccuucaucgacaccgucaucaacgccgcgcacuacagccccuucuccuacguguacggccuggccgugaucacccucaagccggccgccgggagcaagcuggucugccccguggccaacgacaccguggucaucacggaccgcugcgugcaguacaaccuguacggcuacaccggcaccggggugcuguccaagaacaccagccucgucauccccgacggcaagguguucacggcguccagcaccgggaccaucaucggcguguccaucaacagcaccacguacuccaucaugcccugcgucaccgugccggugagcgucggguaccaccccaacuucgagcgggcccugcuguucaacggccucuccugcagccagcgcucccgggccgugaccgagcccgugagcguccugugguccgccagcgccaccgcgcaggacgccuucgacacccccuccggcugcguggugaacgucgagcugcgcaacacgaccaucgugaacacgugcgccaugccgaucgggaacagccucugcuucaucaacggcagcaucgccaccgcgaacgccgacucccugccccggcugcagcucgugaacuacgacccccuguacgacaacagcaccgccacccccaugaccccggucuacugggugaaggugcccaccaacuucacgcuguccgccaccgaggaguacauccagaccaccgcccccaagaucacgaucgacugcgcgcgcuaccucugcggggacagcucccggugccugaacguccugcuccacuacggcaccuucugcaacgacaucaacaaggcccugagccgcguguccaccauccuggacagcgcccuccugucccuggugaaggagcucagcaucaacacccgggacgaggucacgaccuucuccuucgacggcgacuacaacuucaccgggcugaugggcugccuggggcccaacugcggcgccaccacguaccgcagcgccuucuccgaccuccuguacgacaaggugcggaucaccgacccgggguucaugcagagcuaccagaagugcaucgacucccaguggggcggcagcauccgcgaccugcucugcacccagaccuacaacgggaucgcggugcugccgcccaucgucucccccgccaugcaggcccuguacacgagccuccuggugggcgccguggccuccagcggguacaccuucggcaucaccagcgcgggggucauccccuucgccacccagcugcaguuccggcucaacggcaucggcgugacgacccaggugcuggucgagaaccagaagcugaucgccuccagcuucaacaacgcccucgugaacauccagaagggguucaccgagaccuccaucgcgcugagcaagaugcaggacgugaucaaccagcacgccgcccagcugcacacgcucgucgugcagcugggcaacuccuucggggccaucagcuccagcaucaacgagaucuucucccgccuggagccgcccgccgcgaacgccgaggucgaccggcucaucaacggccgcaugauggugcugaacaccuacgugacccagcugcucauccaggccagcgaggccaaggcccagaacgcgcuggccgcccagaagaucuccgagugcgucaaggcccagagccugcggaacgacuucugcgggaacggcacccacgugcucuccaucccccagcuggcccccaacggcgugcuguucauccacuacgcguacacgcccaccgaguacgccuucguccagaccagcgccgggcucugccacaacggcaccggguacgcgccccgccagggcauguucgugcugccgaacaacaccaacauguggcacuucacgaccaugcaguucuacaaccccgugaacaucuccgccagcaacacccagguccugaccuccugcagcgugaacuacacguccgugaacuacaccguccucgagcccagcgugcccggggacuacgacuuccagaaggaguucgacaaguucuacaagaaccugagcaccaucuucaacaacaccuucaacccgaacgacuucaacuucuccacgguggacgucaccgcccagaucaagagccugcacgacguggugaaccagcucaaccaguccuucaucgaccugaagaagcugaacgucuacgagaagugaggacuagucccuguucccagagcccacuuuuuuuucuuuuuuugaaauaaaauagccugucuuucagaucucaaaggcucuuuucagagccaccaaaaaaaaaaaaaaaaaaaaaaaaaaaaaaaaaaaaaaaaaaaaaaaaaaaaaaaaaaaaaaaaaaaaaaaaaaaaaaaaaaaaaaaaaaaaaaaaaaaaa

SEQ ID NO: 15073 - RNA, 3977 nt, Artificial Sequence
  BatCoV/HKU9-1 BF_005I__YP_001039971.1 spike protein mRNA gc (variant)
aggagagucccgcagucggcguccagcggcucugcuuguucgugugugugucguugcaggccuuauucaagcuuaccaugcugcucauccuggugcugggcgucagccucgccgccgccucccgccccgagugcuucaacccgcgguucacccugacgccccugaaccacacccucaacuacaccagcaucaaggccaagguguccaacgugcugcugcccgaccccuacaucgccuacagcgggcagacccuccgccagaaccuguucauggccgacauguccaacaccauccuguacccggucacgccgcccgccaacggcgcgaacgggggcuucaucuacaacaccagcaucauccccguguccgccggccucuucgugaacaccuggauguaccggcagcccgccagcucccgcgccuacugccaggagcccuucggggucgcguucggcgacaccuucgagaacgaccggaucgccauccugaucauggcccccgacaaccuggggagcugguccgccguggcgccccgcaaccagacgaacaucuaccuccuggugugcagcaacgccacccugugcaucaacccgggcuucaaccggugggggcccgccggcuccuucaucgcccccgacgcccucgucgaccacagcaacuccugcuucgugaacaacaccuucagcgugaacaucuccaccagccgcaucucccuggccuuccuguucaaggacggggaccuccugaucuaccacagcggcuggcugcccacgagcaacuucgagcacggcuucucccgggggagccacccgaugaccuacuucaugucccuccccgucggcgggaaccugccccgcgcgcaguucuuccagagcaucgugcgguccaacgccaucgacaagggcgacggcaugugcaccaacuucgacgugaaccugcacgucgcccaccucaucaaccgcgaccugcuggugagcuacuucaacaacggguccguggccaacgccgcggacugcgccgacagcgccgccgaggagcucuacugcgucaccggcuccuucgacccgcccacggggguguacccccugagccgguaccgcgcccagguggcgggcuucguccgggugacccagcgcggguccuacugcaccccgcccuacagcgugcugcaggacccgccccagcccgucguguggcggcgcuacaugcucuacgacugcgucuucgacuucaccgugguggucgacucccugcccacgcaccagcugcagugcuacggcgugagcccccggcgccucgccuccaugugcuacggcagcgugacccuggacgucaugcggaucaacgagacccaccugaacaaccucuucaaccgcgugcccgacaccuucucccuguacaacuacgcccugcccgacaacuucuacgggugccuccacgccuucuaccugaacagcacggcgccguacgccguggccaaccgcuuccccaucaagcccggcgggcggcaguccaacagcgccuucaucgacaccgucaucaacgccgcgcacuacagccccuucuccuacguguacggccuggccgugaucacccucaagccggccgccgggagcaagcuggucugccccguggccaacgacaccguggucaucacggaccgcugcgugcaguacaaccuguacggcuacaccggcaccggggugcuguccaagaacaccagccucgucauccccgacggcaagguguucacggcguccagcaccgggaccaucaucggcguguccaucaacagcaccacguacuccaucaugcccugcgucaccgugccggugagcgucggguaccaccccaacuucgagcgggcccugcuguucaacggccucuccugcagccagcgcucccgggccgugaccgagcccgugagcguccugugguccgccagcgccaccgcgcaggacgccuucgacacccccuccggcugcguggugaacgucgagcugcgcaacacgaccaucgugaacacgugcgccaugccgaucgggaacagccucugcuucaucaacggcagcaucgccaccgcgaacgccgacucccugccccggcugcagcucgugaacuacgacccccuguacgacaacagcaccgccacccccaugaccccggucuacugggugaaggugcccaccaacuucacgcuguccgccaccgaggaguacauccagaccaccgcccccaagaucacgaucgacugcgcgcgcuaccucugcggggacagcucccggugccugaacguccugcuccacuacggcaccuucugcaacgacaucaacaaggcccugagccgcguguccaccauccuggacagcgcccuccugucccuggugaaggagcucagcaucaacacccgggacgaggucacgaccuucuccuucgacggcgacuacaacuucaccgggcugaugggcugccuggggcccaacugcggcgccaccacguaccgcagcgccuucuccgaccuccuguacgacaaggugcggaucaccgacccgggguucaugcagagcuaccagaagugcaucgacucccaguggggcggcagcauccgcgaccugcucugcacccagaccuacaacgggaucgcggugcugccgcccaucgucucccccgccaugcaggcccuguacacgagccuccuggugggcgccguggccuccagcggguacaccuucggcaucaccagcgcgggggucauccccuucgccacccagcugcaguuccggcucaacggcaucggcgugacgacccaggugcuggucgagaaccagaagcugaucgccuccagcuucaacaacgcccucgugaacauccagaagggguucaccgagaccuccaucgcgcugagcaagaugcaggacgugaucaaccagcacgccgcccagcugcacacgcucgucgugcagcugggcaacuccuucggggccaucagcuccagcaucaacgagaucuucucccgccuggagccgcccgccgcgaacgccgaggucgaccggcucaucaacggccgcaugauggugcugaacaccuacgugacccagcugcucauccaggccagcgaggccaaggcccagaacgcgcuggccgcccagaagaucuccgagugcgucaaggcccagagccugcggaacgacuucugcgggaacggcacccacgugcucuccaucccccagcuggcccccaacggcgugcuguucauccacuacgcguacacgcccaccgaguacgccuucguccagaccagcgccgggcucugccacaacggcaccggguacgcgccccgccagggcauguucgugcugccgaacaacaccaacauguggcacuucacgaccaugcaguucuacaaccccgugaacaucuccgccagcaacacccagguccugaccuccugcagcgugaacuacacguccgugaacuacaccguccucgagcccagcgugcccggggacuacgacuuccagaaggaguucgacaaguucuacaagaaccugagcaccaucuucaacaacaccuucaacccgaacgacuucaacuucuccacgguggacgucaccgcccagaucaagagccugcacgacguggugaaccagcucaaccaguccuucaucgaccugaagaagcugaacgucuacgagaagggcggcuacauccccgaggcgccccgcgacgggcaggccuacgugcggaaggacggcgagugggugcuccugagcaccuucugaggacuagucccuguucccagagcccacuuuuuuuucuuuuuuugaaauaaaauagccugucuuucagaucucaaaggcucuuuucagagccaccaaaaaaaaaaaaaaaaaaaaaaaaaaaaaaaaaaaaaaaaaaaaaaaaaaaaaaaaaaaaaaaaaaaaaaaaaaaaaaaaaaaaaaaaaaaaaaaaaaaaa

SEQ ID NO: 15074 - RNA, 3755 nt, Artificial Sequence
  PDCoV/Swine/Thailand/S5011/2015__AMN91621.1 spike protein mRNA gc (1-1160)
aggagagucccgcagucggcguccagcggcucugcuuguucgugugugugucguugcaggccuuauucaagcuuaccaugcagcgcgcccugcucaucaugacccugcugugccucgcccgggcgaaguucgccgacgaccugcuggaccuccugaccuuccccggcgcccaccgcuuccugcacaagccgacgcggaacgacagcauccucuacucccgcgccaacaacaacuucgacguggggguccugcccggcuaccccaccaagaacgugaaccuguucagcccccucaccaacuccacccugccgaucaacgggcugcaccggagcuaccagccccucaugcugaacugccugacgaagaucaccaaccagacccucuccauguaccugcagcccagcgagauccagaccuacuccugcggcggggccauggugaaguaccagacgcacgacgcgguccgcaucauccuggaccucaucgccaccgaccggaucagcguggagguggucggccaggccggcgagaacuacguguucgugugcuccgaccaguucaacuacaccaccgcccugcacaacagcacguucuucucccugaacagccagcucuacugcuucaccaacaacaccuaccuggggauccugcccccggaccucaccgacuucacggucuaccgcaccggccaguucuacgcgaacggguaccugcugggcacccuccccaucaccgugaacuacgugcggcuguaccgcgggcagcuguccgccaacagcgcccacuucgcccucgccaaccugacggacacccugaucacccucaccaacacgaccaucucccagaucaccuacugcgacaagagcgucguggacuccaucgcgugccagcggagcucccaccagguggaggacggcuucuacagcgaccccaagagcgccguccgcgcccggcagcgcaccaucgugacgcugcccaagcugccggagcucgaggugguccagcugaacaucuccgcccacauggacuucggcgaggcccggcuggacagcgugaccaucaacgggaacaccuccuacugcgugaccaagcccuacuuccgccucgagacgaacuuccugugccggggcugcaccaugaaccugcgcaccgacacgugcagcuucgaccucuccgcggucaacaacgggaugagcuucucccaguucugccugagcaccgaguccggcgccugcgagaugaagaucaucgugaccuacguguggaacuaccugcugcggcagcgccucuacgucaccgccguggagggccagacccacaccgggacgaccagcguccacgccaccgacaccuccagcgugaucacggacgugugcaccgacuacaccaucuacggcgucuccgggaccggcaucaucaagcccagcgaccugcugcuccacaacgggaucgccuucacgucccccaccggcgagcuguacgcguucaagaacaucaccaccggcaagacgcuccaggugcugccgugcgagacccccagccagcugaucgugaucaacaacaccgucgugggggccaucaccuccagcaacuccacggagaacaaccgguucaccaccaccaucgugacgcccaccuucuucuacagcaccaacgccaccacgcugaacugcaccaagcccguccucagcuacggcccgaucuccgugugcagcgacggggccaucgccggcaccuccacccugcagaacacgcgccccagcaucgugucccuguacgacggggagaucgagauccccagcgcguucucccucagcguccagaccgaguaccuccaggugcaggccgagcaggucaucguggacugcccccaguacgugugcaacggcaacucccgcugccugcagcugcuggcccaguacaccagcgccugcuccaacaucgagguggcgcugcacagcuccgcccagcucgacagccgggagaucaucuccauguucaagaccagcacgcagucccugcagcuggccaacaucaccaacuucaagggcgacuacaacuucagcagcauccucaccucccgcgucgggggccggagcgccaucgaggaccugcuguucaacaagguggugaccuccgggcucggcacggucgaccaggacuacaagagcugcucccgcaacauggccaucgcggaccuggugugcagccaguacuacaacgggaucauggugcugccgggcgucguggacgccgagaagauggccauguacaccggcucccucaccggggccaugguguucggcgggcugaccgccgcggccgccauccccuucgccaccgccguccaggcgcggcugaacuacguggcccuccagacgaacgugcugcaggagaaccagaagauccuggccgagagcuucaaccaggccgucggcaacaucucccucgcgcugagcuccgugaacgacgccauccagcagaccagcgaggcccugaacaccguggccaucgccaucaagaagauccagaccgucgugaaccagcagggcgaggcgcucucccaccugacggcccagcugagcaacaacuuccaggccaucuccaccagcauccaggacaucuacaaccgccucgaggagguggaggccaaccagcaggucgaccggcugaucaacgggcgccuggccgcgcucaacgccuacgugacccagcugcugaaccagaugucccagauccggcagagccgccuccuggcccagcagaagaucaacgagugcgugaagucccagagcccccgguacggcuucugcgggaacggcacccacaucuucagccugacgcagaccgcccccaacgggaucuucuucaugcacgccguccucgugccgaacaaguucacccgcgugaacgcguccgccggcaucugcgucgacaacacccggggcuacagccugcagccccagcugauccucuaccaguucaacaacuccuggcgcgugacgccccggaacauguacgagccgcgccugccccggcaggccgacuucauccagcugaccgacugcagcgugaccuucuacaacaccacggccgcgaaccuccccaacaucauccccgacgucaucgacgugaaccagaccguguccgacaucaucgacaaccugccgaccgccaccccgccccagugggacgucgggaucuacaacaacacgauccugaaccucaccguggagaucaacgaccugcaggagcgcagcaagaaccugucccagaucgccgaccggcuccagaacuacaucgacaaccugaacaacacccugguggaccucgaguggcugaaccgcgucgagaccuaccugaaguggcccugguacaucuggcucgccaucgcccuggcgcugaucgccuucgugacgauccucaucaccaucuuccugugcaccggcugcugcgggggcugcuucgggugcugcggcggcugcuucgggcuguucagcaagaagaagcgcuacaccgacgaccagcccacgcccuccuucaaguucaaggaguggugaggacuagucccuguucccagagcccacuuuuuuuucuuuuuuugaaauaaaauagccugucuuucagaucucaaaggcucuuuucagagccaccaaaaaaaaaaaaaaaaaaaaaaaaaaaaaaaaaaaaaaaaaaaaaaaaaaaaaaaaaaaaaaaaaaaaaaaaaaaaaaaaaaaaaaaaaaaaaaaaaaaaa

SEQ ID NO: 15075 - RNA, 3755 nt, Artificial Sequence
  PDCoV/Swine/Thailand/S5011/2015__AMN91621.1 spike protein mRNA gc (1-1160)(E855P_V856P)
aggagagucccgcagucggcguccagcggcucugcuuguucgugugugugucguugcaggccuuauucaagcuuaccaugcagcgcgcccugcucaucaugacccugcugugccucgcccgggcgaaguucgccgacgaccugcuggaccuccugaccuuccccggcgcccaccgcuuccugcacaagccgacgcggaacgacagcauccucuacucccgcgccaacaacaacuucgacguggggguccugcccggcuaccccaccaagaacgugaaccuguucagcccccucaccaacuccacccugccgaucaacgggcugcaccggagcuaccagccccucaugcugaacugccugacgaagaucaccaaccagacccucuccauguaccugcagcccagcgagauccagaccuacuccugcggcggggccauggugaaguaccagacgcacgacgcgguccgcaucauccuggaccucaucgccaccgaccggaucagcguggagguggucggccaggccggcgagaacuacguguucgugugcuccgaccaguucaacuacaccaccgcccugcacaacagcacguucuucucccugaacagccagcucuacugcuucaccaacaacaccuaccuggggauccugcccccggaccucaccgacuucacggucuaccgcaccggccaguucuacgcgaacggguaccugcugggcacccuccccaucaccgugaacuacgugcggcuguaccgcgggcagcuguccgccaacagcgcccacuucgcccucgccaaccugacggacacccugaucacccucaccaacacgaccaucucccagaucaccuacugcgacaagagcgucguggacuccaucgcgugccagcggagcucccaccagguggaggacggcuucuacagcgaccccaagagcgccguccgcgcccggcagcgcaccaucgugacgcugcccaagcugccggagcucgaggugguccagcugaacaucuccgcccacauggacuucggcgaggcccggcuggacagcgugaccaucaacgggaacaccuccuacugcgugaccaagcccuacuuccgccucgagacgaacuuccugugccggggcugcaccaugaaccugcgcaccgacacgugcagcuucgaccucuccgcggucaacaacgggaugagcuucucccaguucugccugagcaccgaguccggcgccugcgagaugaagaucaucgugaccuacguguggaacuaccugcugcggcagcgccucuacgucaccgccguggagggccagacccacaccgggacgaccagcguccacgccaccgacaccuccagcgugaucacggacgugugcaccgacuacaccaucuacggcgucuccgggaccggcaucaucaagcccagcgaccugcugcuccacaacgggaucgccuucacgucccccaccggcgagcuguacgcguucaagaacaucaccaccggcaagacgcuccaggugcugccgugcgagacccccagccagcugaucgugaucaacaacaccgucgugggggccaucaccuccagcaacuccacggagaacaaccgguucaccaccaccaucgugacgcccaccuucuucuacagcaccaacgccaccacgcugaacugcaccaagcccguccucagcuacggcccgaucuccgugugcagcgacggggccaucgccggcaccuccacccugcagaacacgcgccccagcaucgugucccuguacgacggggagaucgagauccccagcgcguucucccucagcguccagaccgaguaccuccaggugcaggccgagcaggucaucguggacugcccccaguacgugugcaacggcaacucccgcugccugcagcugcuggcccaguacaccagcgccugcuccaacaucgagguggcgcugcacagcuccgcccagcucgacagccgggagaucaucuccauguucaagaccagcacgcagucccugcagcuggccaacaucaccaacuucaagggcgacuacaacuucagcagcauccucaccucccgcgucgggggccggagcgccaucgaggaccugcuguucaacaagguggugaccuccgggcucggcacggucgaccaggacuacaagagcugcucccgcaacauggccaucgcggaccuggugugcagccaguacuacaacgggaucauggugcugccgggcgucguggacgccgagaagauggccauguacaccggcucccucaccggggccaugguguucggcgggcugaccgccgcggccgccauccccuucgccaccgccguccaggcgcggcugaacuacguggcccuccagacgaacgugcugcaggagaaccagaagauccuggccgagagcuucaaccaggccgucggcaacaucucccucgcgcugagcuccgugaacgacgccauccagcagaccagcgaggcccugaacaccguggccaucgccaucaagaagauccagaccgucgugaaccagcagggcgaggcgcucucccaccugacggcccagcugagcaacaacuuccaggccaucuccaccagcauccaggacaucuacaaccgccucgagccgcccgaggccaaccagcaggucgaccggcugaucaacgggcgccuggccgcgcucaacgccuacgugacccagcugcugaaccagaugucccagauccggcagagccgccuccuggcccagcagaagaucaacgagugcgugaagucccagagcccccgguacggcuucugcgggaacggcacccacaucuucagccugacgcagaccgcccccaacgggaucuucuucaugcacgccgugcucguccccaacaaguucacccgcgugaacgcguccgccggcaucugcguggacaacacccggggcuacagccugcagccgcagcugauccucuaccaguucaacaacuccuggcgcgucacgccccggaacauguacgagccccgccugccccggcaggccgacuucauccagcugaccgacugcagcgugaccuucuacaacaccacggccgcgaaccucccgaacaucauccccgacgugaucgacgucaaccagaccguguccgacaucaucgacaaccugcccaccgccacgcccccgcagugggacguggggaucuacaacaacaccauccugaaccucaccgucgagaucaacgaccugcaggagcgcagcaagaaccugucccagaucgccgaccggcuccagaacuacaucgacaaccugaacaacacccugguggaccucgaguggcugaaccgcguggagaccuaccugaaguggcccugguacaucuggcucgccaucgcccuggcgcugaucgccuucgucacgauccucaucaccaucuuccugugcaccggcugcugcgggggcugcuucgggugcugcggcggcugcuucgggcuguucagcaagaagaagcgcuacaccgacgaccagcccacgcccuccuucaaguucaaggaguggugaggacuagucccuguucccagagcccacuuuuuuuucuuuuuuugaaauaaaauagccugucuuucagaucucaaaggcucuuuucagagccaccaaaaaaaaaaaaaaaaaaaaaaaaaaaaaaaaaaaaaaaaaaaaaaaaaaaaaaaaaaaaaaaaaaaaaaaaaaaaaaaaaaaaaaaaaaaaaaaaaaaaa

SEQ ID NO: 15076 - RNA, 3554 nt, Artificial Sequence
  PDCoV/Swine/Thailand/S5011/2015__AMN91621.1 spike protein mRNA gc (variant)
aggagagucccgcagucggcguccagcggcucugcuuguucgugugugugucguugcaggccuuauucaagcuuaccaugcagcgcgcccugcucaucaugacccugcugugccucgcccgggcgaaguucgccgacgaccugcuggaccuccugaccuuccccggcgcccaccgcuuccugcacaagccgacgcggaacgacagcauccucuacucccgcgccaacaacaacuucgacguggggguccugcccggcuaccccaccaagaacgugaaccuguucagcccccucaccaacuccacccugccgaucaacgggcugcaccggagcuaccagccccucaugcugaacugccugacgaagaucaccaaccagacccucuccauguaccugcagcccagcgagauccagaccuacuccugcggcggggccauggugaaguaccagacgcacgacgcgguccgcaucauccuggaccucaucgccaccgaccggaucagcguggagguggucggccaggccggcgagaacuacguguucgugugcuccgaccaguucaacuacaccaccgcccugcacaacagcacguucuucucccugaacagccagcucuacugcuucaccaacaacaccuaccuggggauccugcccccggaccucaccgacuucacggucuaccgcaccggccaguucuacgcgaacggguaccugcugggcacccuccccaucaccgugaacuacgugcggcuguaccgcgggcagcuguccgccaacagcgcccacuucgcccucgccaaccugacggacacccugaucacccucaccaacacgaccaucucccagaucaccuacugcgacaagagcgucguggacuccaucgcgugccagcggagcucccaccagguggaggacggcuucuacagcgaccccaagagcgccguccgcgcccggcagcgcaccaucgugacgcugcccaagcugccggagcucgaggugguccagcugaacaucuccgcccacauggacuucggcgaggcccggcuggacagcgugaccaucaacgggaacaccuccuacugcgugaccaagcccuacuuccgccucgagacgaacuuccugugccggggcugcaccaugaaccugcgcaccgacacgugcagcuucgaccucuccgcggucaacaacgggaugagcuucucccaguucugccugagcaccgaguccggcgccugcgagaugaagaucaucgugaccuacguguggaacuaccugcugcggcagcgccucuacgucaccgccguggagggccagacccacaccgggacgaccagcguccacgccaccgacaccuccagcgugaucacggacgugugcaccgacuacaccaucuacggcgucuccgggaccggcaucaucaagcccagcgaccugcugcuccacaacgggaucgccuucacgucccccaccggcgagcuguacgcguucaagaacaucaccaccggcaagacgcuccaggugcugccgugcgagacccccagccagcugaucgugaucaacaacaccgucgugggggccaucaccuccagcaacuccacggagaacaaccgguucaccaccaccaucgugacgcccaccuucuucuacagcaccaacgccaccacgcugaacugcaccaagcccguccucagcuacggcccgaucuccgugugcagcgacggggccaucgccggcaccuccacccugcagaacacgcgccccagcaucgugucccuguacgacggggagaucgagauccccagcgcguucucccucagcguccagaccgaguaccuccaggugcaggccgagcaggucaucguggacugcccccaguacgugugcaacggcaacucccgcugccugcagcugcuggcccaguacaccagcgccugcuccaacaucgagguggcgcugcacagcuccgcccagcucgacagccgggagaucaucuccauguucaagaccagcacgcagucccugcagcuggccaacaucaccaacuucaagggcgacuacaacuucagcagcauccucaccucccgcgucgggggccggagcgccaucgaggaccugcuguucaacaagguggugaccuccgggcucggcacggucgaccaggacuacaagagcugcucccgcaacauggccaucgcggaccuggugugcagccaguacuacaacgggaucauggugcugccgggcgucguggacgccgagaagauggccauguacaccggcucccucaccggggccaugguguucggcgggcugaccgccgcggccgccauccccuucgccaccgccguccaggcgcggcugaacuacguggcccuccagacgaacgugcugcaggagaaccagaagauccuggccgagagcuucaaccaggccgucggcaacaucucccucgcgcugagcuccgugaacgacgccauccagcagaccagcgaggcccugaacaccguggccaucgccaucaagaagauccagaccgucgugaaccagcagggcgaggcgcucucccaccugacggcccagcugagcaacaacuuccaggccaucuccaccagcauccaggacaucuacaaccgccucgagccgcccgaggccaaccagcaggucgaccggcugaucaacgggcgccuggccgcgcucaacgccuacgugacccagcugcugaaccagaugucccagauccggcagagccgccuccuggcccagcagaagaucaacgagugcgugaagucccagagcccccgguacggcuucugcgggaacggcacccacaucuucagccugacgcagaccgcccccaacgggaucuucuucaugcacgccgugcucguccccaacaaguucacccgcgugaacgcguccgccggcaucugcguggacaacacccggggcuacagccugcagccgcagcugauccucuaccaguucaacaacuccuggcgcgucacgccccggaacauguacgagccccgccugccccggcaggccgacuucauccagcugaccgacugcagcgugaccuucuacaacaccacggccgcgaaccucccgaacaucauccccgacgugaucgacgucaaccagaccguguccgacaucaucgacaaccugcccaccgccacgcccccgcagugggacguggggaucuacaacaacaccauccugaaccucaccgucgagaucaacgaccugcaggagcgcagcaagaaccugucccagaucgccgaccggcuccagaacuacaucgacaaccugaacaacacccugguggaccucgaguggcugaaccgcguggagaccugaggacuagucccuguucccagagcccacuuuuuuuucuuuuuuugaaauaaaauagccugucuuucagaucucaaaggcucuuuucagagccaccaaaaaaaaaaaaaaaaaaaaaaaaaaaaaaaaaaaaaaaaaaaaaaaaaaaaaaaaaaaaaaaaaaaaaaaaaaaaaaaaaaaaaaaaaaaaaaaaaaaaa

SEQ ID NO: 15077 - RNA, 3635 nt, Artificial Sequence
  PDCoV/Swine/Thailand/S5011/2015__AMN91621.1 spike protein mRNA gc (variant)
aggagagucccgcagucggcguccagcggcucugcuuguucgugugugugucguugcaggccuuauucaagcuuaccaugcagcgcgcccugcucaucaugacccugcugugccucgcccgggccaaguucgccgacgaccugcuggaccuccugaccuuccccggcgcccaccgcuuccugcacaagccgacgcggaacgacagcauccucuacucccgcgccaacaacaacuucgacguggggguccugcccggcuaccccaccaagaacgugaaccuguucagcccccucaccaacuccacccugccgaucaacgggcugcaccggagcuaccagccccucaugcugaacugccugacgaagaucaccaaccagacccucuccauguaccugcagcccagcgagauccagaccuacuccugcggcggggccauggugaaguaccagacgcacgacgcgguccgcaucauccuggaccucaucgccaccgaccggaucagcguggagguggucggccaggccggcgagaacuacguguucgugugcuccgaccaguucaacuacaccaccgcccugcacaacagcacguucuucucccugaacagccagcucuacugcuucaccaacaacaccuaccuggggauccugcccccggaccucaccgacuucacggucuaccgcaccggccaguucuacgcgaacggguaccugcugggcacccuccccaucaccgugaacuacgugcggcuguaccgcgggcagcuguccgccaacagcgcccacuucgcccucgccaaccugacggacacccugaucacccucaccaacacgaccaucucccagaucaccuacugcgacaagagcgucguggacuccaucgcgugccagcggagcucccaccagguggaggacggcuucuacagcgaccccaagagcgccguccgcgcccggcagcgcaccaucgugacgcugcccaagcugccggagcucgaggugguccagcugaacaucuccgcccacauggacuucggcgaggcccggcuggacagcgugaccaucaacgggaacaccuccuacugcgugaccaagcccuacuuccgccucgagacgaacuuccugugccggggcugcaccaugaaccugcgcaccgacacgugcagcuucgaccucuccgcggucaacaacgggaugagcuucucccaguucugccugagcaccgaguccggcgccugcgagaugaagaucaucgugaccuacguguggaacuaccugcugcggcagcgccucuacgucaccgccguggagggccagacccacaccgggacgaccagcguccacgccaccgacaccuccagcgugaucacggacgugugcaccgacuacaccaucuacggcgucuccgggaccggcaucaucaagcccagcgaccugcugcuccacaacgggaucgccuucacgucccccaccggcgagcuguacgcguucaagaacaucaccaccggcaagacgcuccaggugcugccgugcgagacccccagccagcugaucgugaucaacaacaccgucgugggggccaucaccuccagcaacuccacggagaacaaccgguucaccaccaccaucgugacgcccaccuucuucuacagcaccaacgccaccacgcugaacugcaccaagcccguccucagcuacggcccgaucuccgugugcagcgacggggccaucgccggcaccuccacccugcagaacacgcgccccagcaucgugucccuguacgacggggagaucgagauccccagcgcguucucccucagcguccagaccgaguaccuccaggugcaggccgagcaggucaucguggacugcccccaguacgugugcaacggcaacucccgcugccugcagcugcuggcccaguacaccagcgccugcuccaacaucgagguggcgcugcacagcuccgcccagcucgacagccgggagaucaucuccauguucaagaccagcacgcagucccugcagcuggccaacaucaccaacuucaagggcgacuacaacuucagcagcauccucaccucccgcgucgggggccggagcgccaucgaggaccugcuguucaacaagguggugaccuccgggcucggcacggucgaccaggacuacaagagcugcucccgcaacauggccaucgcggaccuggugugcagccaguacuacaacgggaucauggugcugccgggcgucguggacgccgagaagauggccauguacaccggcucccucaccggggccaugguguucggcgggcugaccgccgcggccgccauccccuucgccaccgccguccaggcgcggcugaacuacguggcccuccagacgaacgugcugcaggagaaccagaagauccuggccgagagcuucaaccaggccgucggcaacaucucccucgcgcugagcuccgugaacgacgccauccagcagaccagcgaggcccugaacaccguggccaucgccaucaagaagauccagaccgucgugaaccagcagggcgaggcgcucucccaccugacggcccagcugagcaacaacuuccaggccaucuccaccagcauccaggacaucuacaaccgccucgagccgcccgaggccaaccagcaggucgaccggcugaucaacgggcgccuggccgcgcucaacgccuacgugacccagcugcugaaccagaugucccagauccggcagagccgccuccuggcccagcagaagaucaacgagugcgugaagucccagagcccccgguacggcuucugcgggaacggcacccacaucuucagccugacgcagaccgcccccaacgggaucuucuucaugcacgccgugcucguccccaacaaguucacccgcgugaacgcguccgccggcaucugcguggacaacacccggggcuacagccugcagccgcagcugauccucuaccaguucaacaacuccuggcgcgucacgccccggaacauguacgagccccgccugccccggcaggccgacuucauccagcugaccgacugcagcgugaccuucuacaacaccacggccgcgaaccucccgaacaucauccccgacgugaucgacgucaaccagaccguguccgacaucaucgacaaccugcccaccgccacgcccccgcagugggacguggggaucuacaacaacaccauccugaaccucaccgucgagaucaacgaccugcaggagcgcagcaagaaccugucccagaucgccgaccggcuccagaacuacaucgacaaccugaacaacacccugguggaccucgaguggcugaaccgcguggagaccggcggguacauccccgaggcgccccgcgacggccaggccuacguccggaaggacggggagugggugcugcucagcacguucugaggacuagucccuguucccagagcccacuuuuuuuucuuuuuuugaaauaaaauagccugucuuucagaucucaaaggcucuuuucagagccaccaaaaaaaaaaaaaaaaaaaaaaaaaaaaaaaaaaaaaaaaaaaaaaaaaaaaaaaaaaaaaaaaaaaaaaaaaaaaaaaaaaaaaaaaaaaaaaaaaaaaa

SEQ ID NO: 15078 - RNA, 4433 nt, Artificial Sequence
  PEDV/NPL-PEDv/2013/P10__AHZ94887.1 spike protein mRNA gc (1-1386)
aggagagucccgcagucggcguccagcggcucugcuuguucgugugugugucguugcaggccuuauucaagcuuaccaugaagucccugaccuacuucuggcuguuccugcccgugcugagcacccucagccugccgcaggacgucacgcgcugcuccgccaacaccaacuuccggcgcuucuucagcaaguucaacgugcaggcccccgcgguggucgugcugggcggguaccuccccaucggcgagaaccagggggugaacuccaccugguacugcgccggccagcaccccaccgccagcgggguccacggcaucuucgugucccacauccggggcgggcacggcuucgagaucgggaucagccaggagccguucgaccccuccggcuaccagcuguaccugcacaaggccacgaacgggaacaccaacgccaccgcgcgccuccggaucugccaguuccccagcaucaagacccugggccccacggccaacaacgacgugaccaccggccgcaacugccuguucaacaaggccaucccggcccacauguccgagcacagcgucguggggaucaccugggacaacgaccgggugacggucuucuccgacaagaucuacuacuucuacuucaagaacgacuggagccgcguggcgaccaagugcuacaacuccggcgggugcgccaugcaguacguguacgagcccaccuacuacaugcucaacgucaccagcgccggcgaggacggcaucuccuaccagcccugcacggccaacugcaucggguacgccgcgaacguguucgccaccgagcccaacggccacaucccggagggguucagcuucaacaacugguuccugcuguccaacgacagcacccucgugcacggcaaggucgugagcaaccagccccugcuggugaacugccuccuggccauccccaagaucuacgggcugggccaguucuucuccuucaaccagaccaucgacggcgucugcaacggggccgccgugcagcgggcgcccgaggcccuccgcuucaacaucaacgacaucagcgugauccuggccgagggcuccaucguccugcacacggcccucgggaccaacuucagcuucgugugcuccaacagcuccaacccgcaccuggccaccuucgcgaucccccugggcgccacccagguccccuacuacugcuucuucaagguggacacguacaacagcaccguguacaaguuccucgccguccugcccccgaccgugcgggagaucgugaucaccaaguacggggacgucuacgugaacggcuucggcuaccugcaccucgggcugcuggacgccgugacgaucaacuucaccggccacgggaccgacgacgacgucuccggcuucuggaccaucgccagcacgaacuucguggacgcgcucaucgaggugcaggggaccgccauccagcgcauccuguacugcgacgaccccgucucccagcugaagugcagccagguggccuucgaccucgacgacggcuucuacaccaucuccagccggaaccugcugucccacgagcagcccaucagcuucgugacccuccccuccuucaacgaccacagcuucgucaacaucacgguguccgccagcuucggcgggcacagcggcgcgaaccugaucgccuccgacaccaccaucaacggguucagcuccuucugcguggacacccgccaguucaccaucagccuguucuacaacgucacgaacuccuacggcuacgugagcaagucccaggacagcaacugcccguucacccuccaguccgugaacgacuaccugagcuucuccaaguucugcgucagcaccucccugcucgccagcgccugcaccaucgaccuguucggcuaccccgaguucggguccggcgugaaguucacgagccuguacuuccaguucaccaagggggagcugaucaccggcacccccaagccccucgagggggugacggacgucuccuucaugacccuggacgugugcaccaaguacaccaucuacggcuucaagggcgaggggaucaucacgcugaccaacagcagcuuccucgccggcguguacuacaccuccgacagcgggcagcugcuggcguucaagaacgucaccuccggcgccguguacagcgugacgccgugcuccuucagcgagcaggccgccuacgucgacgacgacaucgugggggugaucuccagccucuccagcuccaccuucaacagcacccgggagcugcccggcuucuucuaccacuccaacgacggcagcaacugcaccgagcccguccugguguacuccaacaucggggugugcaagagcggcuccaucggguacgucccgagccaguccggccaggugaagaucgcccccacggugaccgggaacaucagcauccccaccaacuucagcauguccauccgcaccgaguaccuccagcuguacaacacgcccgucagcguggacugcgcgaccuacgugugcaacggcaacucccggugcaagcagcugcucacccaguacaccgccgccugcaagacgaucgagagcgcccugcagcuguccgcccgccucgagagcgucgaggugaacuccaugcugaccaucagcgacgaggcgcugcagcucgccaccaucuccagcuucaacggcgacggguacaacuucaccaacgugcugggcgucuccguguacgacccggccagccggcgcgugguccagaagcgguccuucaucgaggaccuccucuucaacaagguggugacgaacgggcugggcaccgucgacgaggacuacaagcgcugcagcaacgggcgcuccguggccgaccuggucugcgcgcaguacuacagcggcgugauggugcuccccggcgucguggacgccgagaagcugcacauguacuccgccagccugaucgggggcauggugcucgggggcuucaccuccgccgccgcgcugcccuucagcuacgccguccaggcccggcugaacuaccucgcccugcagaccgacgugcugcagcgcaaccagcagcuccuggccgagagcuucaacuccgcgaucggcaacaucacgagcgccuucgaguccgugaaggaggccaucagccagaccuccaaggggcugaacaccgucgcccacgcccucaccaaggugcaggagguggucaacagccagggcgcggcccugacccagcugacggugcagcuccagcacaacuuccaggccaucuccagcuccaucgacgacaucuacagccggcuggacauccuguccgccgacgcccagguggaccgccucaucaccgggcggcugagcgcccugaacgccuucgucgcccagacccucaccaaguacacggaggugcaggccucccgcaagcuggcgcagcagaaggugaacgagugcgucaagagccagucccagcgguacggcuucugcgggggcgacggcgagcacaucuucagccuggugcaggccgcgccccaggggcuccuguuccugcacaccgugcucgucccguccgacuucguggacgugaucgccaucgccggccugugcgucaacgacgagaucgcgcugacccuccgcgagcccgggcuggugcuguucacccacgagcuccagaaccacacggccaccgaguacuucgugagcucccggcgcauguucgagccccggaagcccaccgucagcgacuucgugcagaucgagagcugcguggucaccuacgugaaccugacgcgcgaccagcugccggacgugauccccgacuacaucgacgucaacaagacccucuacgagauccuggccucccugcccaaccggaccggccccagccucccgcuggacguguucaacgccaccuaccugaaccucacgggggagaucgccgaccuggagcagcgcuccgagagccugcggaacaccaccgaggagcuccagucccugaucuacaacaucaacaacacccugguggaccucgaguggcugaaccgcgucgagacguacaucaaguggcccugguggguguggcugaucaucuucaucgugcucaucuucgucgugagccugcugguguucugcugcaucuccaccggcugcugcggcugcugcgggugcugcugcgcgugcuucagcggcugcugccgggggccccgccuccagcccuacgaggucuucgagaaggugcacgugcagugaggacuagucccuguucccagagcccacuuuuuuuucuuuuuuugaaauaaaauagccugucuuucagaucucaaaggcucuuuucagagccaccaaaaaaaaaaaaaaaaaaaaaaaaaaaaaaaaaaaaaaaaaaaaaaaaaaaaaaaaaaaaaaaaaaaaaaaaaaaaaaaaaaaaaaaaaaaaaaaaaaaaa

SEQ ID NO: 15079 - RNA, 4433 nt, Artificial Sequence
  PEDV/NPL-PEDv/2013/P10__AHZ94887.1 spike protein mRNA gc (1-1386)(I1076P_L1077P)
aggagagucccgcagucggcguccagcggcucugcuuguucgugugugugucguugcaggccuuauucaagcuuaccaugaagucccugaccuacuucuggcuguuccugcccgugcugagcacccucagccugccgcaggacgucacgcgcugcuccgccaacaccaacuuccggcgcuucuucagcaaguucaacgugcaggcccccgcgguggucgugcugggcggguaccuccccaucggcgagaaccagggggugaacuccaccugguacugcgccggccagcaccccaccgccagcgggguccacggcaucuucgugucccacauccggggcgggcacggcuucgagaucgggaucagccaggagccguucgaccccuccggcuaccagcuguaccugcacaaggccacgaacgggaacaccaacgccaccgcgcgccuccggaucugccaguuccccagcaucaagacccugggccccacggccaacaacgacgugaccaccggccgcaacugccuguucaacaaggccaucccggcccacauguccgagcacagcgucguggggaucaccugggacaacgaccgggugacggucuucuccgacaagaucuacuacuucuacuucaagaacgacuggagccgcguggcgaccaagugcuacaacuccggcgggugcgccaugcaguacguguacgagcccaccuacuacaugcucaacgucaccagcgccggcgaggacggcaucuccuaccagcccugcacggccaacugcaucggguacgccgcgaacguguucgccaccgagcccaacggccacaucccggagggguucagcuucaacaacugguuccugcuguccaacgacagcacccucgugcacggcaaggucgugagcaaccagccccugcuggugaacugccuccuggccauccccaagaucuacgggcugggccaguucuucuccuucaaccagaccaucgacggcgucugcaacggggccgccgugcagcgggcgcccgaggcccuccgcuucaacaucaacgacaucagcgugauccuggccgagggcuccaucguccugcacacggcccucgggaccaacuucagcuucgugugcuccaacagcuccaacccgcaccuggccaccuucgcgaucccccugggcgccacccagguccccuacuacugcuucuucaagguggacacguacaacagcaccguguacaaguuccucgccguccugcccccgaccgugcgggagaucgugaucaccaaguacggggacgucuacgugaacggcuucggcuaccugcaccucgggcugcuggacgccgugacgaucaacuucaccggccacgggaccgacgacgacgucuccggcuucuggaccaucgccagcacgaacuucguggacgcgcucaucgaggugcaggggaccgccauccagcgcauccuguacugcgacgaccccgucucccagcugaagugcagccagguggccuucgaccucgacgacggcuucuacaccaucuccagccggaaccugcugucccacgagcagcccaucagcuucgugacccuccccuccuucaacgaccacagcuucgucaacaucacgguguccgccagcuucggcgggcacagcggcgcgaaccugaucgccuccgacaccaccaucaacggguucagcuccuucugcguggacacccgccaguucaccaucagccuguucuacaacgucacgaacuccuacggcuacgugagcaagucccaggacagcaacugcccguucacccuccaguccgugaacgacuaccugagcuucuccaaguucugcgucagcaccucccugcucgccagcgccugcaccaucgaccuguucggcuaccccgaguucggguccggcgugaaguucacgagccuguacuuccaguucaccaagggggagcugaucaccggcacccccaagccccucgagggggugacggacgucuccuucaugacccuggacgugugcaccaaguacaccaucuacggcuucaagggcgaggggaucaucacgcugaccaacagcagcuuccucgccggcguguacuacaccuccgacagcgggcagcugcuggcguucaagaacgucaccuccggcgccguguacagcgugacgccgugcuccuucagcgagcaggccgccuacgucgacgacgacaucgugggggugaucuccagccucuccagcuccaccuucaacagcacccgggagcugcccggcuucuucuaccacuccaacgacggcagcaacugcaccgagcccguccugguguacuccaacaucggggugugcaagagcggcuccaucggguacgucccgagccaguccggccaggugaagaucgcccccacggugaccgggaacaucagcauccccaccaacuucagcauguccauccgcaccgaguaccuccagcuguacaacacgcccgucagcguggacugcgcgaccuacgugugcaacggcaacucccggugcaagcagcugcucacccaguacaccgccgccugcaagacgaucgagagcgcccugcagcuguccgcccgccucgagagcgucgaggugaacuccaugcugaccaucagcgacgaggcgcugcagcucgccaccaucuccagcuucaacggcgacggguacaacuucaccaacgugcugggcgucuccguguacgacccggccagccggcgcgugguccagaagcgguccuucaucgaggaccuccucuucaacaagguggugacgaacgggcugggcaccgucgacgaggacuacaagcgcugcagcaacgggcgcuccguggccgaccuggucugcgcgcaguacuacagcggcgugauggugcuccccggcgucguggacgccgagaagcugcacauguacuccgccagccugaucgggggcauggugcucgggggcuucaccuccgccgccgcgcugcccuucagcuacgccguccaggcccggcugaacuaccucgcccugcagaccgacgugcugcagcgcaaccagcagcuccuggccgagagcuucaacuccgcgaucggcaacaucacgagcgccuucgaguccgugaaggaggccaucagccagaccuccaaggggcugaacaccgucgcccacgcccucaccaaggugcaggagguggucaacagccagggcgcggcccugacccagcugacggugcagcuccagcacaacuuccaggccaucuccagcuccaucgacgacaucuacagccggcuggacccgcccuccgccgacgcccagguggaccgccugaucaccgggcggcucagcgcccugaacgccuucgucgcccagacccugaccaaguacacggaggugcaggccucccgcaagcucgcgcagcagaaggugaacgagugcgucaagagccagucccagcgguacggcuucugcgggggcgacggcgagcacaucuucagccuggugcaggccgcgccccaggggcuccuguuccugcacaccgugcugguccccuccgacuucguggacgugaucgccaucgccggccucugcgucaacgacgagaucgcgcugacccugcgcgagcccgggcucgugcuguucacccacgagcugcagaaccacacggccaccgaguacuucgugagcucccggcgcauguucgagccgcggaagcccaccgucagcgacuucgugcagaucgagagcugcguggucaccuacgugaaccucacgcgcgaccagcugcccgacgugauccccgacuacaucgacgucaacaagacccuguacgagauccucgccucccugccgaaccggaccggccccagccugccccucgacguguucaacgccaccuaccugaaccugacgggggagaucgccgaccucgagcagcgcuccgagagccugcggaacaccaccgaggagcugcagucccucaucuacaacaucaacaacacccugguggaccuggaguggcucaaccgcgucgagacguacaucaaguggcccugguggguguggcugaucaucuucaucgugcugaucuucgucgugagccuccugguguucugcugcaucuccaccggcugcugcggcugcugcgggugcugcugcgcgugcuucagcggcugcugccgggggccgcgccugcagcccuacgaggucuucgagaaggugcacgugcagugaggacuagucccuguucccagagcccacuuuuuuuucuuuuuuugaaauaaaauagccugucuuucagaucucaaaggcucuuuucagagccaccaaaaaaaaaaaaaaaaaaaaaaaaaaaaaaaaaaaaaaaaaaaaaaaaaaaaaaaaaaaaaaaaaaaaaaaaaaaaaaaaaaaaaaaaaaaaaaaaaaaaa

SEQ ID NO: 15080 - RNA, 4241 nt, Artificial Sequence
  PEDV/NPL-PEDv/2013/P10__AHZ94887.1 spike protein mRNA gc (variant)
aggagagucccgcagucggcguccagcggcucugcuuguucgugugugugucguugcaggccuuauucaagcuuaccaugaagucccugaccuacuucuggcuguuccugcccgugcugagcacccucagccugccgcaggacgucacgcgcugcuccgccaacaccaacuuccggcgcuucuucagcaaguucaacgugcaggcccccgcgguggucgugcugggcggguaccuccccaucggcgagaaccagggggugaacuccaccugguacugcgccggccagcaccccaccgccagcgggguccacggcaucuucgugucccacauccggggcgggcacggcuucgagaucgggaucagccaggagccguucgaccccuccggcuaccagcuguaccugcacaaggccacgaacgggaacaccaacgccaccgcgcgccuccggaucugccaguuccccagcaucaagacccugggccccacggccaacaacgacgugaccaccggccgcaacugccuguucaacaaggccaucccggcccacauguccgagcacagcgucguggggaucaccugggacaacgaccgggugacggucuucuccgacaagaucuacuacuucuacuucaagaacgacuggagccgcguggcgaccaagugcuacaacuccggcgggugcgccaugcaguacguguacgagcccaccuacuacaugcucaacgucaccagcgccggcgaggacggcaucuccuaccagcccugcacggccaacugcaucggguacgccgcgaacguguucgccaccgagcccaacggccacaucccggagggguucagcuucaacaacugguuccugcuguccaacgacagcacccucgugcacggcaaggucgugagcaaccagccccugcuggugaacugccuccuggccauccccaagaucuacgggcugggccaguucuucuccuucaaccagaccaucgacggcgucugcaacggggccgccgugcagcgggcgcccgaggcccuccgcuucaacaucaacgacaucagcgugauccuggccgagggcuccaucguccugcacacggcccucgggaccaacuucagcuucgugugcuccaacagcuccaacccgcaccuggccaccuucgcgaucccccugggcgccacccagguccccuacuacugcuucuucaagguggacacguacaacagcaccguguacaaguuccucgccguccugcccccgaccgugcgggagaucgugaucaccaaguacggggacgucuacgugaacggcuucggcuaccugcaccucgggcugcuggacgccgugacgaucaacuucaccggccacgggaccgacgacgacgucuccggcuucuggaccaucgccagcacgaacuucguggacgcgcucaucgaggugcaggggaccgccauccagcgcauccuguacugcgacgaccccgucucccagcugaagugcagccagguggccuucgaccucgacgacggcuucuacaccaucuccagccggaaccugcugucccacgagcagcccaucagcuucgugacccuccccuccuucaacgaccacagcuucgucaacaucacgguguccgccagcuucggcgggcacagcggcgcgaaccugaucgccuccgacaccaccaucaacggguucagcuccuucugcguggacacccgccaguucaccaucagccuguucuacaacgucacgaacuccuacggcuacgugagcaagucccaggacagcaacugcccguucacccuccaguccgugaacgacuaccugagcuucuccaaguucugcgucagcaccucccugcucgccagcgccugcaccaucgaccuguucggcuaccccgaguucggguccggcgugaaguucacgagccuguacuuccaguucaccaagggggagcugaucaccggcacccccaagccccucgagggggugacggacgucuccuucaugacccuggacgugugcaccaaguacaccaucuacggcuucaagggcgaggggaucaucacgcugaccaacagcagcuuccucgccggcguguacuacaccuccgacagcgggcagcugcuggcguucaagaacgucaccuccggcgccguguacagcgugacgccgugcuccuucagcgagcaggccgccuacgucgacgacgacaucgugggggugaucuccagccucuccagcuccaccuucaacagcacccgggagcugcccggcuucuucuaccacuccaacgacggcagcaacugcaccgagcccguccugguguacuccaacaucggggugugcaagagcggcuccaucggguacgucccgagccaguccggccaggugaagaucgcccccacggugaccgggaacaucagcauccccaccaacuucagcauguccauccgcaccgaguaccuccagcuguacaacacgcccgucagcguggacugcgcgaccuacgugugcaacggcaacucccggugcaagcagcugcucacccaguacaccgccgccugcaagacgaucgagagcgcccugcagcuguccgcccgccucgagagcgucgaggugaacuccaugcugaccaucagcgacgaggcgcugcagcucgccaccaucuccagcuucaacggcgacggguacaacuucaccaacgugcugggcgucuccguguacgacccggccagccggcgcgugguccagaagcgguccuucaucgaggaccuccucuucaacaagguggugacgaacgggcugggcaccgucgacgaggacuacaagcgcugcagcaacgggcgcuccguggccgaccuggucugcgcgcaguacuacagcggcgugauggugcuccccggcgucguggacgccgagaagcugcacauguacuccgccagccugaucgggggcauggugcucgggggcuucaccuccgccgccgcgcugcccuucagcuacgccguccaggcccggcugaacuaccucgcccugcagaccgacgugcugcagcgcaaccagcagcuccuggccgagagcuucaacuccgcgaucggcaacaucacgagcgccuucgaguccgugaaggaggccaucagccagaccuccaaggggcugaacaccgucgcccacgcccucaccaaggugcaggagguggucaacagccagggcgcggcccugacccagcugacggugcagcuccagcacaacuuccaggccaucuccagcuccaucgacgacaucuacagccggcuggacccgcccuccgccgacgcccagguggaccgccugaucaccgggcggcucagcgcccugaacgccuucgucgcccagacccugaccaaguacacggaggugcaggccucccgcaagcucgcgcagcagaaggugaacgagugcgucaagagccagucccagcgguacggcuucugcgggggcgacggcgagcacaucuucagccuggugcaggccgcgccccaggggcuccuguuccugcacaccgugcugguccccuccgacuucguggacgugaucgccaucgccggccucugcgucaacgacgagaucgcgcugacccugcgcgagcccgggcucgugcuguucacccacgagcugcagaaccacacggccaccgaguacuucgugagcucccggcgcauguucgagccgcggaagcccaccgucagcgacuucgugcagaucgagagcugcguggucaccuacgugaaccucacgcgcgaccagcugcccgacgugauccccgacuacaucgacgucaacaagacccuguacgagauccucgccucccugccgaaccggaccggccccagccugccccucgacguguucaacgccaccuaccugaaccugacgggggagaucgccgaccucgagcagcgcuccgagagccugcggaacaccaccgaggagcugcagucccucaucuacaacaucaacaacacccugguggaccuggaguggcucaaccgcgucgagacgugaggacuagucccuguucccagagcccacuuuuuuuucuuuuuuugaaauaaaauagccugucuuucagaucucaaaggcucuuuucagagccaccaaaaaaaaaaaaaaaaaaaaaaaaaaaaaaaaaaaaaaaaaaaaaaaaaaaaaaaaaaaaaaaaaaaaaaaaaaaaaaaaaaaaaaaaaaaaaaaaaaaaa

SEQ ID NO: 15081 - RNA, 4322 nt, Artificial Sequence
  PEDV/NPL-PEDv/2013/P10__AHZ94887.1 spike protein mRNA gc (variant)
aggagagucccgcagucggcguccagcggcucugcuuguucgugugugugucguugcaggccuuauucaagcuuaccaugaagucccugaccuacuucuggcuguuccugcccgugcugagcacccucagccugccgcaggacgucacgcgcugcuccgccaacaccaacuuccggcgcuucuucagcaaguucaacgugcaggcccccgcgguggucgugcugggcggguaccuccccaucggcgagaaccagggggugaacuccaccugguacugcgccggccagcaccccaccgccagcgggguccacggcaucuucgugucccacauccggggcgggcacggcuucgagaucgggaucagccaggagccguucgaccccuccggcuaccagcuguaccugcacaaggccacgaacgggaacaccaacgccaccgcgcgccuccggaucugccaguuccccagcaucaagacccugggccccacggccaacaacgacgugaccaccggccgcaacugccuguucaacaaggccaucccggcccacauguccgagcacagcgucguggggaucaccugggacaacgaccgggugacggucuucuccgacaagaucuacuacuucuacuucaagaacgacuggagccgcguggcgaccaagugcuacaacuccggcgggugcgccaugcaguacguguacgagcccaccuacuacaugcucaacgucaccagcgccggcgaggacggcaucuccuaccagcccugcacggccaacugcaucggguacgccgcgaacguguucgccaccgagcccaacggccacaucccggagggguucagcuucaacaacugguuccugcuguccaacgacagcacccucgugcacggcaaggucgugagcaaccagccccugcuggugaacugccuccuggccauccccaagaucuacgggcugggccaguucuucuccuucaaccagaccaucgacggcgucugcaacggggccgccgugcagcgggcgcccgaggcccuccgcuucaacaucaacgacaucagcgugauccuggccgagggcuccaucguccugcacacggcccucgggaccaacuucagcuucgugugcuccaacagcuccaacccgcaccuggccaccuucgcgaucccccugggcgccacccagguccccuacuacugcuucuucaagguggacacguacaacagcaccguguacaaguuccucgccguccugcccccgaccgugcgggagaucgugaucaccaaguacggggacgucuacgugaacggcuucggcuaccugcaccucgggcugcuggacgccgugacgaucaacuucaccggccacgggaccgacgacgacgucuccggcuucuggaccaucgccagcacgaacuucguggacgcgcucaucgaggugcaggggaccgccauccagcgcauccuguacugcgacgaccccgucucccagcugaagugcagccagguggccuucgaccucgacgacggcuucuacaccaucuccagccggaaccugcugucccacgagcagcccaucagcuucgugacccuccccuccuucaacgaccacagcuucgucaacaucacgguguccgccagcuucggcgggcacagcggcgcgaaccugaucgccuccgacaccaccaucaacggguucagcuccuucugcguggacacccgccaguucaccaucagccuguucuacaacgucacgaacuccuacggcuacgugagcaagucccaggacagcaacugcccguucacccuccaguccgugaacgacuaccugagcuucuccaaguucugcgucagcaccucccugcucgccagcgccugcaccaucgaccuguucggcuaccccgaguucggguccggcgugaaguucacgagccuguacuuccaguucaccaagggggagcugaucaccggcacccccaagccccucgagggggugacggacgucuccuucaugacccuggacgugugcaccaaguacaccaucuacggcuucaagggcgaggggaucaucacgcugaccaacagcagcuuccucgccggcguguacuacaccuccgacagcgggcagcugcuggcguucaagaacgucaccuccggcgccguguacagcgugacgccgugcuccuucagcgagcaggccgccuacgucgacgacgacaucgugggggugaucuccagccucuccagcuccaccuucaacagcacccgggagcugcccggcuucuucuaccacuccaacgacggcagcaacugcaccgagcccguccugguguacuccaacaucggggugugcaagagcggcuccaucggguacgucccgagccaguccggccaggugaagaucgcccccacggugaccgggaacaucagcauccccaccaacuucagcauguccauccgcaccgaguaccuccagcuguacaacacgcccgucagcguggacugcgcgaccuacgugugcaacggcaacucccggugcaagcagcugcucacccaguacaccgccgccugcaagacgaucgagagcgcccugcagcuguccgcccgccucgagagcgucgaggugaacuccaugcugaccaucagcgacgaggcgcugcagcucgccaccaucuccagcuucaacggcgacggguacaacuucaccaacgugcugggcgucuccguguacgacccggccagccggcgcgugguccagaagcgguccuucaucgaggaccuccucuucaacaagguggugacgaacgggcugggcaccgucgacgaggacuacaagcgcugcagcaacgggcgcuccguggccgaccuggucugcgcgcaguacuacagcggcgugauggugcuccccggcgucguggacgccgagaagcugcacauguacuccgccagccugaucgggggcauggugcucgggggcuucaccuccgccgccgcgcugcccuucagcuacgccguccaggcccggcugaacuaccucgcccugcagaccgacgugcugcagcgcaaccagcagcuccuggccgagagcuucaacuccgcgaucggcaacaucacgagcgccuucgaguccgugaaggaggccaucagccagaccuccaaggggcugaacaccgucgcccacgcccucaccaaggugcaggagguggucaacagccagggcgcggcccugacccagcugacggugcagcuccagcacaacuuccaggccaucuccagcuccaucgacgacaucuacagccggcuggacccgcccuccgccgacgcccagguggaccgccugaucaccgggcggcucagcgcccugaacgccuucgucgcccagacccugaccaaguacacggaggugcaggccucccgcaagcucgcgcagcagaaggugaacgagugcgucaagagccagucccagcgguacggcuucugcgggggcgacggcgagcacaucuucagccuggugcaggccgcgccccaggggcuccuguuccugcacaccgugcugguccccuccgacuucguggacgugaucgccaucgccggccucugcgucaacgacgagaucgcgcugacccugcgcgagcccgggcucgugcuguucacccacgagcugcagaaccacacggccaccgaguacuucgugagcucccggcgcauguucgagccgcggaagcccaccgucagcgacuucgugcagaucgagagcugcguggucaccuacgugaaccucacgcgcgaccagcugcccgacgugauccccgacuacaucgacgucaacaagacccuguacgagauccucgccucccugccgaaccggaccggccccagccugccccucgacguguucaacgccaccuaccugaaccugacgggggagaucgccgaccucgagcagcgcuccgagagccugcggaacaccaccgaggagcugcagucccucaucuacaacaucaacaacacccugguggaccuggaguggcucaaccgcgucgagacgggcggcuacauccccgaggcgccgcgggacgggcaggccuacgugcgcaaggacggcgagugggugcugcugagcaccuucugaggacuagucccuguucccagagcccacuuuuuuuucuuuuuuugaaauaaaauagccugucuuucagaucucaaaggcucuuuucagagccaccaaaaaaaaaaaaaaaaaaaaaaaaaaaaaaaaaaaaaaaaaaaaaaaaaaaaaaaaaaaaaaaaaaaaaaaaaaaaaaaaaaaaaaaaaaaaaaaaaaaaa

SEQ ID NO: 15082 - RNA, 4358 nt, Artificial Sequence
  MHV/S__BAK18575.1 spike protein mRNA gc (1-1361)
aggagagucccgcagucggcguccagcggcucugcuuguucgugugugugucguugcaggccuuauucaagcuuaccaugcugagcguguucauccucuuccugcccuccugccugggcuacaucggggacuuccgcugcaucaaccucgucaacaccgacaccagcaacgccuccgccccgagcguguccacggagguggucgacgugagcaagggcaucgggaccuacuacgugcuggaccgggucuaccugaacgcgacccuccugcugaccggcuacuaccccguggacggguccaacuaccgcaaccucgcccugacgggcaccaacacccugagccucaacugguacaagccgcccuuccuguccgaguucaacgacggcaucuucgccaaggugaagaaccugaaggccagccuccccaaggacuccaccagcuacuuccccacgaucgucaucggguccaacuucgugaccaccagcuacaccgugguccuggagcccuacaacggcaucaucauggccuccaucugccaguacacgaucugccugcuccccuacaccgacugcaagccgaacaccgggggcaacaagcugaucggguucuggcacaucgaccugaagucccccgugugcauccucaagcggaacuucaccuucaacgugaacgcggacuggcuguacuuccacuucuaccagcagggcggcacguucuacgccuacuacgccgacgccggguccgcgaccaccuuccuguucagcuccuacaucggcgacguccucacccaguacuucgugcugcccuucgugugcacgcccaccaccaccggggucuucagcccgcaguacugggugacgccccuggugaagcgccaguaccucuucaacuucaaccagaagggcaccaucaccagcgccgucgacugcgccuccagcuacaccuccgagaucaagugcaagacgcagagcaugaaccccaacaccggcguguacgaccuguccggguacaccgugcagcccgucggccugguguaccggcgcguccggaaccucccggacugccgcaucgaggacuggcuggccgccaagaccgugcccagcccccugaacugggagcggaagacguuccagaacugcaacuucaaccucuccagccugcugcgccucgugcaggcggggucccugagcugcuccaacaucgacgccgccaaggucuacggcaugugcuucgggagcauguccaucgacaaguucgccauccccaacagccggcgcguggaccugcagcucggcaacuccggcuuccugcagagcuucaacuacaagaucgacacccgggccaccuccugccagcuguacuacagccucgcgcaguccaacgugaccgucaacaaccacaacccgagcagcuggaaccgccgguacggguucaacgacguggccacguucggccgcgggaagcacgacguggccuacgccgaggccugcuucaccgucggcgcguccuacugccccugcgccaaccccagcaucgugucccccugcaccaccgggaagccgaaguucgccaacugccccaccggcacgaccaaccgggagugcaacgugcuggcccugggcagcaaccucuucaagugcgacugcacgugcaaccccagcccccugaccaccuacgaccugcgcugccugcaggggcggagcaugcucggcgucggggaccacugcgagggccugggggugcuggaggacaagugcggcggcuccaacacgugcaacugcagcgccgacgcguucguggggugggccaaggacuccugccucagcaacggccgcugccacaucuucuccaaccugaugcugaacgggaucaacagcggcacgaccugcuccaccgaccuccagcugccgaacaccgaggucgugaccggcaucugcgugaaguacgaccuguacgggaucaccggccagggggucuucaaggaggugaaggccgacuacuacaacagcuggcagaaccuccuguacgacgugaacggcaaccugaacggguuccgggacaucgucaccaacaagaccuaccucacccgcuccugcuacagcggccgcguguccgccgcguaccaccaggacgcccccgagcccgcccugcuguaccggaaccucaagugcgacuacguguucaacaacaacaucuuccgcgaggagaccccgcugaacuacuucgacagcuaccugggcugcgucgugaacgccgacaacagcacggagcaggccguggacgcgugcgaccuccggaugggguccggccugugcgucaacuacagcaccgcccaccgcgcccggaccuccgugagcaccggguacaagcugacgaccuucgagcccuucaccguguccaucgucaacgacagcguggaguccgugggcgggcucuacgagaugcagauccccaccaacuucacgaucgccagccaccaggaguucauccagacccgcgcccccaaggucaccaucgacugcgcggccuucgugugcggcgacuacaccacgugccggcagcagcugguggaguacggcuccuucugcgacaacaucaacgccauccugggggaggucaacaaccucaucgacaccaugcagcuccagguggccagcgcccugauccagggcgugacccucuccagccgccuggcggacgggaucuccggccagaucgacgacaucaacuucagcccgcugcucgggugccugggcucccagugcagcgagggcaccauggccgcccaggggcgguccacggucgaggaccugcuguucgacaaggugaagcugagcgacgugggcuucgucgaggccuacaacaacugcaccgggggccaggaggugcgcgaccugcucugcgugcaguccuucaacgggaucaagguccugccgcccgugcugagcgagaaccaggugagcggcuacaccgcgggcgccaccgccuccagcauguucccgcccugguccgccgccgcggggguccccuucagccucuccgugcaguaccggaucaacggccugggggugacgaugaacguccugagcgagaaccagaagaugaucgccuccgccuucaacaacgccaucggcgccauccaggagggcuucgacgcgaccaacagcgcccucgccaagauccaguccguggucaacgccaacgccgaggcgcugaacaaccugcucaaccagcugagcaaccgcuucggggccaucuccgccagccugcaggagauccucucccggcuggacgcccuggaggcgcaggcccagaucgaccgccucaucaacggccggcugaccgcccugaacgccuacgugagcaagcagcucuccgacaugacccugaucaaggugagcgccgcgcaggccaucgagaaggucaacgagugcgugaagucccagagcccccgcaucaacuucugcgggaacggcaaccacauccugucccucgugcagaacgcccccuacgggcuguacuuccugcacuucagcuacguccccaccagcuucacgaccgccaacgugucccccggccucugcaucagcggcgaccgggggcuggcccccaaggcgggcuacuucgugcaggacgacggggaguggaaguucaccggcuccaacuacuacuaccccgagccgaucaccgacaagaacagcgucgugauguccagcugcgccgugaacuacacgaaggcccccgaggucuuccugaacaccuccaucagcaaccuccccgacuucaaggaggagcuggacaagugguucaagaaccagaccuccguggcccccgaccugagccucgacuucgagaagcugaacgugaccuuccuggaccucuccgacgagaugaaccgcauccaggaggccaucaagaagcugaacgagagcuacaucaaccugaaggagaucgggacguacgagauguacgucaaguggccgugguacguguggcuccugaucggccuggcgggcguggccgucugcgugcuccuguucuucaucugcugcugcaccgggugcggcuccugcugcuucaagaagugcgggaacugcugcgacgaguacggcgggcaccaggacagcaucgugauccacaacaucuccagccacgaggacugaggacuagucccuguucccagagcccacuuuuuuuucuuuuuuugaaauaaaauagccugucuuucagaucucaaaggcucuuuucagagccaccaaaaaaaaaaaaaaaaaaaaaaaaaaaaaaaaaaaaaaaaaaaaaaaaaaaaaaaaaaaaaaaaaaaaaaaaaaaaaaaaaaaaaaaaaaaaaaaaaaaaa

SEQ ID NO: 15083 - RNA, 4358 nt, Artificial Sequence
  MHV/S__BAK18575.1 spike protein mRNA gc (1-1361)(A1073P_L1074P)
aggagagucccgcagucggcguccagcggcucugcuuguucgugugugugucguugcaggccuuauucaagcuuaccaugcugagcguguucauccucuuccugcccuccugccugggcuacaucggggacuuccgcugcaucaaccucgucaacaccgacaccagcaacgccuccgccccgagcguguccacggagguggucgacgugagcaagggcaucgggaccuacuacgugcuggaccgggucuaccugaacgcgacccuccugcugaccggcuacuaccccguggacggguccaacuaccgcaaccucgcccugacgggcaccaacacccugagccucaacugguacaagccgcccuuccuguccgaguucaacgacggcaucuucgccaaggugaagaaccugaaggccagccuccccaaggacuccaccagcuacuuccccacgaucgucaucggguccaacuucgugaccaccagcuacaccgugguccuggagcccuacaacggcaucaucauggccuccaucugccaguacacgaucugccugcuccccuacaccgacugcaagccgaacaccgggggcaacaagcugaucggguucuggcacaucgaccucaagagccccgugugcauccucaagcggaacuucaccuucaacgugaacgcggacuggcuguacuuccacuucuaccagcagggcggcacguucuacgccuacuacgccgacgccggguccgcgaccaccuuccuguucagcuccuacaucggcgacguccucacccaguacuucgugcugcccuucgugugcacgcccaccaccaccggggucuucagcccgcaguacugggugacgccccuggugaagcgccaguaccucuucaacuucaaccagaagggcaccaucaccagcgccgucgacugcgccuccagcuacaccuccgagaucaagugcaagacgcagagcaugaaccccaacaccggcguguacgaccuguccggguacaccgugcagcccgucggccugguguaccggcgcguccggaaccucccggacugccgcaucgaggacuggcuggccgccaagaccgugcccagcccccugaacugggagcggaagacguuccagaacugcaacuucaaccucuccagccugcugcgccucgugcaggcggggucccugagcugcuccaacaucgacgccgccaaggucuacggcaugugcuucgggagcauguccaucgacaaguucgccauccccaacagccggcgcguggaccugcagcucggcaacuccggcuuccugcagagcuucaacuacaagaucgacacccgggccaccuccugccagcuguacuacagccucgcgcaguccaacgugaccgucaacaaccacaacccgagcagcuggaaccgccgguacggguucaacgacguggccacguucggccgcgggaagcacgacguggccuacgccgaggccugcuucaccgucggcgcguccuacugccccugcgccaaccccagcaucgugucccccugcaccaccgggaagccgaaguucgccaacugccccaccggcacgaccaaccgggagugcaacgugcuggcccugggcagcaaccucuucaagugcgacugcacgugcaaccccagcccccugaccaccuacgaccugcgcugccugcaggggcgguccaugcucggcgucggggaccacugcgagggccugggggugcuggaggacaagugcggcggcuccaacacgugcaacugcagcgccgacgcguucguggggugggccaaggacuccugccucagcaacggccgcugccacaucuucuccaaccugaugcugaacgggaucaacagcggcacgaccugcuccaccgaccuccagcugccgaacaccgaggucgugaccggcaucugcgugaaguacgaccuguacgggaucaccggccagggggucuucaaggaggugaaggccgacuacuacaacagcuggcagaaccuccuguacgacgugaacggcaaccugaacggguuccgggacaucgucaccaacaagaccuaccucacccgcuccugcuacagcggccgcguguccgccgcguaccaccaggacgcccccgagcccgcccugcuguaccggaaccucaagugcgacuacguguucaacaacaacaucuuccgcgaggagaccccgcugaacuacuucgacagcuaccugggcugcgucgugaacgccgacaacagcacggagcaggccguggacgcgugcgaccuccggaugggguccggccugugcgucaacuacagcaccgcccaccgcgcccggaccuccgugagcaccggguacaagcugacgaccuucgagcccuucaccguguccaucgucaacgacagcguggaguccgugggcgggcucuacgagaugcagauccccaccaacuucacgaucgccagccaccaggaguucauccagacccgcgcccccaaggucaccaucgacugcgcggccuucgugugcggcgacuacaccacgugccggcagcagcugguggaguacggcuccuucugcgacaacaucaacgccauccugggggaggucaacaaccucaucgacaccaugcagcuccagguggccagcgcccugauccagggcgugacccucuccagccgccuggcggacgggaucuccggccagaucgacgacaucaacuucagcccgcugcucgggugccugggcucccagugcagcgagggcaccauggccgcccaggggcgguccacggucgaggaccugcuguucgacaaggugaagcugagcgacgugggcuucgucgaggccuacaacaacugcaccgggggccaggaggugcgcgaccugcucugcgugcaguccuucaacgggaucaagguccugccgcccgugcugagcgagaaccaggugagcggcuacaccgcgggcgccaccgccuccagcauguucccgcccugguccgccgccgcggggguccccuucagccucuccgugcaguaccggaucaacggccugggggugacgaugaacguccugagcgagaaccagaagaugaucgccuccgccuucaacaacgccaucggcgccauccaggagggcuucgacgcgaccaacagcgcccucgccaagauccaguccguggucaacgccaacgccgaggcgcugaacaaccugcucaaccagcugagcaaccgcuucggggccaucuccgccagccugcaggagauccucucccggcuggacccgcccgaggcccaggcgcagaucgaccgccugaucaacggccggcucaccgcccugaacgccuacgugagcaagcagcuguccgacaugacccucaucaaggugagcgccgcccaggcgaucgagaaggucaacgagugcgugaagucccagagcccccgcaucaacuucugcgggaacggcaaccacauccugucccuggugcagaacgcccccuacgggcucuacuuccugcacuucagcuacguccccaccagcuucacgaccgccaacgugucccccggccugugcaucagcggcgaccgggggcucgcccccaaggccggcuacuucgugcaggacgacggggaguggaaguucaccggcuccaacuacuacuaccccgagcccaucaccgacaagaacagcgucgugauguccagcugcgcggugaacuacacgaaggcccccgaggucuuccugaacaccuccaucagcaaccugccggacuucaaggaggagcucgacaagugguucaagaaccagaccuccguggcccccgaccugagccuggacuucgagaagcucaacgugaccuuccuggaccuguccgacgagaugaaccgcauccaggaggccaucaagaagcucaacgagagcuacaucaaccugaaggagaucgggacguacgagauguacgucaaguggcccugguacguguggcugcucaucggccuggccggcguggcggucugcgugcugcuguucuucaucugcugcugcaccgggugcggcuccugcugcuucaagaagugcgggaacugcugcgacgaguacggcgggcaccaggacagcaucgugauccacaacaucuccagccacgaggacugaggacuagucccuguucccagagcccacuuuuuuuucuuuuuuugaaauaaaauagccugucuuucagaucucaaaggcucuuuucagagccaccaaaaaaaaaaaaaaaaaaaaaaaaaaaaaaaaaaaaaaaaaaaaaaaaaaaaaaaaaaaaaaaaaaaaaaaaaaaaaaaaaaaaaaaaaaaaaaaaaaaaa

SEQ ID NO: 15084 - RNA, 4166 nt, Artificial Sequence
  MHV/S__BAK18575.1 spike protein mRNA gc (variant)
aggagagucccgcagucggcguccagcggcucugcuuguucgugugugugucguugcaggccuuauucaagcuuaccaugcugagcguguucauccucuuccugcccuccugccugggcuacaucggggacuuccgcugcaucaaccucgucaacaccgacaccagcaacgccuccgccccgagcguguccacggagguggucgacgugagcaagggcaucgggaccuacuacgugcuggaccgggucuaccugaacgcgacccuccugcugaccggcuacuaccccguggacggguccaacuaccgcaaccucgcccugacgggcaccaacacccugagccucaacugguacaagccgcccuuccuguccgaguucaacgacggcaucuucgccaaggugaagaaccugaaggccagccuccccaaggacuccaccagcuacuuccccacgaucgucaucggguccaacuucgugaccaccagcuacaccgugguccuggagcccuacaacggcaucaucauggccuccaucugccaguacacgaucugccugcuccccuacaccgacugcaagccgaacaccgggggcaacaagcugaucggguucuggcacaucgaccugaagucccccgugugcauccucaagcggaacuucaccuucaacgugaacgcggacuggcuguacuuccacuucuaccagcagggcggcacguucuacgccuacuacgccgacgccggguccgcgaccaccuuccuguucagcuccuacaucggcgacguccucacccaguacuucgugcugcccuucgugugcacgcccaccaccaccggggucuucagcccgcaguacugggugacgccccuggugaagcgccaguaccucuucaacuucaaccagaagggcaccaucaccagcgccgucgacugcgccuccagcuacaccuccgagaucaagugcaagacgcagagcaugaaccccaacaccggcguguacgaccuguccggguacaccgugcagcccgucggccugguguaccggcgcguccggaaccucccggacugccgcaucgaggacuggcuggccgccaagaccgugcccagcccccugaacugggagcggaagacguuccagaacugcaacuucaaccucuccagccugcugcgccucgugcaggcggggucccugagcugcuccaacaucgacgccgccaaggucuacggcaugugcuucgggagcauguccaucgacaaguucgccauccccaacagccggcgcguggaccugcagcucggcaacuccggcuuccugcagagcuucaacuacaagaucgacacccgggccaccuccugccagcuguacuacagccucgcgcaguccaacgugaccgucaacaaccacaacccgagcagcuggaaccgccgguacggguucaacgacguggccacguucggccgcgggaagcacgacguggccuacgccgaggccugcuucaccgucggcgcguccuacugccccugcgccaaccccagcaucgugucccccugcaccaccgggaagccgaaguucgccaacugccccaccggcacgaccaaccgggagugcaacgugcuggcccugggcagcaaccucuucaagugcgacugcacgugcaaccccagcccccugaccaccuacgaccugcgcugccugcaggggcggagcaugcucggcgucggggaccacugcgagggccugggggugcuggaggacaagugcggcggcuccaacacgugcaacugcagcgccgacgcguucguggggugggccaaggacuccugccucagcaacggccgcugccacaucuucuccaaccugaugcugaacgggaucaacagcggcacgaccugcuccaccgaccuccagcugccgaacaccgaggucgugaccggcaucugcgugaaguacgaccuguacgggaucaccggccagggggucuucaaggaggugaaggccgacuacuacaacagcuggcagaaccuccuguacgacgugaacggcaaccugaacggguuccgggacaucgucaccaacaagaccuaccucacccgcuccugcuacagcggccgcguguccgccgcguaccaccaggacgcccccgagcccgcccugcuguaccggaaccucaagugcgacuacguguucaacaacaacaucuuccgcgaggagaccccgcugaacuacuucgacagcuaccugggcugcgucgugaacgccgacaacagcacggagcaggccguggacgcgugcgaccuccggaugggguccggccugugcgucaacuacagcaccgcccaccgcgcccggaccuccgugagcaccggguacaagcugacgaccuucgagcccuucaccguguccaucgucaacgacagcguggaguccgugggcgggcucuacgagaugcagauccccaccaacuucacgaucgccagccaccaggaguucauccagacccgcgcccccaaggucaccaucgacugcgcggccuucgugugcggcgacuacaccacgugccggcagcagcugguggaguacggcuccuucugcgacaacaucaacgccauccugggggaggucaacaaccucaucgacaccaugcagcuccagguggccagcgcccugauccagggcgugacccucuccagccgccuggcggacgggaucuccggccagaucgacgacaucaacuucagcccgcugcucgggugccugggcucccagugcagcgagggcaccauggccgcccaggggcgguccacggucgaggaccugcuguucgacaaggugaagcugagcgacgugggcuucgucgaggccuacaacaacugcaccgggggccaggaggugcgcgaccugcucugcgugcaguccuucaacgggaucaagguccugccgcccgugcugagcgagaaccaggugagcggcuacaccgcgggcgccaccgccuccagcauguucccgcccugguccgccgccgcggggguccccuucagccucuccgugcaguaccggaucaacggccugggggugacgaugaacguccugagcgagaaccagaagaugaucgccuccgccuucaacaacgccaucggcgccauccaggagggcuucgacgcgaccaacagcgcccucgccaagauccaguccguggucaacgccaacgccgaggcgcugaacaaccugcucaaccagcugagcaaccgcuucggggccaucuccgccagccugcaggagauccucucccggcuggacccgcccgaggcccaggcgcagaucgaccgccugaucaacggccggcucaccgcccugaacgccuacgugagcaagcagcuguccgacaugacccucaucaaggugagcgccgcccaggcgaucgagaaggucaacgagugcgugaagucccagagcccccgcaucaacuucugcgggaacggcaaccacauccugucccuggugcagaacgcccccuacgggcucuacuuccugcacuucagcuacguccccaccagcuucacgaccgccaacgugucccccggccugugcaucagcggcgaccgggggcucgcccccaaggccggcuacuucgugcaggacgacggggaguggaaguucaccggcuccaacuacuacuaccccgagcccaucaccgacaagaacagcgucgugauguccagcugcgcggugaacuacacgaaggcccccgaggucuuccugaacaccuccaucagcaaccugccggacuucaaggaggagcucgacaagugguucaagaaccagaccuccguggcccccgaccugagccuggacuucgagaagcucaacgugaccuuccuggaccuguccgacgagaugaaccgcauccaggaggccaucaagaagcucaacgagagcuacaucaaccugaaggagaucgggacguacgagaugugaggacuagucccuguucccagagcccacuuuuuuuucuuuuuuugaaauaaaauagccugucuuucagaucucaaaggcucuuuucagagccaccaaaaaaaaaaaaaaaaaaaaaaaaaaaaaaaaaaaaaaaaaaaaaaaaaaaaaaaaaaaaaaaaaaaaaaaaaaaaaaaaaaaaaaaaaaaaaaaaaaaaa

SEQ ID NO: 15085 - RNA, 4247 nt, Artificial Sequence
  MHV/S__BAK18575.1 spike protein mRNA gc (variant)
aggagagucccgcagucggcguccagcggcucugcuuguucgugugugugucguugcaggccuuauucaagcuuaccaugcugagcguguucauccucuuccugcccuccugccugggcuacaucggggacuuccgcugcaucaaccucgucaacaccgacaccagcaacgccuccgccccgagcguguccacggagguggucgacgugagcaagggcaucgggaccuacuacgugcuggaccgggucuaccugaacgcgacccuccugcugaccggcuacuaccccguggacggguccaacuaccgcaaccucgcccugacgggcaccaacacccugagccucaacugguacaagccgcccuuccuguccgaguucaacgacggcaucuucgccaaggugaagaaccugaaggccagccuccccaaggacuccaccagcuacuuccccacgaucgucaucggguccaacuucgugaccaccagcuacaccgugguccuggagcccuacaacggcaucaucauggccuccaucugccaguacacgaucugccugcuccccuacaccgacugcaagccgaacaccgggggcaacaagcugaucggguucuggcacaucgaccugaagucccccgugugcauccucaagcggaacuucaccuucaacgugaacgcggacuggcuguacuuccacuucuaccagcagggcggcacguucuacgccuacuacgccgacgccggguccgcgaccaccuuccuguucagcuccuacaucggcgacguccucacccaguacuucgugcugcccuucgugugcacgcccaccaccaccggggucuucagcccgcaguacugggugacgccccuggugaagcgccaguaccucuucaacuucaaccagaagggcaccaucaccagcgccgucgacugcgccuccagcuacaccuccgagaucaagugcaagacgcagagcaugaaccccaacaccggcguguacgaccuguccggguacaccgugcagcccgucggccugguguaccggcgcguccggaaccucccggacugccgcaucgaggacuggcuggccgccaagaccgugcccagcccccugaacugggagcggaagacguuccagaacugcaacuucaaccucuccagccugcugcgccucgugcaggcggggucccugagcugcuccaacaucgacgccgccaaggucuacggcaugugcuucgggagcauguccaucgacaaguucgccauccccaacagccggcgcguggaccugcagcucggcaacuccggcuuccugcagagcuucaacuacaagaucgacacccgggccaccuccugccagcuguacuacagccucgcgcaguccaacgugaccgucaacaaccacaacccgagcagcuggaaccgccgguacggguucaacgacguggccacguucggccgcgggaagcacgacguggccuacgccgaggccugcuucaccgucggcgcguccuacugccccugcgccaaccccagcaucgugucccccugcaccaccgggaagccgaaguucgccaacugccccaccggcacgaccaaccgggagugcaacgugcuggcccugggcagcaaccucuucaagugcgacugcacgugcaaccccagcccccugaccaccuacgaccugcgcugccugcaggggcggagcaugcucggcgucggggaccacugcgagggccugggggugcuggaggacaagugcggcggcuccaacacgugcaacugcagcgccgacgcguucguggggugggccaaggacuccugccucagcaacggccgcugccacaucuucuccaaccugaugcugaacgggaucaacagcggcacgaccugcuccaccgaccuccagcugccgaacaccgaggucgugaccggcaucugcgugaaguacgaccuguacgggaucaccggccagggggucuucaaggaggugaaggccgacuacuacaacagcuggcagaaccuccuguacgacgugaacggcaaccugaacggguuccgggacaucgucaccaacaagaccuaccucacccgcuccugcuacagcggccgcguguccgccgcguaccaccaggacgcccccgagcccgcccugcuguaccggaaccucaagugcgacuacguguucaacaacaacaucuuccgcgaggagaccccgcugaacuacuucgacagcuaccugggcugcgucgugaacgccgacaacagcacggagcaggccguggacgcgugcgaccuccggaugggguccggccugugcgucaacuacagcaccgcccaccgcgcccggaccuccgugagcaccggguacaagcugacgaccuucgagcccuucaccguguccaucgucaacgacagcguggaguccgugggcgggcucuacgagaugcagauccccaccaacuucacgaucgccagccaccaggaguucauccagacccgcgcccccaaggucaccaucgacugcgcggccuucgugugcggcgacuacaccacgugccggcagcagcugguggaguacggcuccuucugcgacaacaucaacgccauccugggggaggucaacaaccucaucgacaccaugcagcuccagguggccagcgcccugauccagggcgugacccucuccagccgccuggcggacgggaucuccggccagaucgacgacaucaacuucagcccgcugcucgggugccugggcucccagugcagcgagggcaccauggccgcccaggggcgguccacggucgaggaccugcuguucgacaaggugaagcugagcgacgugggcuucgucgaggccuacaacaacugcaccgggggccaggaggugcgcgaccugcucugcgugcaguccuucaacgggaucaagguccugccgcccgugcugagcgagaaccaggugagcggcuacaccgcgggcgccaccgccuccagcauguucccgcccugguccgccgccgcggggguccccuucagccucuccgugcaguaccggaucaacggccugggggugacgaugaacguccugagcgagaaccagaagaugaucgccuccgccuucaacaacgccaucggcgccauccaggagggcuucgacgcgaccaacagcgcccucgccaagauccaguccguggucaacgccaacgccgaggcgcugaacaaccugcucaaccagcugagcaaccgcuucggggccaucuccgccagccugcaggagauccucucccggcuggacccgcccgaggcccaggcgcagaucgaccgccugaucaacggccggcucaccgcccugaacgccuacgugagcaagcagcuguccgacaugacccucaucaaggugagcgccgcccaggcgaucgagaaggucaacgagugcgugaagucccagagcccccgcaucaacuucugcgggaacggcaaccacauccugucccuggugcagaacgcccccuacgggcucuacuuccugcacuucagcuacguccccaccagcuucacgaccgccaacgugucccccggccugugcaucagcggcgaccgggggcucgcccccaaggccggcuacuucgugcaggacgacggggaguggaaguucaccggcuccaacuacuacuaccccgagcccaucaccgacaagaacagcgucgugauguccagcugcgcggugaacuacacgaaggcccccgaggucuuccugaacaccuccaucagcaaccugccggacuucaaggaggagcucgacaagugguucaagaaccagaccuccguggcccccgaccugagccuggacuucgagaagcucaacgugaccuuccuggaccuguccgacgagaugaaccgcauccaggaggccaucaagaagcucaacgagagcuacaucaaccugaaggagaucgggacguacgagaugggcggcuacauccccgaggcgccccgggacgggcaggccuacguccgcaaggacggcgagugggugcugcucuccaccuucugaggacuagucccuguucccagagcccacuuuuuuuucuuuuuuugaaauaaaauagccugucuuucagaucucaaaggcucuuuucagagccaccaaaaaaaaaaaaaaaaaaaaaaaaaaaaaaaaaaaaaaaaaaaaaaaaaaaaaaaaaaaaaaaaaaaaaaaaaaaaaaaaaaaaaaaaaaaaaaaaaaaaa

SEQ ID NO: 15086 - RNA, 4040 nt, Artificial Sequence
  SARS-CoV__P59594.1 spike protein mRNA human (1-1255)
aggagagucccgcagucggcguccagcggcucugcuuguucgugugugugucguugcaggccuuauucaagcuuaccauguucaucuuucugcucuuucuuacccugacaagcggcuccgacuuggauagaugcacuacguuugacgaugugcaggcccccaacuacacccaacacacaucuucaaugagaggggucuauuacccugacgagauuuuccggagugauacuuuauaucugacccaggaccuauuucucccauucuacagcaauguuacaggauuucauaccauaaaccacacuuucgguaauccggugauccccuuuaaggauggcauuuauuucgcugcaacagaaaaauccaacguagugcgcgggugggucuuuggaucuaccaugaauaacaagucgcagucagugaucauuaucaauaacagcacgaauguugugauacgagccuguaacuucgagcugugcgacaauccuuucuucgcggucaguaaaccaaugggcacucagacccauacaaugaucuucgauaacgcuuuuaauuguacuuucgaauacauuuccgacgccuuuucucuugaugugagcgagaaguccgguaacuucaaacaucugcgugaauuuguauucaagaauaaggacggguuuuuguauguuuacaaaggauaccaacccaucgauguggucagagaccucccuucaggcuucaacacccugaagccaauuuuuaaacugccccucggcaucaacauaacaaauuucagggcaauuuuaaccgccuuuaguccugcucaggacaucugggggacgagcgcagccgcuuauuucgugggauaccugaagccaacuacauuuaugcuuaaauaugaugagaacgguaccauuacugacgccguggauugcucucagaauccguuggcggagcugaaguguuccgucaagucauucgaaaucgacaaaggcaucuaccagacaagcaacuuccggguugugcccaguggggauguagugcgcuuuccuaauauuaccaaccuaugcccauucggagaggucuuuaaugcaacgaaguuccccucuguguaugccugggaaaggaaaaagauauccaacuguguugcugacuacagcgugcucuauaauucgaccuuuuucucuacauuuaaaugcuacggcgucuccgccacuaagcugaacgaucuuuguuucucaaauguguacgcagacaguuuuguaguuaaaggugaugacgugaggcaaaucgcuccugggcagaccggagucauugccgauuauaacuacaagcugccagacgacuucaugggcugcguguuggcguggaauacacggaacaucgaugccacuagcaccggcaauuauaacuacaaguaucgcuaccuccgacacgggaaacugagacccuuugagagggacauauccaacgucccguucucuccugauggaaagcccuguacacccccugcauuaaauugcuauuggccccugaacgacuacgguuuuuacaccacuacgggcauuggguaucagccauaccgggugguugugcucagcuucgagcuucugaaugcucccgccacaguaugcggaccuaaauugucaaccgaucuaaucaagaaccagugugucaauuucaacuuuaauggccugacugguaccggggugcucacaccaaguuccaaacguuuccaaccguuucagcaguucggccgcgacguuagcgauuuuaccgacucugugagagaucccaagacuucagaaauccuggacauuaguccuugcagcuucggaggcgucuccgugaucacaccagggacgaacgcuucuucggagguagccgugcuuuaucaagauguuaauuguaccgacgucagcacugcaauucacgccgaucagcugacacccgcuuggaggauauacuccaccggaaacaauguguuucagacacaggcggguugcuugaucggcgcagaacacguggacacuucauaugagugugacauuccuaucggggccggaaucugcgcuaguuaccauaccgucucucuccugcggagcacgucccaaaagucaauuguugccuauaccaugagcuuaggcgcagauucuuccauagccuacaguaacaauacaaucgcuauuccaacuaacuucagcaucucuauuaccacagaagugaugcccguguccauggccaaaacuucaguagacuguaauauguacaucugcggugauaguaccgagugugcaaaccugcuacuccaguaugggagcuuuugcacgcagcugaaccgagcgcuuucgggcauagcugccgagcaggaccgcaauacaagagaagucuucgcacaagugaagcagauguacaaaaccccgacuuugaaguauuuuggaggcuucaacuucucccagauccugccugauccacucaaacccacaaagaggucuuuuauugaggaccugcuuuucaauaagguuacccuggccgaugcuggguuuaugaaacaguacggagaauguuugggugacaucaacgcccgggaucucauuugcgcacaaaaguucaauggccugacuguguuaccuccccugcuaaccgacgauaugaucgcugccuauacagcggcccucgucagcgggacggcuaccgcaggauggacuuuuggcgccggugcugcccugcagauaccauucgcaaugcagauggcguaccgcuuuaacgggauuggcgugacacagaauguucuuuaugagaaccaaaaacagaucgccaaucaguucaacaaggcuauuucacaaauccaggaaaguuugaccacaacuuccaccgcccugggaaaacuccaggacgugguaaaucagaacgcacaagcucugaauacguuagucaagcagcugucuagcaacuuuggcgccauauccucagugcuuaaugauaucuugagcagacucgacaagguggaggcagagguccagauugacaggcugaucacagggcgucuacagagucugcaaaccuacguuacucagcagcucauucgggccgcugaaauccgagcgucugccaaccuggcagcuaccaaaauguccgagugcgugcuuggacagagcaagagaguagauuucuguggcaaagguuaccacuugaugucguuuccucaagccgccccacaugggguggucuuccugcacgugacauauguuccaucacaggaaaggaacuuuacuaccgcuccggcaauaugccacgagggaaaggccuacuucccucgcgaaggcguguucgucuuuaaugguacaucuugguucauuacgcagcggaacuuuuucaguccccaaaucaucaccacugacaauacauuuguguccggcaacugugauguugugauugggaucauuaauaacaccgucuaugacccauuacagcccgagcucgauagcuucaaagaggaacuggacaaguacuuuaaaaaucauacuucuccugauguagaccuuggagauauaagcggcaucaacgcguccgugguuaauauucagaaggagaucgacagacugaacgaaguggcuaagaauuugaacgagucacucauugaucugcaggagcuagggaaauaugaacaauacaucaaguggccaugguaugucuggcugggauucauagccggccucaucgcaauugugaugguaacaauccugcuuugcuguaugaccaguugcuguagcugcuugaaaggugccuguucuugcggguccuguugcaaguuugacgaggacgauucagaacccgugcugaaaggagucaaguuacacuacacgugaggacuagucccuguucccagagcccacuuuuuuuucuuuuuuugaaauaaaauagccugucuuucagaucucaaaggcucuuuucagagccaccaaaaaaaaaaaaaaaaaaaaaaaaaaaaaaaaaaaaaaaaaaaaaaaaaaaaaaaaaaaaaaaaaaaaaaaaaaaaaaaaaaaaaaaaaaaaaaaaaaaaa

SEQ ID NO: 15087 - RNA, 4040 nt, Artificial Sequence
  SARS-CoV__P59594.1 spike protein mRNA human (1-1255)(K968P_V969P)
aggagagucccgcagucggcguccagcggcucugcuuguucgugugugugucguugcaggccuuauucaagcuuaccauguucaucuuucugcuguuccuuacccugacaagcggcuccgacuuggauagaugcacuacguuugacgaugugcaggcccccaacuacacccaacacacaucuucaaugagaggggucuauuacccugacgagauuuuccggagugauacuuuauaucugacccaggaccuauuucucccauucuacagcaauguuacaggauuucauaccauaaaccacacuuucgguaauccggugauccccuuuaaggauggcauuuauuucgcugcaacagaaaaauccaacguagugcgcgggugggucuuuggaucuaccaugaauaacaagucgcagucagugaucauuaucaauaacagcacgaauguugugauacgagccuguaacuucgagcugugcgacaauccauuuuucgcggucaguaaaccaaugggcacucagacccauacaaugaucuucgauaacgcuuuuaauuguacuuucgaauacauuuccgacgccuuuucucuugaugugagcgagaaguccgguaacuucaaacaccuccgugaauuuguauucaagaauaaggacggguuuuuguauguuuacaaaggauaccaacccaucgauguggucagagaccucccuucaggcuucaacacccugaagccaauuuuuaaacugccccucggcaucaacauaacaaauuucagggcaauuuuaaccgccuuuaguccugcucaggacaucugggggacgagcgcagccgcuuauuucgugggauaccugaagccaacuacauuuaugcuuaaauaugaugagaacgguaccauuacugacgccguggauugcucucagaauccguuggcggagcugaaguguuccgucaagucauucgaaaucgacaaaggcaucuaccagacaagcaacuuccggguugugcccaguggggauguagugcgcuuuccuaauauuaccaaccuaugcccauucggagaggucuuuaaugcaacgaaguuccccucuguguaugccugggaaaggaaaaagauauccaacuguguugcugacuacagcgugcucuauaauucgaccuuuuucucuacauuuaaaugcuacggcgucuccgccacuaagcugaacgaucuuuguuucucaaauguguacgcagacaguuuuguaguuaaaggugaugacgugaggcaaaucgcuccugggcagaccggagucauugccgauuauaacuacaagcugccagacgacuucaugggcugcguguuggcguggaauacacggaacaucgaugccacuagcaccggcaauuauaacuacaaguaucgcuaccuccgacaugggaaacugagacccuuugagagggacauauccaacgucccguucucuccugauggaaagcccuguacaccuccugcauuaaauugcuauuggccccugaacgacuacgguuuuuacaccacuacgggcauuggguaucagccauaccgggugguugugcucagcuucgagcuucugaaugcucccgccacaguaugcggaccuaaauugucaaccgaucuaaucaagaaccagugugucaauuucaacuuuaauggccugacugguaccggggugcucacaccaaguuccaaacguuuccaaccguuucagcaguucggccgcgacguuagcgauuuuaccgacucugugagagaucccaagacuucagaaauccuggacauuaguccuugcagcuucggaggcgucuccgugaucacaccagggacgaacgcuucuucggagguagccgugcuuuaucaagauguuaauuguaccgacgucagcacugcaauucacgccgaucagcugacacccgcuuggaggauauacuccaccggaaacaauguguuucagacacaggcggguugcuugaucggcgcagaacacguggacacuucauaugagugugacauuccuaucggggccggaaucugcgcuaguuaccauaccgucucucuccugcggagcacgucccaaaagucaauuguugccuauaccaugagcuuaggcgcagauucuuccauagccuacaguaacaauacaaucgcuauuccaacuaacuucagcaucucuauuaccacagaagugaugcccguguccauggccaaaacuucaguagacuguaauauguacaucugcggugauaguaccgagugugcaaaccugcuacuccaguaugggagcuuuugcacgcagcugaaccgagcgcuuucgggcauagcugccgagcaggaccgcaauacaagagaagucuucgcacaagugaagcagauguacaaaaccccgacuuugaaguauuuuggaggcuucaacuucucccagauccugccugauccacucaaacccacaaagaggucuuuuauugaggaccugcuuuucaauaagguuacccuggccgaugcuggguuuaugaaacaguacggagaauguuugggugacaucaacgcccgggaucucauuugcgcacaaaaguucaauggccugacuguguuaccuccccugcuaaccgacgauaugaucgcugccuauacagcggcccucgucagcgggacggcuaccgcaggauggacuuuuggcgccggugcugcccugcagauaccauucgcaaugcagauggcguaccgcuuuaacgggauuggcgugacacagaauguucuuuaugagaaccaaaaacagaucgccaaucaguucaacaaggcuauuucacaaauccaggaaaguuugaccacaacuuccaccgcccugggaaaacuccaggacgugguaaaucagaacgcacaagcucugaauacguuagucaagcagcugucuagcaacuuuggcgccauauccucagugcuuaaugauaucuugagcagacucgacccucccgaggcagaggugcagauugacaggcugaucacagggcgucuacagagucugcaaaccuacgucacucagcagcucauucgggccgcugaaauccgagcgucugccaaccuggcagcuaccaagauguccgagugcguucuuggacagagcaaaagaguggauuucuguggcaaggguuaccacuugaugucguuuccacaagccgccccgcaugggguaguguuccugcacgucacauaugugccuucacaggaaaggaacuuuacuaccgcucccgcaauaugccacgagggaaaagccuacuucccacgcgaaggcguuuucguguuuaaugguacaucuugguucauuacgcagcggaacuuuuucaguccccaaaucaucaccacugacaauacauuugucuccggcaacugugaugugguuauugggaucauuaauaacaccguguaugacccuuuacagccagagcucgauagcuucaaggaggaacuggacaaauacuuuaagaaucauacuucucccgaugucgaccuuggagauauaagcggcaucaacgcguccguagugaauauucagaaagagaucgacagacugaacgaaguugcuaagaauuugaacgagucacucauugaucugcaggagcuagggaaguaugaacaauacaucaaauggccuugguauguguggcugggauucauagccggccucaucgcaauugucauggugacaauccugcuuugcuguaugaccaguugcuguagcugcuugaagggugccuguucuugcggguccuguugcaaauuugacgaggacgauucagaaccgguacugaagggagugaaauuacacuacacgugaggacuagucccuguucccagagcccacuuuuuuuucuuuuuuugaaauaaaauagccugucuuucagaucucaaaggcucuuuucagagccaccaaaaaaaaaaaaaaaaaaaaaaaaaaaaaaaaaaaaaaaaaaaaaaaaaaaaaaaaaaaaaaaaaaaaaaaaaaaaaaaaaaaaaaaaaaaaaaaaaaaaa

SEQ ID NO: 15088 - RNA, 1853 nt, Artificial Sequence
  SARS-CoV__P59594.1 spike protein mRNA human (1-17_747-1255)
aggagagucccgcagucggcguccagcggcucugcuuguucgugugugugucguugcaggccuuauucaagcuuaccauguucaucuuucugcucuuucuuacccugacaagcggcuccgacuuggauagagccuuaucugggauugcugcagagcaggacaggaacacucgggaaguguuugcccaagucaagcagauguacaaaacgcccacccugaaguauuucggagguuuuaauuucucacagauacuaccugauccacucaaaccgacaaagcgcaguuuuaucgaggaccugcuuuucaacaaaguuacucuggcggaugcuggcuuuaugaagcaguacggggaaugcuugggagacauuaaugcccgagaucucaucugugcacaaaaguucaacggccugaccgugcugcccccucucuuaacagacgauaugauugccgcuuauaccgcagcccugguaagcgguacugcuacagccggguggaccuuuggagcgggcgcagcccuucagaucccauucgcuaugcagauggccuaccguuuuaauggcauaggggugacgcagaacgucuuguaugagaaucaaaaacagaucgcaaaccaguucaauaaggcuauuucccagauccaagaaucucugacuaccacaucgacugcccuaggaaaacuccaggacgugguuaaccagaaugcgcaagcccugaacacccuugugaagcagcugucaagcaauuucggugcaauuaguuccgucuugaacgauauccucucuagacuggacaaaguggaggcugagguacagauagauagguuaauuacaggccggcugcagagccuccaaaccuacguuacgcagcagcuuauccgcgccgcugaaauuagagccuccgcaaaucuggccgcuacuaagaugucagagugcguguuggggcagaguaagagggucgacuuuuguggaaaaggcuaucaccuaaugagcuucccccaagcggcaccucauggugugguguuucugcacgucacauacguuccaucucaggaacggaacuucaccacugcccccgcuaucugccaugaggggaaggccuacuuuccucgcgagggaguguucguauuuaacggcacauccugguucaucacccagcgaaauuucuucucaccacagauuauaacgaccgacaacacauuugugagcggcaauugugaugucgugaucgggauuaucaacaauacuguuuaugacccgcuccaacccgaacuggauaguuucaaagaggaacuugacaaguacuuuaaaaaccacaccucuccugauguggaccugggagauauauccgguauuaaugcaagcgucgugaacauccagaaggagaucgacagauugaaugaaguagccaaaaaccucaaugagucgcugauugauuuacaggagcugggcaaguaugaacaguacaucaaguggccaugguauguuuggcuaggguucauugcuggacucauagccaucgugauggucacaauucugcuuugcuguaugacuucuugcuguuccugcuugaaaggcgcauguucaugcgguaguugcuguaaguucgacgaggaugacagcgaacccgugcugaaaggggucaagcuccauuacaccugaggacuagucccuguucccagagcccacuuuuuuuucuuuuuuugaaauaaaauagccugucuuucagaucucaaaggcucuuuucagagccaccaaaaaaaaaaaaaaaaaaaaaaaaaaaaaaaaaaaaaaaaaaaaaaaaaaaaaaaaaaaaaaaaaaaaaaaaaaaaaaaaaaaaaaaaaaaaaaaaaaaaa

SEQ ID NO: 15089 - RNA, 4040 nt, Artificial Sequence
  SARS-CoV/Tor2__NP_828851.1 spike protein mRNA human (1-1255)
aggagagucccgcagucggcguccagcggcucugcuuguucgugugugugucguugcaggccuuauucaagcuuaccauguucaucuuucugcuguuccuuacccugacaagcggcuccgacuuggauagaugcacuacguuugacgaugugcaggcccccaacuacacccaacacacaucuucaaugagaggggucuauuacccugacgagauuuuccggagugauacuuuauaucugacccaggaccuauuucucccauucuacagcaauguuacaggauuucauaccauaaaccacacuuucgguaauccggugauccccuuuaaggauggcauuuauuucgcugcaacagaaaaauccaacguagugcgcgggugggucuuuggaucuaccaugaauaacaagucgcagucagugaucauuaucaauaacagcacgaauguugugauacgagccuguaacuucgagcugugcgacaauccauuuuucgcggucaguaaaccaaugggcacucagacccauacaaugaucuucgauaacgcuuuuaauuguacuuucgaauacauuuccgacgccuuuucucuugaugugagcgagaaguccgguaacuucaaacaccuccgugaauuuguauucaagaauaaggacggguuuuuguauguuuacaaaggauaccaacccaucgauguggucagagaccucccuucaggcuucaacacccugaagccaauuuuuaaacugccccucggcaucaacauaacaaauuucagggcaauuuuaaccgccuuuaguccugcucaggacaucugggggacgagcgcagccgcuuauuucgugggauaccugaagccaacuacauuuaugcuuaaauaugaugagaacgguaccauuacugacgccguggauugcucucagaauccguuggcggagcugaaguguuccgucaagucauucgaaaucgacaaaggcaucuaccagacaagcaacuuccggguugugcccaguggggauguagugcgcuuuccuaauauuaccaaccuaugcccauucggagaggucuuuaaugcaacgaaguuccccucuguguaugccugggaaaggaaaaagauauccaacuguguugcugacuacagcgugcucuauaauucgaccuuuuucucuacauuuaaaugcuacggcgucuccgccacuaagcugaacgaucuuuguuucucaaauguguacgcagacaguuuuguaguuaaaggugaugacgugaggcaaaucgcuccugggcagaccggagucauugccgauuauaacuacaagcugccagacgacuucaugggcugcguguuggcguggaauacacggaacaucgaugccacuagcaccggcaauuauaacuacaaguaucgcuaccuccgacaugggaaacugagacccuuugagagggacauauccaacgucccguucucuccugauggaaagcccuguacaccuccugcauuaaauugcuauuggccccugaacgacuacgguuuuuacaccacuacgggcauuggguaucagccauaccgggugguugugcucagcuucgagcuucugaaugcucccgccacaguaugcggaccuaaauugucaaccgaucuaaucaagaaccagugugucaauuucaacuuuaauggccugacugguaccggggugcucacaccaaguuccaaacguuuccaaccguuucagcaguucggccgcgacguuagcgauuuuaccgacucugugagagaucccaagacuucagaaauccuggacauuaguccuugcgcuuucggaggcgucagcgugaucacaccagggacgaacgccuccucugagguagcagugcuuuaucaagauguuaauuguaccgacgucucgacugccauucacgcugaucagcugacacccgcguggaggauauacagcaccggaaacaauguguuucagacacaggcagguugcuugaucggcgccgaacacguggacacuuccuaugagugugacauuccuaucggggcuggaaucugcgccucauaccauaccgucagucuccugcggucuacgagccaaaaguccauuguugcauauaccaugucauuaggcgccgauagcucuauagcuuacuccaacaauacaaucgccauuccaacuaacuucaguaucagcauuaccacagaagugaugcccgugucuauggcaaaaacuuccguagacuguaauauguacaucugcggugauucaaccgagugugcgaaccugcuacuccaguaugggaguuuuugcacgcagcugaaccgagcucuuagcggcauagccgcagagcaggaccgcaauacaagagaagucuucgcccaagugaagcagauguacaaaaccccgacuuugaaguauuuuggaggcuucaacuucucgcagauccugccugauccacucaaacccacaaagagguccuuuauugaggaccugcuuuucaauaagguuacccuggcugaugccggguuuaugaaacaguacggagaauguuugggugacaucaacgcacgggaucucauuugcgcucaaaaguucaauggccugacuguguuaccuccccugcuaaccgacgauaugaucgccgcguauacagccgcucucgucucugggacggcaaccgccggauggacuuuuggcgcuggugccgcacugcagauaccauucgcgaugcagauggccuaccgcuuuaacgggauuggcgugacacagaauguucuuuaugagaaccaaaaacagaucgcuaaucaguucaacaaggccauuagccaaauccaggaaucauugaccacaaccaguacugcacugggaaaacuccaggacgugguaaaucagaacgcucaagcccugaauacguuagucaagcagcuguccucuaacuuuggcgcaauaagcuccgugcuuaaugauaucuugucaagacucgacaagguggaggccgagguccagauugacaggcugaucacagggcgucuacagagccugcaaaccuacguuacucagcagcucauucgggcugcggaaauccgagccagugcaaaccuggcugccaccaaaaugucugagugcgugcuuggacaguccaagagaguagauuucuguggcaaagguuaccacuugaugagcuuuccucaagccgcuccccaugggguggucuuccugcacgugacauauguuccaucgcaggaaaggaacuuuacuaccgcaccggccauaugccacgagggaaaggcguacuucccucgcgaaggcguguucgucuuuaaugguacaucaugguucauuacgcagcggaacuuuuucucuccccaaaucaucaccacugacaauacauuugugaguggcaacugugauguugugauugggaucauuaauaacaccgucuaugacccauuacagcccgagcucgauuccuucaaagaggaacuggacaaguacuuuaaaaaucauacuagcccugauguagaccuuggagauauaucuggcaucaacgcuagcgugguuaauauucagaaggagaucgacagacugaacgaaguggccaagaauuugaacgagucccucauugaucugcaggagcuagggaaauaugaacaauacaucaaguggccaugguaugucuggcugggauucauagcaggccucaucgccauugugaugguaacaauccugcuuugcuguaugaccucaugcuguaguugcuugaaaggugcuuguagcugcgggucuuguugcaaguuugacgaggacgauuccgaacccgugcugaaaggagucaaguuacacuacacgugaggacuagucccuguucccagagcccacuuuuuuuucuuuuuuugaaauaaaauagccugucuuucagaucucaaaggcucuuuucagagccaccaaaaaaaaaaaaaaaaaaaaaaaaaaaaaaaaaaaaaaaaaaaaaaaaaaaaaaaaaaaaaaaaaaaaaaaaaaaaaaaaaaaaaaaaaaaaaaaaaaaaa

SEQ ID NO: 15090 - RNA, 4040 nt, Artificial Sequence
  SARS-CoV/Tor2__NP_828851.1 spike protein mRNA human (1-1255)(K968P_V969P)
aggagagucccgcagucggcguccagcggcucugcuuguucgugugugugucguugcaggccuuauucaagcuuaccauguucaucuuucugcuguuccuuacccugacaagcggcuccgacuuggauagaugcacuacguuugacgaugugcaggcccccaacuacacccaacacacaucuucaaugagaggggucuauuacccugacgagauuuuccggagugauacuuuauaucugacccaggaccuauuucucccauucuacagcaauguuacaggauuucauaccauaaaccacacuuucgguaauccggugauccccuuuaaggauggcauuuauuucgcugcaacagaaaaauccaacguagugcgcgggugggucuuuggaucuaccaugaauaacaagucgcagucagugaucauuaucaauaacagcacgaauguugugauacgagccuguaacuucgagcugugcgacaauccauuuuucgcggucaguaaaccaaugggcacucagacccauacaaugaucuucgauaacgcuuuuaauuguacuuucgaauacauuuccgacgccuuuucucuugaugugagcgagaaguccgguaacuucaaacaccuccgugaauuuguauucaagaauaaggacggguuuuuguauguuuacaaaggauaccaacccaucgauguggucagagaccucccuucaggcuucaacacccugaagccaauuuuuaaacugccccucggcaucaacauaacaaauuucagggcaauuuuaaccgccuuuaguccugcucaggacaucugggggacgagcgcagccgcuuauuucgugggauaccugaagccaacuacauuuaugcuuaaauaugaugagaacgguaccauuacugacgccguggauugcucucagaauccguuggcggagcugaaguguuccgucaagucauucgaaaucgacaaaggcaucuaccagacaagcaacuuccggguugugcccaguggggauguagugcgcuuuccuaauauuaccaaccuaugcccauucggagaggucuuuaaugcaacgaaguuccccucuguguaugccugggaaaggaaaaagauauccaacuguguugcugacuacagcgugcucuauaauucgaccuuuuucucuacauuuaaaugcuacggcgucuccgccacuaagcugaacgaucuuuguuucucaaauguguacgcagacaguuuuguaguuaaaggugaugacgugaggcaaaucgcuccugggcagaccggagucauugccgauuauaacuacaagcugccagacgacuucaugggcugcguguuggcguggaauacacggaacaucgaugccacuagcaccggcaauuauaacuacaaguaucgcuaccuccgacaugggaaacugagacccuuugagagggacauauccaacgucccguucucuccugauggaaagcccuguacaccuccugcauuaaauugcuauuggccccugaacgacuacgguuuuuacaccacuacgggcauuggguaucagccauaccgggugguugugcucagcuucgagcuucugaaugcucccgccacaguaugcggaccuaaauugucaaccgaucuaaucaagaaccagugugucaauuucaacuuuaauggccugacugguaccggggugcucacaccaaguuccaaacguuuccaaccguuucagcaguucggccgcgacguuagcgauuuuaccgacucugugagagaucccaagacuucagaaauccuggacauuaguccuugcgcuuucggaggcgucagcgugaucacaccagggacgaacgccuccucugagguagcagugcuuuaucaagauguuaauuguaccgacgucucgacugccauucacgcugaucagcugacacccgcguggaggauauacagcaccggaaacaauguguuucagacacaggcagguugcuugaucggcgccgaacacguggacacuuccuaugagugugacauuccuaucggggcuggaaucugcgccucauaccauaccgucagucuccugcggucuacgagccaaaaguccauuguugcauauaccaugucauuaggcgccgauagcucuauagcuuacuccaacaauacaaucgccauuccaacuaacuucaguaucagcauuaccacagaagugaugcccgugucuauggcaaaaacuuccguagacuguaauauguacaucugcggugauucaaccgagugugcgaaccugcuacuccaguaugggaguuuuugcacgcagcugaaccgagcucuuagcggcauagccgcagagcaggaccgcaauacaagagaagucuucgcccaagugaagcagauguacaaaaccccgacuuugaaguauuuuggaggcuucaacuucucgcagauccugccugauccacucaaacccacaaagagguccuuuauugaggaccugcuuuucaauaagguuacccuggcugaugccggguuuaugaaacaguacggagaauguuugggugacaucaacgcacgggaucucauuugcgcucaaaaguucaauggccugacuguguuaccuccccugcuaaccgacgauaugaucgccgcguauacagccgcucucgucucugggacggcaaccgccggauggacuuuuggcgcuggugccgcacugcagauaccauucgcgaugcagauggccuaccgcuuuaacgggauuggcgugacacagaauguucuuuaugagaaccaaaaacagaucgcuaaucaguucaacaaggccauuagccaaauccaggaaucauugaccacaaccaguacugcacugggaaaacuccaggacgugguaaaucagaacgcucaagcccugaauacguuagucaagcagcuguccucuaacuuuggcgcaauaagcuccgugcuuaaugauaucuugucaagacucgacccucccgaggccgaggugcagauugacaggcugaucacagggcgucuacagagccugcaaaccuacgucacucagcagcucauucgggcugcggaaauccgagccagugcaaaccuggcugccaccaagaugucugagugcguucuuggacaguccaaaagaguggauuucuguggcaaggguuaccacuugaugagcuuuccacaagccgcuccgcaugggguaguguuccugcacgucacauaugugccuucgcaggaaaggaacuuuacuaccgcacccgccauaugccacgagggaaaagcguacuucccacgcgaaggcguuuucguguuuaaugguacaucaugguucauuacgcagcggaacuuuuucucuccccaaaucaucaccacugacaauacauuugucaguggcaacugugaugugguuauugggaucauuaauaacaccguguaugacccuuuacagccagagcucgauuccuucaaggaggaacuggacaaauacuuuaagaaucauacuagccccgaugucgaccuuggagauauaucuggcaucaacgcuagcguagugaauauucagaaagagaucgacagacugaacgaaguugccaagaauuugaacgagucccucauugaucugcaggagcuagggaaguaugaacaauacaucaaauggccuugguauguguggcugggauucauagcaggccucaucgccauugucauggugacaauccugcuuugcuguaugaccucaugcuguaguugcuugaagggugcuuguagcugcgggucuuguugcaaauuugacgaggacgauuccgaaccgguacugaagggagugaaauuacacuacacgugaggacuagucccuguucccagagcccacuuuuuuuucuuuuuuugaaauaaaauagccugucuuucagaucucaaaggcucuuuucagagccaccaaaaaaaaaaaaaaaaaaaaaaaaaaaaaaaaaaaaaaaaaaaaaaaaaaaaaaaaaaaaaaaaaaaaaaaaaaaaaaaaaaaaaaaaaaaaaaaaaaaaa

SEQ ID NO: 15091 - RNA, 3845 nt, Artificial Sequence
  SARS-CoV/Tor2__NP_828851.1 spike protein mRNA human (variant)
aggagagucccgcagucggcguccagcggcucugcuuguucgugugugugucguugcaggccuuauucaagcuuaccauguucaucuuucugcuguuccuuacccugacaagcggcuccgacuuggauagaugcacuacguuugacgaugugcaggcccccaacuacacccaacacacaucuucaaugagaggggucuauuacccugacgagauuuuccggagugauacuuuauaucugacccaggaccuauuucucccauucuacagcaauguuacaggauuucauaccauaaaccacacuuucgguaauccggugauccccuuuaaggauggcauuuauuucgcugcaacagaaaaauccaacguagugcgcgggugggucuuuggaucuaccaugaauaacaagucgcagucagugaucauuaucaauaacagcacgaauguugugauacgagccuguaacuucgagcugugcgacaauccauuuuucgcggucaguaaaccaaugggcacucagacccauacaaugaucuucgauaacgcuuuuaauuguacuuucgaauacauuuccgacgccuuuucucuugaugugagcgagaaguccgguaacuucaaacaccuccgugaauuuguauucaagaauaaggacggguuuuuguauguuuacaaaggauaccaacccaucgauguggucagagaccucccuucaggcuucaacacccugaagccaauuuuuaaacugccccucggcaucaacauaacaaauuucagggcaauuuuaaccgccuuuaguccugcucaggacaucugggggacgagcgcagccgcuuauuucgugggauaccugaagccaacuacauuuaugcuuaaauaugaugagaacgguaccauuacugacgccguggauugcucucagaauccguuggcggagcugaaguguuccgucaagucauucgaaaucgacaaaggcaucuaccagacaagcaacuuccggguugugcccaguggggauguagugcgcuuuccuaauauuaccaaccuaugcccauucggagaggucuuuaaugcaacgaaguuccccucuguguaugccugggaaaggaaaaagauauccaacuguguugcugacuacagcgugcucuauaauucgaccuuuuucucuacauuuaaaugcuacggcgucuccgccacuaagcugaacgaucuuuguuucucaaauguguacgcagacaguuuuguaguuaaaggugaugacgugaggcaaaucgcuccugggcagaccggagucauugccgauuauaacuacaagcugccagacgacuucaugggcugcguguuggcguggaauacacggaacaucgaugccacuagcaccggcaauuauaacuacaaguaucgcuaccuccgacaugggaaacugagacccuuugagagggacauauccaacgucccguucucuccugauggaaagcccuguacaccuccugcauuaaauugcuauuggccccugaacgacuacgguuuuuacaccacuacgggcauuggguaucagccauaccgggugguugugcucagcuucgagcuucugaaugcucccgccacaguaugcggaccuaaauugucaaccgaucuaaucaagaaccagugugucaauuucaacuuuaauggccugacugguaccggggugcucacaccaaguuccaaacguuuccaaccguuucagcaguucggccgcgacguuagcgauuuuaccgacucugugagagaucccaagacuucagaaauccuggacauuaguccuugcgcuuucggaggcgucagcgugaucacaccagggacgaacgccuccucugagguagcagugcuuuaucaagauguuaauuguaccgacgucucgacugccauucacgcugaucagcugacacccgcguggaggauauacagcaccggaaacaauguguuucagacacaggcagguugcuugaucggcgccgaacacguggacacuuccuaugagugugacauuccuaucggggcuggaaucugcgccucauaccauaccgucagucuccugcggucuacgagccaaaaguccauuguugcauauaccaugucauuaggcgccgauagcucuauagcuuacuccaacaauacaaucgccauuccaacuaacuucaguaucagcauuaccacagaagugaugcccgugucuauggcaaaaacuuccguagacuguaauauguacaucugcggugauucaaccgagugugcgaaccugcuacuccaguaugggaguuuuugcacgcagcugaaccgagcucuuagcggcauagccgcagagcaggaccgcaauacaagagaagucuucgcccaagugaagcagauguacaaaaccccgacuuugaaguauuuuggaggcuucaacuucucgcagauccugccugauccacucaaacccacaaagagguccuuuauugaggaccugcuuuucaauaagguuacccuggcugaugccggguuuaugaaacaguacggagaauguuugggugacaucaacgcacgggaucucauuugcgcucaaaaguucaauggccugacuguguuaccuccccugcuaaccgacgauaugaucgccgcguauacagccgcucucgucucugggacggcaaccgccggauggacuuuuggcgcuggugccgcacugcagauaccauucgcgaugcagauggccuaccgcuuuaacgggauuggcgugacacagaauguucuuuaugagaaccaaaaacagaucgcuaaucaguucaacaaggccauuagccaaauccaggaaucauugaccacaaccaguacugcacugggaaaacuccaggacgugguaaaucagaacgcucaagcccugaauacguuagucaagcagcuguccucuaacuuuggcgcaauaagcuccgugcuuaaugauaucuugucaagacucgacccucccgaggccgaggugcagauugacaggcugaucacagggcgucuacagagccugcaaaccuacgucacucagcagcucauucgggcugcggaaauccgagccagugcaaaccuggcugccaccaagaugucugagugcguucuuggacaguccaaaagaguggauuucuguggcaaggguuaccacuugaugagcuuuccacaagccgcuccgcaugggguaguguuccugcacgucacauaugugccuucgcaggaaaggaacuuuacuaccgcacccgccauaugccacgagggaaaagcguacuucccacgcgaaggcguuuucguguuuaaugguacaucaugguucauuacgcagcggaacuuuuucucuccccaaaucaucaccacugacaauacauuugucaguggcaacugugaugugguuauugggaucauuaauaacaccguguaugacccuuuacagccagagcucgauuccuucaaggaggaacuggacaaauacuuuaagaaucauacuagccccgaugucgaccuuggagauauaucuggcaucaacgcuagcguagugaauauucagaaagagaucgacagacugaacgaaguugccaagaauuugaacgagucccucauugaucugcaggagcuagggaaguaugaacaaugaggacuagucccuguucccagagcccacuuuuuuuucuuuuuuugaaauaaaauagccugucuuucagaucucaaaggcucuuuucagagccaccaaaaaaaaaaaaaaaaaaaaaaaaaaaaaaaaaaaaaaaaaaaaaaaaaaaaaaaaaaaaaaaaaaaaaaaaaaaaaaaaaaaaaaaaaaaaaaaaaaaaa

SEQ ID NO: 15092 - RNA, 3926 nt, Artificial Sequence
  SARS-CoV/Tor2__NP_828851.1 spike protein mRNA human (variant)
aggagagucccgcagucggcguccagcggcucugcuuguucgugugugugucguugcaggccuuauucaagcuuaccauguucaucuuucugcuguuccuuacccugacaagcggcuccgacuuggauagaugcacuacguuugacgaugugcaggcccccaacuacacccaacacacaucuucaaugagaggggucuauuacccugacgagauuuuccggagugauacuuuauaucugacccaggaccuauuucucccauucuacagcaauguuacaggauuucauaccauaaaccacacuuucgguaauccggugauccccuuuaaggauggcauuuauuucgcugcaacagaaaaauccaacguagugcgcgggugggucuuuggaucuaccaugaauaacaagucgcagucagugaucauuaucaauaacagcacgaauguugugauacgagccuguaacuucgagcugugcgacaauccauuuuucgcggucaguaaaccaaugggcacucagacccauacaaugaucuucgauaacgcuuuuaauuguacuuucgaauacauuuccgacgccuuuucucuugaugugagcgagaaguccgguaacuucaaacaccuccgugaauuuguauucaagaauaaggacggguuuuuguauguuuacaaaggauaccaacccaucgauguggucagagaccucccuucaggcuucaacacccugaagccaauuuuuaaacugccccucggcaucaacauaacaaauuucagggcaauuuuaaccgccuuuaguccugcucaggacaucugggggacgagcgcagccgcuuauuucgugggauaccugaagccaacuacauuuaugcuuaaauaugaugagaacgguaccauuacugacgccguggauugcucucagaauccguuggcggagcugaaguguuccgucaagucauucgaaaucgacaaaggcaucuaccagacaagcaacuuccggguugugcccaguggggauguagugcgcuuuccuaauauuaccaaccuaugcccauucggagaggucuuuaaugcaacgaaguuccccucuguguaugccugggaaaggaaaaagauauccaacuguguugcugacuacagcgugcucuauaauucgaccuuuuucucuacauuuaaaugcuacggcgucuccgccacuaagcugaacgaucuuuguuucucaaauguguacgcagacaguuuuguaguuaaaggugaugacgugaggcaaaucgcuccugggcagaccggagucauugccgauuauaacuacaagcugccagacgacuucaugggcugcguguuggcguggaauacacggaacaucgaugccacuagcaccggcaauuauaacuacaaguaucgcuaccuccgacaugggaaacugagacccuuugagagggacauauccaacgucccguucucuccugauggaaagcccuguacaccuccugcauuaaauugcuauuggccccugaacgacuacgguuuuuacaccacuacgggcauuggguaucagccauaccgggugguugugcucagcuucgagcuucugaaugcucccgccacaguaugcggaccuaaauugucaaccgaucuaaucaagaaccagugugucaauuucaacuuuaauggccugacugguaccggggugcucacaccaaguuccaaacguuuccaaccguuucagcaguucggccgcgacguuagcgauuuuaccgacucugugagagaucccaagacuucagaaauccuggacauuaguccuugcgcuuucggaggcgucagcgugaucacaccagggacgaacgccuccucugagguagcagugcuuuaucaagauguuaauuguaccgacgucucgacugccauucacgcugaucagcugacacccgcguggaggauauacagcaccggaaacaauguguuucagacacaggcagguugcuugaucggcgccgaacacguggacacuuccuaugagugugacauuccuaucggggcuggaaucugcgccucauaccauaccgucagucuccugcggucuacgagccaaaaguccauuguugcauauaccaugucauuaggcgccgauagcucuauagcuuacuccaacaauacaaucgccauuccaacuaacuucaguaucagcauuaccacagaagugaugcccgugucuauggcaaaaacuuccguagacuguaauauguacaucugcggugauucaaccgagugugcgaaccugcuacuccaguaugggaguuuuugcacgcagcugaaccgagcucuuagcggcauagccgcagagcaggaccgcaauacaagagaagucuucgcccaagugaagcagauguacaaaaccccgacuuugaaguauuuuggaggcuucaacuucucgcagauccugccugauccacucaaacccacaaagagguccuuuauugaggaccugcuuuucaauaagguuacccuggcugaugccggguuuaugaaacaguacggagaauguuugggugacaucaacgcacgggaucucauuugcgcucaaaaguucaauggccugacuguguuaccuccccugcuaaccgacgauaugaucgccgcguauacagccgcucucgucucugggacggcaaccgccggauggacuuuuggcgcuggugccgcacugcagauaccauucgcgaugcagauggccuaccgcuuuaacgggauuggcgugacacagaauguucuuuaugagaaccaaaaacagaucgcuaaucaguucaacaaggccauuagccaaauccaggaaucauugaccacaaccaguacugcacugggaaaacuccaggacgugguaaaucagaacgcucaagcccugaauacguuagucaagcagcuguccucuaacuuuggcgcaauaagcuccgugcuuaaugauaucuugucaagacucgacccucccgaggccgaggugcagauugacaggcugaucacagggcgucuacagagccugcaaaccuacgucacucagcagcucauucgggcugcggaaauccgagccagugcaaaccuggcugccaccaagaugucugagugcguucuuggacaguccaaaagaguggauuucuguggcaaggguuaccacuugaugagcuuuccacaagccgcuccgcaugggguaguguuccugcacgucacauaugugccuucgcaggaaaggaacuuuacuaccgcacccgccauaugccacgagggaaaagcguacuucccacgcgaaggcguuuucguguuuaaugguacaucaugguucauuacgcagcggaacuuuuucucuccccaaaucaucaccacugacaauacauuugucaguggcaacugugaugugguuauugggaucauuaauaacaccguguaugacccuuuacagccagagcucgauuccuucaaggaggaacuggacaaauacuuuaagaaucauacuagccccgaugucgaccuuggagauauaucuggcaucaacgcuagcguagugaauauucagaaagagaucgacagacugaacgaaguugccaagaauuugaacgagucccucauugaucugcaggagcuagggaaguaugaacaaggaggcuacaucccugaggcaccgagggacggucaggccuaugugcgcaaagacggggaauggguccugcucucaacauucugaggacuagucccuguucccagagcccacuuuuuuuucuuuuuuugaaauaaaauagccugucuuucagaucucaaaggcucuuuucagagccaccaaaaaaaaaaaaaaaaaaaaaaaaaaaaaaaaaaaaaaaaaaaaaaaaaaaaaaaaaaaaaaaaaaaaaaaaaaaaaaaaaaaaaaaaaaaaaaaaaaaaa

SEQ ID NO: 15093 - RNA, 4334 nt, Artificial Sequence
  HCoV/OC43__P36334.1 spike protein mRNA human (1-1353)
aggagagucccgcagucggcguccagcggcucugcuuguucgugugugugucguugcaggccuuauucaagcuuaccauguuccugauccuccuuauuagccugcccaccgccuuugcugugauaggcgacuugaagugcacauccgauaacaucaaugacaaagauacugggccuccaccgauuucuacggacaccgucgauguuacaaacggauuagguacuuacuaugugcuggacagaguauaccuaaauaccacacucuuccugaacggcuauuaccccaccucagggaguacuuauaggaauauggcacuuaagggaagcgugcuguugucccggcucugguuuaaaccuccauuccugucugauuuuaucaacggcauuuucgccaaggucaaaaauacaaaggugaucaaggaccgcguuauguacucggaguuucccgcgauaaccaucgguucaacguucgugaacacuagcuauagugucgugguacagccucgaaccauuaauuccacacaagauggggacaacaaacugcagggacucuuagaaguuucugugugucaguacaauaugugcgaguacccacagacuaucugucaccccaaccugggcaaucaucguaaggaacuuuggcacuuggauaccggcgucgugagcugccuguauaaaagaaacuuuacauacgacgugaaugcugauuaucuauacuuccauuuuuaucaagaagggggaaccuucuacgccuauuuuacggacacuggugucguuacaaaguuccucuucaacguguaccugggcauggcacuuucccacuacuauguaaugccucugaccuguaacucaaaauugacucucgaguacugggugacaccacugaccaguaggcaguauuuacuggccuuuaaucaggacgggauuaucuucaacgcugaggauugcaugagcgacuuuaugucugagauaaaguguaagacgcaguccauugcaccgcccaccggagucuacgaacucaauggcuauacagugcaaccuaucgccgauguuuaccggcgcaaaccaaaccuucccaauugcaacauugaggcuuggcugaaugacaagucagugccuagcccauugaacugggaaagaaaaacuuucaguaauuguaacuuuaauaugucuucccuaaugagcuucauccaggccgauucguuuaccugcaacaauaucgacgcggcaaagauuuaugguauguguuucucuuccauaacaaucgauaaauuugccauucccaacgggaggaaggucgaccugcagcucggaaaucugggcuaccuucagucauucaacuaccggaucgauacuaccgcuacaaguugccaacuguauuacaacuugccggccgcaaaugugagcguaucccgcuuuaacccuucuaccuggaauaaacgauucggcuuuauagaggacagcguuuucaagcccagaccagcuggggugcucacuaaccaugaugucguguaugcccagcacugcuucaaggcgccuaaaaauuuuugucccugcaagcugaacggaucaugugucgguaguggcccagggaaaaauaacggaauuggcacgugccccgccgguacaaauuacuuaaccugugacaaccugugcacuccugacccaaucaccuucacagggaccuauaaguguccgcagacuaaaucccuagugggcaucggagagcacugcagcggccucgcaguuaagucugauuacugugggggaaauucaugcacauguaggccccaagcguuucuggguuggagugccgacagcugccuucagggcgauaagugcaacauuuucgcuaauuuuaucuugcaugacgugaacuccgggcugacguguucuaccgaucuccagaaagccaauacugacauuauacugggaguaugcgucaacuaugaucuuuacggcauccugggucaggggauuuucguggaaguuaacgcaacauacuauaauucguggcaaaacuugcucuacgacagcaauggcaaccuguauggauuucgggauuacaucaucaaucguaccuucaugauucgcuccuguuauucaggcagagugagugccgcuuuucacgcgaacucuagcgagccugcauuacuguucaggaauauaaagugcaacuacgucuuuaauaacucccuaacacggcagcuccagccaaucaauuauuucgacucauaccuggggugugugguaaacgccuacaauagcacugcuauuucugugcagaccugcgaucuuacgguuggauccgguuauugugucgacuacaguaaaaaccgacgcagcagaggcgccaucaccacaggguauagguuuacuaauuucgaacccuucaccgugaacucugugaacgauuccuuggagccugucggaggccuguacgaaauucaaaucccaucagaguuuacaauagguaauaugguugaguucauccagacuucuagccccaaggugaccauugacugcgcagccuuuguguguggggacuaugcugccugcaaaucgcagcucguagaauacggcuccuucugugauaacaucaaugcaauucugacggaggucaacgaauuacuggacacaacccagcuucaaguggcuaauucuuugaugaacggaguuacucucagcacaaagcugaaggauggcgugaauuuuaacgucgacgauaucaauuucucaccggugcuagggugccugggaagugagugcuccaaagcuaguagccgguccgccauagaagaccuccuguuugauaagguuaaacuuucagacgugggcuucguagaggcauauaacaauuguaccgguggggccgagauucgcgauuugaucugcguccagagcuacaagggaauuaaagugcugccuccauuacucagugaaaaccagaucucuggcuacacucuggcugccaccuccgcaagccuuuuucccccuuggacagcugccgcgggugugcccuucuaucugaauguccaguacagaauaaacggcuuggggguuacgauggacgugcucucgcaaaaucagaagcugaucgccaacgcuuuuaauaacgcacuauaugccauucaggagggauucgaugcuaccaacucagcccugguaaagauccaagcaguggucaaugcgaacgccgaagcucucaauaaccugcuucagcaguugucuaauagguucggcgccauuagugcaucccugcaggagaucuuaagccgucucgacgcucuggaagccgaggcacaaauagaucggcuuauuaacgggcgacugacugcccuaaaugcuuacgugucucagcagcucagcgacuccacacugguuaaauuuucagcggcccaggcaauggagaaggugaacgaaugugucaaaagucaaagcucuagaaucaauuucugcggaaacggcaaucauaucauuuccuuggugcagaacgcuccauauggucuguacuuuauccacuucucauauguuccuaccaaguacgugacagccagggucagucccggguuauguauugccggagaccgcggcauagcuccaaaaagcgguuacuuuguaaaugugaacaauacuuggauguauaccggcuccggguacuauuacccggagccuaucacggaaaacaacguuguggucaugucuacaugcgcagugaauuauaccaaggcccccuacguaaugcucaacacuucgauuccaaaucugcccgauuucaaagaggagcuugaccagugguuuaagaaccagaccagcguggcgccugaucugucauuggacuauaucaaugucacauuccucgaucugcaaguugaaaugaaccggcuacaggaggcuauuaaggugcugaaucaguccuacaucaaccuuaaagacauaggaacuuacgaauauuacgugaaguggccaugguaugucuggcuccugaucuguuuggccggcguggcaaugcugguuuuacucuuuuucauuugcuguugcaccggguguggaacaaguugcuuuaaaaagugcggcgguuguugcgaugacuacacgggguaucaagagcugguaaucaaaaccucucacgaugacugaggacuagucccuguucccagagcccacuuuuuuuucuuuuuuugaaauaaaauagccugucuuucagaucucaaaggcucuuuucagagccaccaaaaaaaaaaaaaaaaaaaaaaaaaaaaaaaaaaaaaaaaaaaaaaaaaaaaaaaaaaaaaaaaaaaaaaaaaaaaaaaaaaaaaaaaaaaaaaaaaaaaa

SEQ ID NO: 15094 - RNA, 4334 nt, Artificial Sequence
  HCoV/OC43__P36334.1 spike protein mRNA human (1-1353)(A1070P_L1071P)
aggagagucccgcagucggcguccagcggcucugcuuguucgugugugugucguugcaggccuuauucaagcuuaccauguuccugauccuccuuauuagccugcccaccgccuuugcugugauaggcgacuugaagugcacauccgauaacaucaaugacaaagauacugggccuccaccgauuucuacggacaccgucgauguuacaaacggauuagguacuuacuaugugcuggacagaguauaccuaaauaccacacucuuccugaacggcuauuaccccaccucagggaguacuuauaggaauauggcacuuaagggaagcgugcuguugucccggcucugguuuaaaccuccauuccugucugauuuuaucaacggcauuuucgccaaggucaaaaauacaaaggugaucaaggaccgcguuauguacucggaguuucccgcgauaaccaucgguucaacguucgugaacacuagcuauagugucgugguacagccucgaaccauuaauuccacacaagauggggacaacaaacugcagggacucuuagaaguuucugugugucaguacaauaugugcgaguacccacagacuaucugucaccccaaccugggcaaucaucguaaggaacuuuggcacuuggauaccggcgucgugagcugccuguauaaaagaaacuuuacauacgacgugaaugcugauuaucuauacuuccauuuuuaucaagaagggggaaccuucuacgccuauuuuacggacacuggugucguuacaaaguuccucuucaacguguaccugggcauggcacuuucccacuacuauguaaugccucugaccuguaacucaaaauugacucucgaguacugggugacaccacugaccaguaggcaguauuuacuggccuuuaaucaggacgggauuaucuucaacgcugaggauugcaugagcgacuuuaugucugagauaaaguguaagacgcaguccauugcaccgcccaccggagucuacgaacucaauggcuauacagugcaaccuaucgccgauguuuaccggcgcaaaccaaaccuucccaauugcaacauugaggcuuggcugaaugacaagucagugccuagcccauugaacugggaaagaaaaacuuucaguaauuguaacuuuaauaugucuucccuaaugagcuucauccaggccgauucguuuaccugcaacaauaucgacgcggcaaagauuuaugguauguguuucucuuccauaacaaucgauaaauuugccauucccaacgggaggaaggucgaccugcagcucggaaaucugggcuaccuucagucauucaacuaccggaucgauacuaccgcuacaaguugccaacuguauuacaacuugccggccgcaaaugugagcguaucccgcuuuaacccuucuaccuggaauaaacgauucggcuuuauagaggacagcguuuucaagcccagaccagcuggggugcucacuaaccaugaugucguguaugcccagcacugcuucaaggcgccuaaaaauuuuugucccugcaagcugaacggaucaugugucgguaguggcccagggaaaaauaacggaauuggcacgugccccgccgguacaaauuacuuaaccugugacaaccugugcacuccugacccaaucaccuucacagggaccuauaaguguccgcagacuaaaucccuagugggcaucggagagcacugcagcggccucgcaguuaagucugauuacugugggggaaauucaugcacauguaggccccaagcguuucuggguuggagugccgacagcugccuucagggcgauaagugcaacauuuucgcuaauuuuaucuugcaugacgugaacuccgggcugacguguucuaccgaucuccagaaagccaauacugacauuauacugggaguaugcgucaacuaugaucuuuacggcauccugggucaggggauuuucguggaaguuaacgcaacauacuauaauucguggcaaaacuugcucuacgacagcaauggcaaccuguauggauuucgggauuacaucaucaaucguaccuucaugauucgcuccuguuauucaggcagagugagugccgcuuuucacgcgaacucuagcgagccugcauuacuguucaggaauauaaagugcaacuacgucuuuaauaacucccuaacacggcagcuccagccaaucaauuauuucgacucauaccuggggugugugguaaacgccuacaauagcacugcuauuucugugcagaccugcgaucuuacgguuggauccgguuauugugucgacuacaguaaaaaccgacgcagcagaggcgccaucaccacaggguauagguuuacuaauuucgaacccuucaccgugaacucugugaacgauuccuuggagccugucggaggccuguacgaaauucaaaucccaucagaguuuacaauagguaauaugguugaguucauccagacuucuagccccaaggugaccauugacugcgcagccuuuguguguggggacuaugcugccugcaaaucgcagcucguagaauacggcuccuucugugauaacaucaaugcaauucugacggaggucaacgaauuacuggacacaacccagcuucaaguggcuaauucuuugaugaacggaguuacucucagcacaaagcugaaggauggcgugaauuuuaacgucgacgauaucaauuucucaccggugcuagggugccugggaagugagugcuccaaagcuaguagccgguccgccauagaagaccuccuguuugauaagguuaaacuuucagacgugggcuucguagaggcauauaacaauuguaccgguggggccgagauucgcgauuugaucugcguccagagcuacaagggaauuaaagugcugccuccauuacucagugaaaaccagaucucuggcuacacucuggcugccaccuccgcaagccuuuuucccccuuggacagcugccgcgggugugcccuucuaucugaauguccaguacagaauaaacggcuuggggguuacgauggacgugcucucgcaaaaucagaagcugaucgccaacgcuuuuaauaacgcacuauaugccauucaggagggauucgaugcuaccaacucagcccugguaaagauccaagcaguggucaaugcgaacgccgaagcucucaauaaccugcuucagcaguugucuaauagguucggcgccauuagugcaucccugcaggagaucuuaagccgucucgacccaccugaagcugaggcccaaauagaucggcugauuaacgggcgacuuacugcacugaaugccuacgugucucagcagcuaagcgacuccacacucguuaaauuuucagcugcgcaggccauggagaaggugaacgaaugugucaaaagucaaagcucuagaaucaauuucugcggaaacggcaaucauaucauuucccuggugcagaacgcacccuaugguuuguacuuuauccacuucucauauguuccaaccaaguacgugacagcuagggucaguccggggcuguguauugccggagaccgcggcauagccccuaaaagcgguuacuuuguaaaugugaacaauacuuggauguauaccggcuccggguacuauuaccccgagccaaucacggaaaacaacguuguggucaugucuacaugcgcugugaauuauaccaaggcacccuacguaauguuaaacacuucgauuccuaaucucccagauuucaaagaggagcuggaccagugguuuaagaaccagaccagcguggcccccgaucuuucacuggacuauaucaaugucacauucuuggaucuccaaguugaaaugaaccggcugcaggaggcgauuaaggugcuaaaucaguccuacaucaaccugaaagacauaggaacuuacgaauauuacgugaaguggccuugguaugucuggcuucucaucugucuggcuggcguggccauguugguucuguuauuuuucauuugcuguugcaccggguguggaacaaguugcuuuaaaaagugcggcgguuguugcgaugacuacacgggguaucaagagcucguaaucaaaaccucucacgaugacugaggacuagucccuguucccagagcccacuuuuuuuucuuuuuuugaaauaaaauagccugucuuucagaucucaaaggcucuuuucagagccaccaaaaaaaaaaaaaaaaaaaaaaaaaaaaaaaaaaaaaaaaaaaaaaaaaaaaaaaaaaaaaaaaaaaaaaaaaaaaaaaaaaaaaaaaaaaaaaaaaaaaa

SEQ ID NO: 15095 - RNA, 4361 nt, Artificial Sequence
  HCoV/OC43/1783A_10__AIL49484.1 spike protein mRNA human (1-1362)
aggagagucccgcagucggcguccagcggcucugcuuguucgugugugugucguugcaggccuuauucaagcuuaccauguuccugauccuccuuauuagccugcccaccgccuuugcugugauaggcgacuugaagugcccuuuagauuccagaacagggucucugaacaauaucgacacuggaccaccgucaauuaguacggcaaccgucgauguuacaaacggucuaggcacuuacuaugugcucgacaggguauaccugaauaccacacuuuuccugaacggguauuaccccaccagcggauccacuuaucggaauauggccuugaaaggcacagauaagcucucuacccugugguuuaaaccuccauuccugucggacuuuaucaacgguauuuucgcgaaggugaaaaauacgaaggucuuuaaggauggggugauguacucagaguuccccgcuaucacuauaggaagcaccuuuguuaacacaaguuauuccguggucgugcagccucgcacuaucaauucuacccaagacggcguaaacaaacuccagggcuuacuggaaguuagcgugugucaguacaauaugugcgaguacccacacacaauuugucaucccaaacuugggaaccacuucaaggaauuguggcauauggauaccggagucguguccugccuguauaagcgaaauuuuacguacgacgugaacgccacuuaucuauacuuccacuuuuaucaggaggguggcacauucuacgcauauuucaccgauacuggggucguuacaaaauuucucuucaauguguaccugggaauggcccuuucacauuacuauguaaugccucugaccuguaucagucguagagacauuggcuuuacguuggaauacugggugaccccacucacaagcaggcaauaucuguuagcuuucaaccaggaugguaucauauuuaacgcagucgacugcaugucugacuucauguccgagauuaaguguaagacucagucaaucgccccgcccaccgggguguacgagcugaauggauauacaguucagccuauugcugauguguaccggcgcaaaccagaccuccccaacugcaauaucgaagccuggcuuaacgauaagagcgucccuaguccacugaauugggagagaaaaacuuuuucuaacuguaauuucaacauguccagcuugaugucguuuauccaagcggacucuuuuaccugcaauaacauugaugcagccaagauauauggcauguguuucuccucaaucacaauugacaaauucgcuauccccaauggcaggaagguggaucuacagcuggggaaccucggauaccugcagaguuuuaauuaccggauagacaccacugccacgagcugccagcuuuauuacaaccugccggcagcuaauguauccguuucucgcuucaacccuagcacauggaacaaacgauucgguuuuauugaaaauucaguguucaagccccaaccagccggcgucuugaccaaccacgauguggucuaugcgcagcacugcuuuaaggccccuaaaaauuucugucccugcaagcucaacaguucccuguguguggggagcggaccaggcaaaaauaacgguaucgggacuugccccgcaggcaccaauuacuuaacaugucauaaccugugcaauccugacccaaucaccuuuacuggaccguauaaguguccccagacaaaaucucuaguuggcauuggggagcacugcucaggacucgcugugaagagugauuacugugguggcaacccuugcacgugucaaccacaggccuuccugggguggagcgcugacuccugccuucagggagacaagugcaauaucuuugccaacuugauucugcaugauguaaauucuggccucaccuguucgacugaccugcagaaagcaaacacagauauaaaacuuggugucugcgugaauuaugaccuguacgggaucagcggccaaggaauuuucguugaggugaacgccaccuacuauaacuccuggcagaauuugcucuacgauucaaacggcaaucuguauggguuuagagacuacaucacaaacaggacuuucaugauccggaguuguuauucuggacgugucagcgcugcguuucacgcaaauuccucagaacccgccuuacuguuccgcaacauuaagugcaauuacguguuuaacaauagccuaauaagacagcuccagccuaucaacuauuucgauucuuaccuggguuguguagugaaugcuuacaacuccaccgccauuaguguucaaacgugcgaccuuaccgucggcagcggguauuguguggauuacucuaagaauaggcggucccgacgcgcaaucacaacuggauauagauucaccaacuuugagccauucacagugaauagcgucaacgacaguuuggaacccguuggcggucuguacgagauucagaucccgagcgaauuuacuauagggaacauggaggaguucauccagaccucguccccuaaagugacgauugauugcgccgcuuuuguguguggcgacuaugccgcaugcaagucucagcucguagaauacggaucauucugugauaauaucaacgcgauucugacagaggucaaugaauuacuggacaccacucaacuucagguggcuaacucauugaugaauggcguuacacucaguaccaagcugaaagacggggugaacuuuaaugucgaugacaucaacuucuccucugugcuaggaugccugggcagcgagugcuccaaggccucaagcaggagugcaauagaagaucuccuguuugacaaaguuaaacuuucugauguggguuucguagccgcuuauaauaacuguacugggggagccgagauucgggacuugaucugcguccaguccuacaagggcauuaaggugcugccacccuuacucagcgagaaucagaucucggguuacacccuggcagcuacaucagccucucuuuuuccucccuggacggcggccgcuggcgugccauucuaucugaacguccaauaccgcauaaauggguugggaguuaccauggaugugcucagucagaaccagaagcugaucgcaaaugccuucaacaaugcucuagacgccauucaagaaggcuuugaugcaacuaacuccgcgcugguaaaaauccaggccguggucaacgcuaaugccgaggcacucaacaaucugcuucagcaguugagcaacagauucggggcuauuucuagcucccugcaagaaaucuuaucaaggcucgacgcccuggaggcagaagcccagauagaucgucuuauuaauggacggcugacagcucuaaacgcguaugugagucagcagcucagcgacucuacccugguuaaguuuuccgccgcacaagcuauggagaaagugaaugagugugucaagucacagaguagccgaaucaacuucugcggcaaugguaaccacaucauuuccuuggugcagaaugccccuuacgggcuguauuuuauccauuucucuuacguucccacaaaauaugugacugccaaggucucgccaggauuauguauugcuggcgauagagguauagcaccgaaaagcggcuacuuuguaaacgugaauaacaccuggauguacacggggucaggauauuacuauccugaacccaucacagagaauaacguuguggucaugaguaccugcgccgugaacuacacuaaggcgccauauguaaugcucaauaccuccacacccaaccugccugacuucagggaggaacuugaccagugguuuaagaaucaaacuucuguggcuccagaucugagcuuggacuacauuaacgucaccuuccucgaucugcagguugagaugaaucgccuacaggaagccaucaaagugcugaaccaauccuauauuaaucuuaaggacaucggcacauacgaguacuaugugaaauggcccugguacgucuggcuccugauaggguuggcaggaguggccaugcugguuuuacucuuuuucaucuguugcuguacgggcugcgguaccucauguuuuaagaaaugcgggggaugcugugaugacuauacuggcuaccaggaacugguaauuaagacaucucacgaugacugaggacuagucccuguucccagagcccacuuuuuuuucuuuuuuugaaauaaaauagccugucuuucagaucucaaaggcucuuuucagagccaccaaaaaaaaaaaaaaaaaaaaaaaaaaaaaaaaaaaaaaaaaaaaaaaaaaaaaaaaaaaaaaaaaaaaaaaaaaaaaaaaaaaaaaaaaaaaaaaaaaaaa

SEQ ID NO: 15096 - RNA, 4361 nt, Artificial Sequence
  HCoV/OC43/1783A_10__AIL49484.1 spike protein mRNA human (1-1362)(A1079P_L1080P)
aggagagucccgcagucggcguccagcggcucugcuuguucgugugugugucguugcaggccuuauucaagcuuaccauguuccugauccuccuuauuagccugcccaccgccuuugcugugauaggcgacuugaagugcccuuuagauuccagaacagggucucugaacaauaucgacacuggaccaccgucaauuaguacggcaaccgucgauguuacaaacggucuaggcacuuacuaugugcucgacaggguauaccugaauaccacacuuuuccugaacggguauuaccccaccagcggauccacuuaucggaauauggccuugaaaggcacagauaagcucucuacccugugguuuaaaccuccauuccugucggacuuuaucaacgguauuuucgcgaaggugaaaaauacgaaggucuuuaaggauggggugauguacucagaguuccccgcuaucacuauaggaagcaccuuuguuaacacaaguuauuccguggucgugcagccucgcacuaucaauucuacccaagacggcguaaacaaacuccagggcuuacuggaaguuagcgugugucaguacaauaugugcgaguacccacacacaauuugucaucccaaacuugggaaccacuucaaggaauuguggcauauggauaccggagucguguccugccuguauaagcgaaauuuuacguacgacgugaacgccacuuaucuauacuuccacuuuuaucaggaggguggcacauucuacgcauauuucaccgauacuggggucguuacaaaauuucucuucaauguguaccugggaauggcccuuucacauuacuauguaaugccucugaccuguaucagucguagagacauuggcuuuacguuggaauacugggugaccccacucacaagcaggcaauaucuguuagcuuucaaccaggaugguaucauauuuaacgcagucgacugcaugucugacuucauguccgagauuaaguguaagacucagucaaucgccccgcccaccgggguguacgagcugaauggauauacaguucagccuauugcugauguguaccggcgcaaaccagaccuccccaacugcaauaucgaagccuggcuuaacgauaagagcgucccuaguccacugaauugggagagaaaaacuuuuucuaacuguaauuucaacauguccagcuugaugucguuuauccaagcggacucuuuuaccugcaauaacauugaugcagccaagauauauggcauguguuucuccucaaucacaauugacaaauucgcuauccccaauggcaggaagguggaucuacagcuggggaaccucggauaccugcagaguuuuaauuaccggauagacaccacugccacgagcugccagcuuuauuacaaccugccggcagcuaauguauccguuucucgcuucaacccuagcacauggaacaaacgauucgguuuuauugaaaauucaguguucaagccccaaccagccggcgucuugaccaaccacgauguggucuaugcgcagcacugcuuuaaggccccuaaaaauuucugucccugcaagcucaacaguucccuguguguggggagcggaccaggcaaaaauaacgguaucgggacuugccccgcaggcaccaauuacuuaacaugucauaaccugugcaauccugacccaaucaccuuuacuggaccguauaaguguccccagacaaaaucucuaguuggcauuggggagcacugcucaggacucgcugugaagagugauuacugugguggcaacccuugcacgugucaaccacaggccuuccugggguggagcgcugacuccugccuucagggagacaagugcaauaucuuugccaacuugauucugcaugauguaaauucuggccucaccuguucgacugaccugcagaaagcaaacacagauauaaaacuuggugucugcgugaauuaugaccuguacgggaucagcggccaaggaauuuucguugaggugaacgccaccuacuauaacuccuggcagaauuugcucuacgauucaaacggcaaucuguauggguuuagagacuacaucacaaacaggacuuucaugauccggaguuguuauucuggacgugucagcgcugcguuucacgcaaauuccucagaacccgccuuacuguuccgcaacauuaagugcaauuacguguuuaacaauagccuaauaagacagcuccagccuaucaacuauuucgauucuuaccuggguuguguagugaaugcuuacaacuccaccgccauuaguguucaaacgugcgaccuuaccgucggcagcggguauuguguggauuacucuaagaauaggcggucccgacgcgcaaucacaacuggauauagauucaccaacuuugagccauucacagugaauagcgucaacgacaguuuggaacccguuggcggucuguacgagauucagaucccgagcgaauuuacuauagggaacauggaggaguucauccagaccucguccccuaaagugacgauugauugcgccgcuuuuguguguggcgacuaugccgcaugcaagucucagcucguagaauacggaucauucugugauaauaucaacgcgauucugacagaggucaaugaauuacuggacaccacucaacuucagguggcuaacucauugaugaauggcguuacacucaguaccaagcugaaagacggggugaacuuuaaugucgaugacaucaacuucuccucugugcuaggaugccugggcagcgagugcuccaaggccucaagcaggagugcaauagaagaucuccuguuugacaaaguuaaacuuucugauguggguuucguagccgcuuauaauaacuguacugggggagccgagauucgggacuugaucugcguccaguccuacaagggcauuaaggugcugccacccuuacucagcgagaaucagaucucggguuacacccuggcagcuacaucagccucucuuuuuccucccuggacggcggccgcuggcgugccauucuaucugaacguccaauaccgcauaaauggguugggaguuaccauggaugugcucagucagaaccagaagcugaucgcaaaugccuucaacaaugcucuagacgccauucaagaaggcuuugaugcaacuaacuccgcgcugguaaaaauccaggccguggucaacgcuaaugccgaggcacucaacaaucugcuucagcaguugagcaacagauucggggcuauuucuagcucccugcaagaaaucuuaucaaggcucgacccucccgaggccgaagcacagauagaucgucugauuaauggacggcuuacagcccugaacgcuuaugugagucagcagcuaagcgacucuacccucguuaaguuuuccgcggcccaagcaauggagaaagugaaugagugugucaagucacagaguagccgaaucaacuucugcggcaaugguaaccacaucauuucccuggugcagaaugcuccauacggguuguauuuuauccauuucucuuacguuccgacaaaauaugugacugccaaggucucgccuggacuguguauugccggcgauagagguauagcucccaaaagcggcuacuuuguaaacgugaauaacaccuggauguacacggggucaggauauuacuauccagaacccaucacagagaauaacguuguggucaugaguaccugcgcagugaacuacacuaaggccccuuauguaauguuaaauaccuccacaccaaaccuccccgacuucagggaggaacuggaccagugguuuaagaaucaaacuucuguggcgccugaucuuagccuggacuacauuaacgucaccuucuuggaucuccagguugagaugaaucgccugcaggaagcuaucaaagugcuaaaccaauccuauauuaaucugaaggacaucggcacauacgaguacuaugugaaauggccgugguacgucuggcuucucauagggcuggccggaguggcaauguugguucuguuauuuuucaucuguugcuguacgggcugcgguaccucauguuuuaagaaaugcgggggaugcugugaugacuauacuggcuaccaggaacucguaauuaagacaucucacgaugacugaggacuagucccuguucccagagcccacuuuuuuuucuuuuuuugaaauaaaauagccugucuuucagaucucaaaggcucuuuucagagccaccaaaaaaaaaaaaaaaaaaaaaaaaaaaaaaaaaaaaaaaaaaaaaaaaaaaaaaaaaaaaaaaaaaaaaaaaaaaaaaaaaaaaaaaaaaaaaaaaaaaaa

SEQ ID NO: 15097 - RNA, 4136 nt, Artificial Sequence
  HCoV/OC43/1783A_10__AIL49484.1 spike protein mRNA human (variant)
aggagagucccgcagucggcguccagcggcucugcuuguucgugugugugucguugcaggccuuauucaagcuuaccauguuccugauccuccuuauuagccugcccaccgccuuugcugugauaggcgacuugaagugcccuuuagauuccagaacagggucucugaacaauaucgacacuggaccaccgucaauuaguacggcaaccgucgauguuacaaacggucuaggcacuuacuaugugcucgacaggguauaccugaauaccacacuuuuccugaacggguauuaccccaccagcggauccacuuaucggaauauggccuugaaaggcacagauaagcucucuacccugugguuuaaaccuccauuccugucggacuuuaucaacgguauuuucgcgaaggugaaaaauacgaaggucuuuaaggauggggugauguacucagaguuccccgcuaucacuauaggaagcaccuuuguuaacacaaguuauuccguggucgugcagccucgcacuaucaauucuacccaagacggcguaaacaaacuccagggcuuacuggaaguuagcgugugucaguacaauaugugcgaguacccacacacaauuugucaucccaaacuugggaaccacuucaaggaauuguggcauauggauaccggagucguguccugccuguauaagcgaaauuuuacguacgacgugaacgccacuuaucuauacuuccacuuuuaucaggaggguggcacauucuacgcauauuucaccgauacuggggucguuacaaaauuucucuucaauguguaccugggaauggcccuuucacauuacuauguaaugccucugaccuguaucagucguagagacauuggcuuuacguuggaauacugggugaccccacucacaagcaggcaauaucuguuagcuuucaaccaggaugguaucauauuuaacgcagucgacugcaugucugacuucauguccgagauuaaguguaagacucagucaaucgccccgcccaccgggguguacgagcugaauggauauacaguucagccuauugcugauguguaccggcgcaaaccagaccuccccaacugcaauaucgaagccuggcuuaacgauaagagcgucccuaguccacugaauugggagagaaaaacuuuuucuaacuguaauuucaacauguccagcuugaugucguuuauccaagcggacucuuuuaccugcaauaacauugaugcagccaagauauauggcauguguuucuccucaaucacaauugacaaauucgcuauccccaauggcaggaagguggaucuacagcuggggaaccucggauaccugcagaguuuuaauuaccggauagacaccacugccacgagcugccagcuuuauuacaaccugccggcagcuaauguauccguuucucgcuucaacccuagcacauggaacaaacgauucgguuuuauugaaaauucaguguucaagccccaaccagccggcgucuugaccaaccacgauguggucuaugcgcagcacugcuuuaaggccccuaaaaauuucugucccugcaagcucaacaguucccuguguguggggagcggaccaggcaaaaauaacgguaucgggacuugccccgcaggcaccaauuacuuaacaugucauaaccugugcaauccugacccaaucaccuuuacuggaccguauaaguguccccagacaaaaucucuaguuggcauuggggagcacugcucaggacucgcugugaagagugauuacugugguggcaacccuugcacgugucaaccacaggccuuccugggguggagcgcugacuccugccuucagggagacaagugcaauaucuuugccaacuugauucugcaugauguaaauucuggccucaccuguucgacugaccugcagaaagcaaacacagauauaaaacuuggugucugcgugaauuaugaccuguacgggaucagcggccaaggaauuuucguugaggugaacgccaccuacuauaacuccuggcagaauuugcucuacgauucaaacggcaaucuguauggguuuagagacuacaucacaaacaggacuuucaugauccggaguuguuauucuggacgugucagcgcugcguuucacgcaaauuccucagaacccgccuuacuguuccgcaacauuaagugcaauuacguguuuaacaauagccuaauaagacagcuccagccuaucaacuauuucgauucuuaccuggguuguguagugaaugcuuacaacuccaccgccauuaguguucaaacgugcgaccuuaccgucggcagcggguauuguguggauuacucuaagaauggaggcuccgguucagcaaucacaacuggguauagguucaccaacuuugagccauucacagugaauagugucaacgacagcuuggaacccguuggcggacuguacgagauucagaucccgucggaauuuacuauaggcaacauggaggaguucauccagaccuccucuccuaaagugacgauugauugcgccgcuuuuguguguggggacuaugccgcaugcaagagccagcucguagaauacggaucauucugugauaauaucaacgcgauucugacagaggucaaugaauuacuggacaccacucaacuucagguggcuaacaguuugaugaauggcguuacacucuccaccaagcugaaagacggugugaacuuuaaugucgaugacaucaacuucucuagcgugcuagggugccugggauccgagugcucaaaggccagcagucggucugcaauagaagaucuccuguuugacaaaguuaaacuuuccgaugugggcuucguagccgcuuauaauaacuguacugguggcgccgagauucgagacuugaucugcguccagagcuacaaggggauuaaggugcugccacccuuacucucggagaaucagaucucaggauacacccuggcagcuacaucugccagucuuuuuccucccuggacggcggccgcuggcgugccauucuaucugaacguccaauaccgcauaaauggguugggaguuaccauggaugugcucucccagaaccagaagcugaucgcaaaugccuucaacaaugcucuagacgccauucaagaaggcuuugaugcaacuaacagcgcgcugguaaaaauccaggccguggucaacgcuaaugccgaggcacucaacaaucugcuucagcaguugucuaacagauucggugcuauuagcuccucacugcaagaaaucuuaaguaggcucgacccucccgaggccgaagcacagauagaucggcugauuaaugggcgccuuacagcccugaacgcuuaugugagccagcagcuaucugacuccacccucguuaaguuuucagcggcccaagcaauggagaaagugaaugagugugucaagagucagagcuccagaaucaacuucugcggaaauggcaaccacaucauuucucuggugcagaaugcuccauacgguuuguauuuuauccauuucucguacguuccgacaaaauaugugacugccaaggucagcccuggccuguguauugccggggauaggggaauagcucccaaaucaggcuacuuuguaaacgugaauaacaccuggauguacacgggguccggauauuacuauccagaacccaucacagagaauaacguuguggucaugaguaccugcgcagugaacuacacuaaggccccuuauguaauguuaaauaccucuacaccaaaccuccccgacuuccgugaggaacuggaccagugguuuaagaaucaaacuagcguggcgccugaucuuucccuggacuacauuaacgucaccuucuuggaucuccagguugagaugaaucggcugcaggaagcuaucaaagugcuaaacugaggacuagucccuguucccagagcccacuuuuuuuucuuuuuuugaaauaaaauagccugucuuucagaucucaaaggcucuuuucagagccaccaaaaaaaaaaaaaaaaaaaaaaaaaaaaaaaaaaaaaaaaaaaaaaaaaaaaaaaaaaaaaaaaaaaaaaaaaaaaaaaaaaaaaaaaaaaaaaaaaaaaa

SEQ ID NO: 15098 - RNA, 4217 nt, Artificial Sequence
  HCoV/OC43/1783A_10__AIL49484.1 spike protein mRNA human (variant)
aggagagucccgcagucggcguccagcggcucugcuuguucgugugugugucguugcaggccuuauucaagcuuaccauguuccugauccuccuuauuagccugcccaccgccuuugcugugauaggcgacuugaagugcccuuuagauuccagaacagggucucugaacaauaucgacacuggaccaccgucaauuaguacggcaaccgucgauguuacaaacggucuaggcacuuacuaugugcucgacaggguauaccugaauaccacacuuuuccugaacggguauuaccccaccagcggauccacuuaucggaauauggccuugaaaggcacagauaagcucucuacccugugguuuaaaccuccauuccugucggacuuuaucaacgguauuuucgcgaaggugaaaaauacgaaggucuuuaaggauggggugauguacucagaguuccccgcuaucacuauaggaagcaccuuuguuaacacaaguuauuccguggucgugcagccucgcacuaucaauucuacccaagacggcguaaacaaacuccagggcuuacuggaaguuagcgugugucaguacaauaugugcgaguacccacacacaauuugucaucccaaacuugggaaccacuucaaggaauuguggcauauggauaccggagucguguccugccuguauaagcgaaauuuuacguacgacgugaacgccacuuaucuauacuuccacuuuuaucaggaggguggcacauucuacgcauauuucaccgauacuggggucguuacaaaauuucucuucaauguguaccugggaauggcccuuucacauuacuauguaaugccucugaccuguaucagucguagagacauuggcuuuacguuggaauacugggugaccccacucacaagcaggcaauaucuguuagcuuucaaccaggaugguaucauauuuaacgcagucgacugcaugucugacuucauguccgagauuaaguguaagacucagucaaucgccccgcccaccgggguguacgagcugaauggauauacaguucagccuauugcugauguguaccggcgcaaaccagaccuccccaacugcaauaucgaagccuggcuuaacgauaagagcgucccuaguccacugaauugggagagaaaaacuuuuucuaacuguaauuucaacauguccagcuugaugucguuuauccaagcggacucuuuuaccugcaauaacauugaugcagccaagauauauggcauguguuucuccucaaucacaauugacaaauucgcuauccccaauggcaggaagguggaucuacagcuggggaaccucggauaccugcagaguuuuaauuaccggauagacaccacugccacgagcugccagcuuuauuacaaccugccggcagcuaauguauccguuucucgcuucaacccuagcacauggaacaaacgauucgguuuuauugaaaauucaguguucaagccccaaccagccggcgucuugaccaaccacgauguggucuaugcgcagcacugcuuuaaggccccuaaaaauuucugucccugcaagcucaacaguucccuguguguggggagcggaccaggcaaaaauaacgguaucgggacuugccccgcaggcaccaauuacuuaacaugucauaaccugugcaauccugacccaaucaccuuuacuggaccguauaaguguccccagacaaaaucucuaguuggcauuggggagcacugcucaggacucgcugugaagagugauuacugugguggcaacccuugcacgugucaaccacaggccuuccugggguggagcgcugacuccugccuucagggagacaagugcaauaucuuugccaacuugauucugcaugauguaaauucuggccucaccuguucgacugaccugcagaaagcaaacacagauauaaaacuuggugucugcgugaauuaugaccuguacgggaucagcggccaaggaauuuucguugaggugaacgccaccuacuauaacuccuggcagaauuugcucuacgauucaaacggcaaucuguauggguuuagagacuacaucacaaacaggacuuucaugauccggaguuguuauucuggacgugucagcgcugcguuucacgcaaauuccucagaacccgccuuacuguuccgcaacauuaagugcaauuacguguuuaacaauagccuaauaagacagcuccagccuaucaacuauuucgauucuuaccuggguuguguagugaaugcuuacaacuccaccgccauuaguguucaaacgugcgaccuuaccgucggcagcggguauuguguggauuacucuaagaauggaggcuccgguucagcaaucacaacuggguauagguucaccaacuuugagccauucacagugaauagugucaacgacagcuuggaacccguuggcggacuguacgagauucagaucccgucggaauuuacuauaggcaacauggaggaguucauccagaccuccucuccuaaagugacgauugauugcgccgcuuuuguguguggggacuaugccgcaugcaagagccagcucguagaauacggaucauucugugauaauaucaacgcgauucugacagaggucaaugaauuacuggacaccacucaacuucagguggcuaacaguuugaugaauggcguuacacucuccaccaagcugaaagacggugugaacuuuaaugucgaugacaucaacuucucuagcgugcuagggugccugggauccgagugcucaaaggccagcagucggucugcaauagaagaucuccuguuugacaaaguuaaacuuuccgaugugggcuucguagccgcuuauaauaacuguacugguggcgccgagauucgagacuugaucugcguccagagcuacaaggggauuaaggugcugccacccuuacucucggagaaucagaucucaggauacacccuggcagcuacaucugccagucuuuuuccucccuggacggcggccgcuggcgugccauucuaucugaacguccaauaccgcauaaauggguugggaguuaccauggaugugcucucccagaaccagaagcugaucgcaaaugccuucaacaaugcucuagacgccauucaagaaggcuuugaugcaacuaacagcgcgcugguaaaaauccaggccguggucaacgcuaaugccgaggcacucaacaaucugcuucagcaguugucuaacagauucggugcuauuagcuccucacugcaagaaaucuuaaguaggcucgacccucccgaggccgaagcacagauagaucggcugauuaaugggcgccuuacagcccugaacgcuuaugugagccagcagcuaucugacuccacccucguuaaguuuucagcggcccaagcaauggagaaagugaaugagugugucaagagucagagcuccagaaucaacuucugcggaaauggcaaccacaucauuucucuggugcagaaugcuccauacgguuuguauuuuauccauuucucguacguuccgacaaaauaugugacugccaaggucagcccuggccuguguauugccggggauaggggaauagcucccaaaucaggcuacuuuguaaacgugaauaacaccuggauguacacgggguccggauauuacuauccagaacccaucacagagaauaacguuguggucaugaguaccugcgcagugaacuacacuaaggccccuuauguaauguuaaauaccucuacaccaaaccuccccgacuuccgugaggaacuggaccagugguuuaagaaucaaacuagcguggcgccugaucuuucccuggacuacauuaacgucaccuucuuggaucuccagguugagaugaaucggcugcaggaagcuaucaaagugcuaaacggcgguuauauuccggaggccccacgagacgggcaagcauacgugagaaaggauggagaauggguccugcuuucaacauuuugaggacuagucccuguucccagagcccacuuuuuuuucuuuuuuugaaauaaaauagccugucuuucagaucucaaaggcucuuuucagagccaccaaaaaaaaaaaaaaaaaaaaaaaaaaaaaaaaaaaaaaaaaaaaaaaaaaaaaaaaaaaaaaaaaaaaaaaaaaaaaaaaaaaaaaaaaaaaaaaaaaaaa

SEQ ID NO: 15099 - RNA, 4328 nt, Artificial Sequence
  HCoV/HKU1/N5__Q0ZME7.1 spike protein mRNA human (1-1351)
aggagagucccgcagucggcguccagcggcucugcuuguucgugugugugucguugcaggccuuauucaagcuuaccauguuccugaucauuuuuauacuccccaccacacuugccgugaucggcgacuucaacugcacuaauagcuuuauuaacgauuacaauaagacgaucccuagaauuuccgaggacgucguugaugugucucugggguugggaaccuauuacguauuaaacaggguguaucugaauacaacucuacucuucaccgguuacuuuccaaaaucaggcgcuaacuuccgggaccuggcacuuaaggggaguaucuaucugagcacauugugguacaaaccgcccuuucucuccgauuucaauaacggaauauuuucuaaggucaaaaauaccaagcuguaugugaacaauacucuguacucggaguucucaacaaucguuauuggcagcguguuugucaacaccaguuacacgaucgugguacagccucacaaugguauucucgaaaucacugccugucaauauaccaugugcgaauacccacauacaguuuguaaguccaaagggucuauacgcaacgagagcuggcacauugacuccucagaacccuuaugccuguucaagaaaaauuuuacuuauaacgugagugcggauuggcuuuacuuccauuucuaucaggagcgaggagucuuuuacgcuuauuacgccgacgugggcaugccuaccacauucuuguuuagccuguaccuaggcaccauccucucucacuauuacgugaugccacugacguguaacgcaauuuccucaaauacugauaacgagacacuugaauauugggucacuccccugagccguagacaguacuugcucaauuucgacgagcaugggguuaucaccaacgccguggauugcaguucuuccuuucugagcgaaauccaguguaagacacaaucguucgcuccuaauaccggaguauaugacuuaucugguuuuacggugaaaccagucgcaaccguguacaggcggauuccgaaccugcccgauugcgacauagacaauuggcucaacaauguuuccgugccuucaccacuuaacugggagcgcagaaucuucaguaauuguaacuuuaaucugagcacauugcuaaggcugguccacguggauuccuucucuugcaacaaucucgacaagagcaagauuuuuggcucauguuucaacaguaucacuguagauaaauuugccauacccaaccggcgccgagacgaucugcagcuuggguccagcggauuccugcagucuucaaauuauaagauugacaucaguagcuccucuugccaguuguacuacucgcucccucugguuaacgugaccaucaauaacuucaauccaagcuccuggaacagaagguauggcuuugguucauucaauuuaaguucuuacgaugucguguauagcgaccacugcuuuuccgucaacucagauuucugucccugcgcugacccgagcgugguuaauucuugugccaaauccaagccucccagugcgauuugcccagcagggacaaaauaccggcauugugaucuggacacuacccuauaugugaagaacuggugccguuguagcugccucccugaccccaucucuacauacuccccaaauaccuguccccaaaagaagguagucgugggaauuggcgagcacugcccuggccuggggauaaacgaagagaaguguggaacucagcuuaaucauucaaguugcuuuugcagcccagaugccuucuuggguuggucguuugacuccuguaucucuaacaaucgcugcaacauuuucagcaacuuuaucuucaauggcaucaacucagggacgacauguaguaaugaucugcucuauuccaacaccgaaauuucuacuggaguuugcgugaauuacgaccuguacggcauaaccggucaggggaucuuuaaagaggucagcgcugccuauuacaacaauuggcagaaccuucuguaugauuccaauggcaacauuaucggauucaaggacuuuuugacaaauaaaaccuacacuauucucccguguuauucaggcagagugagcgcagcuuucuaccaaaacaguucuucccccgcccuguuauauaggaaucugaagugcagcuacguacuaaacaauaucucguucauaucacagccuuuuuacuucgauucuuaucucgggugugugcugaacgcgguuaaccuuacaaguuacuccgucagcucuugcgacuugcggaugggaagcgguuuuuguaucgauuaugcccugccauccucacgacgcaaaagaaggggcauuaguagccccuaccgguucgugacguuugaaccuuucaaugugucuuuugucaacgacuccguugagaccguagggggacucuucgagauccagauuccaacuaauuuuacaaucgcaggccacgaagaguucauacaaaccucaagucccaaggugacaauugauugcagcgcuuuuguguguuccaacuaugccgcuugccacgaccuguuaucugaauacgguacuuucugcgauaauaucaacucgauucugaaugaggucaacgaccuuuuggacaucacccagcuccagguggccaaugcacugaugcaggggguuacgcuaagcucaaaccugaauaccaaccuccauuccgauguggacaauauagauuucaagagucugcuuggcuguuugggaucucaaugcggcagcuccucacgcucucuguuagaagaccuccuguuuaacaaagucaaacuuagcgaugugggguucguugaggccuauaauaacuguacaggagguagugagaucagagaccuguugugcgugcaguccuuuaauggcauuaaaguacucccgccuauccugagcgaaacucagauuucuggguacaccacagcugcgacugucgcagccauguucccacccuggucagcugccgcaggagugccuuuuucccuaaacgugcaguacaggaucaacggccugggugucaccauggauguucucaauaagaaccaaaaacugauagccaaugcuuucaacaaggcccuuuugaguauucagaauggguuuacggcaacaaacagcgcgcuggcuaagauccagucggugguaaaugccaacgcacaggccuuaaauucucuccugcaacagcuuuucaacaaauuuggcgcuaucuccagcucacugcaggagauucuaagucgucucgacaaucuggaagcccaggugcaaaucgaucgguugauuaacggacgacugaccgcauuaaaugcuuaugucucucagcagcucuccgacauaacucugaucaaggccggcgcgagcagagccauugagaaagugaacgaauguguuaagucacaaagucccaggaucaauuucugcgggaacggaaaccacauucuuagccuggugcagaaugcuccauacggcuugcucuuuauccauuucuccuauaaaccuacaucuuuuaagaccguccuggugagccccggucuaugucuguccggggaucgcggaauagcaccaaagcagggcuacuucaucaaacagaacgacucauggauguucacugguucuaguuauuacuauccggagccuauuucggauaagaauguuguguuuaugaacagcugcuccgucaauuucaccaaagcccccuuuaucuaccuuaacaauucuauuccaaaccucucagacuucgaggcugaacugagcuugugguuuaagaaucacacauccaucgcccccaaccugacguucaauagucauauaaacgcaaccuuuuuagaccucuacuaugagaugaauguaauucaagaaucuaucaaaagccugaacucauccuucaucaaucuuaaggagauuggcacuuacgagauguaugugaaauggccuugguacauauggcuguugaucguuauucucuuuaucauuuuccugaugauccuauuuuucauauguugcuguacagggugcggaagugcgugcuuuagcaagugucacaacugcugugaugaauauggcgggcacaacgacuucgugaucaaggccucucaugaugacugaggacuagucccuguucccagagcccacuuuuuuuucuuuuuuugaaauaaaauagccugucuuucagaucucaaaggcucuuuucagagccaccaaaaaaaaaaaaaaaaaaaaaaaaaaaaaaaaaaaaaaaaaaaaaaaaaaaaaaaaaaaaaaaaaaaaaaaaaaaaaaaaaaaaaaaaaaaaaaaaaaaaa

SEQ ID NO: 15100 - RNA, 4328 nt, Artificial Sequence
  HCoV/HKU1/N5__Q0ZME7.1 spike protein mRNA human (1-1351)(N1067P_L1068P)
aggagagucccgcagucggcguccagcggcucugcuuguucgugugugugucguugcaggccuuauucaagcuuaccauguuccugaucauuuuuauacuccccaccacacuugccgugaucggcgacuucaacugcacuaauagcuuuauuaacgauuacaauaagacgaucccuagaauuuccgaggacgucguugaugugucucugggguugggaaccuauuacguauuaaacaggguguaucugaauacaacucuacucuucaccgguuacuuuccaaaaucaggcgcuaacuuccgggaccuggcacuuaaggggaguaucuaucugagcacauugugguacaaaccgcccuuucucuccgauuucaauaacggaauauuuucuaaggucaaaaauaccaagcuguaugugaacaauacucuguacucggaguucucaacaaucguuauuggcagcguguuugucaacaccaguuacacgaucgugguacagccucacaaugguauucucgaaaucacugccugucaauauaccaugugcgaauacccacauacaguuuguaaguccaaagggucuauacgcaacgagagcuggcacauugacuccucagaacccuuaugccuguucaagaaaaauuuuacuuauaacgugagugcggauuggcuuuacuuccauuucuaucaggagcgaggagucuuuuacgcuuauuacgccgacgugggcaugccuaccacauucuuguuuagccuguaccuaggcaccauccucucucacuauuacgugaugccacugacguguaacgcaauuuccucaaauacugauaacgagacacuugaauauugggucacuccccugagccguagacaguacuugcucaauuucgacgagcaugggguuaucaccaacgccguggauugcaguucuuccuuucugagcgaaauccaguguaagacacaaucguucgcuccuaauaccggaguauaugacuuaucugguuuuacggugaaaccagucgcaaccguguacaggcggauuccgaaccugcccgauugcgacauagacaauuggcucaacaauguuuccgugccuucaccacuuaacugggagcgcagaaucuucaguaauuguaacuuuaaucugagcacauugcuaaggcugguccacguggauuccuucucuugcaacaaucucgacaagagcaagauuuuuggcucauguuucaacaguaucacuguagauaaauuugccauacccaaccggcgccgagacgaucugcagcuuggguccagcggauuccugcagucuucaaauuauaagauugacaucaguagcuccucuugccaguuguacuacucgcucccucugguuaacgugaccaucaauaacuucaauccaagcuccuggaacagaagguauggcuuugguucauucaauuuaaguucuuacgaugucguguauagcgaccacugcuuuuccgucaacucagauuucugucccugcgcugacccgagcgugguuaauucuugugccaaauccaagccucccagugcgauuugcccagcagggacaaaauaccggcauugugaucuggacacuacccuauaugugaagaacuggugccguuguagcugccucccugaccccaucucuacauacuccccaaauaccuguccccaaaagaagguagucgugggaauuggcgagcacugcccuggccuggggauaaacgaagagaaguguggaacucagcuuaaucauucaaguugcuuuugcagcccagaugccuucuuggguuggucguuugacuccuguaucucuaacaaucgcugcaacauuuucagcaacuuuaucuucaauggcaucaacucagggacgacauguaguaaugaucugcucuauuccaacaccgaaauuucuacuggaguuugcgugaauuacgaccuguacggcauaaccggucaggggaucuuuaaagaggucagcgcugccuauuacaacaauuggcagaaccuucuguaugauuccaauggcaacauuaucggauucaaggacuuuuugacaaauaaaaccuacacuauucucccguguuauucaggcagagugagcgcagcuuucuaccaaaacaguucuucccccgcccuguuauauaggaaucugaagugcagcuacguacuaaacaauaucucguucauaucacagccuuuuuacuucgauucuuaucucgggugugugcugaacgcgguuaaccuuacaaguuacuccgucagcucuugcgacuugcggaugggaagcgguuuuuguaucgauuaugcccugccauccucacgacgcaaaagaaggggcauuaguagccccuaccgguucgugacguuugaaccuuucaaugugucuuuugucaacgacuccguugagaccguagggggacucuucgagauccagauuccaacuaauuuuacaaucgcaggccacgaagaguucauacaaaccucaagucccaaggugacaauugauugcagcgcuuuuguguguuccaacuaugccgcuugccacgaccuguuaucugaauacgguacuuucugcgauaauaucaacucgauucugaaugaggucaacgaccuuuuggacaucacccagcuccagguggccaaugcacugaugcaggggguuacgcuaagcucaaaccugaauaccaaccuccauuccgauguggacaauauagauuucaagagucugcuuggcuguuugggaucucaaugcggcagcuccucacgcucucuguuagaagaccuccuguuuaacaaagucaaacuuagcgaugugggguucguugaggccuauaauaacuguacaggagguagugagaucagagaccuguugugcgugcaguccuuuaauggcauuaaaguacucccgccuauccugagcgaaacucagauuucuggguacaccacagcugcgacugucgcagccauguucccacccuggucagcugccgcaggagugccuuuuucccuaaacgugcaguacaggaucaacggccugggugucaccauggauguucucaauaagaaccaaaaacugauagccaaugcuuucaacaaggcccuuuugaguauucagaauggguuuacggcaacaaacagcgcgcuggcuaagauccagucggugguaaaugccaacgcacaggccuuaaauucucuccugcaacagcuuuucaacaaauuuggcgcuaucuccagcucacugcaggagauucuaagucgucucgaucccccagaagcccaggugcaaaucgaccggcugauuaauggacgauugaccgcacugaacgcuuaugucucucagcaguuauccgacauaacucucaucaaggccggcgcgagcagagccauugagaaagugaaugaauguguuaagucacaaaguccuaggaucaacuucugcgggaauggaaaccacauucugagccuugugcagaacgcucccuacggccuguuguuuauccauuucuccuauaaaccaacaucuuuuaagaccguccucgugagcccgggucugugucuauccggggaucgcggaauagcaccuaagcagggcuacuucaucaaacagaaugacucauggauguucacugguucuaguuauuacuaucccgagccaauuucggauaagaacguuguguuuaugaauagcugcuccgucaacuucaccaaagcccccuuuaucuaccugaauaacucuauuccuaaucuuucagacuucgaggcugaacucagccugugguuuaagaaccacacauccaucgccccaaauuugacguucaacagucauauaaaugcaaccuuucuggacuuauacuaugagaugaacguaauucaagaaucuaucaaaagccucaauucauccuucaucaaccugaaggagauuggcacuuacgagauguaugugaaauggcccugguacauauggcuucugaucguuauuuuguuuaucauuuuccucaugauccuguuuuucauauguugcuguacagggugcggaagugcgugcuuuagcaagugucacaauugcugugaugaauauggcgggcacaacgacuucgugaucaaggccucucaugaugacugaggacuagucccuguucccagagcccacuuuuuuuucuuuuuuugaaauaaaauagccugucuuucagaucucaaaggcucuuuucagagccaccaaaaaaaaaaaaaaaaaaaaaaaaaaaaaaaaaaaaaaaaaaaaaaaaaaaaaaaaaaaaaaaaaaaaaaaaaaaaaaaaaaaaaaaaaaaaaaaaaaaaa

SEQ ID NO: 15101 - RNA, 4103 nt, Artificial Sequence
  HCoV/HKU1/N5__Q0ZME7.1 spike protein mRNA human (variant)
aggagagucccgcagucggcguccagcggcucugcuuguucgugugugugucguugcaggccuuauucaagcuuaccauguuccugaucauuuuuauacuccccaccacacuugccgugaucggcgacuucaacugcacuaauagcuuuauuaacgauuacaauaagacgaucccuagaauuuccgaggacgucguugaugugucucugggguugggaaccuauuacguauuaaacaggguguaucugaauacaacucuacucuucaccgguuacuuuccaaaaucaggcgcuaacuuccgggaccuggcacuuaaggggaguaucuaucugagcacauugugguacaaaccgcccuuucucuccgauuucaauaacggaauauuuucuaaggucaaaaauaccaagcuguaugugaacaauacucuguacucggaguucucaacaaucguuauuggcagcguguuugucaacaccaguuacacgaucgugguacagccucacaaugguauucucgaaaucacugccugucaauauaccaugugcgaauacccacauacaguuuguaaguccaaagggucuauacgcaacgagagcuggcacauugacuccucagaacccuuaugccuguucaagaaaaauuuuacuuauaacgugagugcggauuggcuuuacuuccauuucuaucaggagcgaggagucuuuuacgcuuauuacgccgacgugggcaugccuaccacauucuuguuuagccuguaccuaggcaccauccucucucacuauuacgugaugccacugacguguaacgcaauuuccucaaauacugauaacgagacacuugaauauugggucacuccccugagccguagacaguacuugcucaauuucgacgagcaugggguuaucaccaacgccguggauugcaguucuuccuuucugagcgaaauccaguguaagacacaaucguucgcuccuaauaccggaguauaugacuuaucugguuuuacggugaaaccagucgcaaccguguacaggcggauuccgaaccugcccgauugcgacauagacaauuggcucaacaauguuuccgugccuucaccacuuaacugggagcgcagaaucuucaguaauuguaacuuuaaucugagcacauugcuaaggcugguccacguggauuccuucucuugcaacaaucucgacaagagcaagauuuuuggcucauguuucaacaguaucacuguagauaaauuugccauacccaaccggcgccgagacgaucugcagcuuggguccagcggauuccugcagucuucaaauuauaagauugacaucaguagcuccucuugccaguuguacuacucgcucccucugguuaacgugaccaucaauaacuucaauccaagcuccuggaacagaagguauggcuuugguucauucaauuuaaguucuuacgaugucguguauagcgaccacugcuuuuccgucaacucagauuucugucccugcgcugacccgagcgugguuaauucuugugccaaauccaagccucccagugcgauuugcccagcagggacaaaauaccggcauugugaucuggacacuacccuauaugugaagaacuggugccguuguagcugccucccugaccccaucucuacauacuccccaaauaccuguccccagaaaaagguagucgugggaauuggcgagcacugcccuggccuggggauaaacgaagagaaguguggaacucaacuuaaucauucaaguugcuuuugcagcccagaugccuucuuggguuggucguuugacuccuguaucucuaacaaucgcugcaacauuuucagcaacuuuaucuucaauggcaucaacucagggacgacauguaguaaugaucugcucuauuccaacaccgaaauuucuacuggaguuugcgugaauuacgaccuguacggcauaaccggucaggggaucuuuaaagaggucagcgcugccuauuacaacaauuggcagaaccuucuguaugauuccaauggcaacauuaucggauucaaggacuuuuugacaaauaaaaccuacacuauucucccguguuauucaggcagagugagcgcagcuuucuaccaaaacaguucuucccccgcccuguuauauaggaaucugaagugcagcuacguacuaaacaauaucucguucauaucacagccuuuuuacuucgauucuuaucucgggugugugcugaacgcgguuaaccuuacaaguuacuccgucagcucuugcgacuugcggaugggaagcgguuuuuguaucgauuaugcccugccauccucaggcgggaguggaagcggcauuucuucccccuaccgauucgugacguuugaaccuuucaaugugucauuugucaacgacaguguugagaccguggguggccucuucgagauccagauuccaacuaauuuuacaaucgcagggcacgaagaguucauacaaaccagcucccccaaagugacaauugauugcucugcuuuuguauguucgaacuaugccgcuugccacgaccuguuaagcgaauacggaacuuucugcgauaauaucaacucaauucugaaugaggucaacgaccuuuuggacaucacccagcuccagguggccaaugcacugaugcagggcguuacgcuauccaguaaccugaauaccaaccuccauucugauguggacaauauagauuucaagagccugcuuggguguuugggaucccaaugcgguucaucuagccgcagucuguuagaagaccuccuguuuaacaaggucaaacuuuccgaugugggcuucguugaggccuauaauaacuguacagggggaagcgagaucagagaccuguugugcgugcagucuuuuaauggcauuaagguacucccgccuauccugucagaaacucagauuuccgguuacaccacagcugcgacugucgcagccauguucccacccuggagugcugccgcaggggugccuuuuagccuaaacgugcaguacaggaucaacggccugggagucaccauggauguucucaauaaaaaccaaaagcugauagccaaugcuuucaacaaagcccuuuugucgauucagaauggcuuuacggcaacaaacucugcgcuggcuaagauccaguccgugguaaaugccaacgcacaggccuuaaauagccuccugcaacagcuuuucaacaaguuuggggcuaucucaaguucucugcaggagauucuaucccggcucgaucccccagaagcccaggugcaaaucgaccgccugauuaauggaagauugaccgcacugaacgcuuaugucagccagcaguuaucagacauaacucucaucaaagccggcgcgaguagggccauugagaaggugaaugaauguguuaaaagccaauccccucguaucaacuucugcgguaaugggaaccacauucugucucuugugcagaacgcucccuacggacuguuguuuauccauuucagcuauaagccaacauccuuuaaaaccguccucgugucaccgggccugugucuaucuggugaucggggcauagcaccuaagcagggguacuucaucaagcagaaugacaguuggauguucacuggaucgagcuauuacuaucccgagccaauuuccgauaaaaacguuguguuuaugaacucuugcucagucaauuucaccaaggcccccuuuaucuaccugaauaacagcauuccuaaucuuuccgacuucgaggcugaacucagucugugguuuaaaaaccacacaucuaucgccccaaauuugacguucaacagccauauaaaugcaaccuuucuggacuuauacuaugagaugaacguaauucaagaaucaaucaagucccucaauugaggacuagucccuguucccagagcccacuuuuuuuucuuuuuuugaaauaaaauagccugucuuucagaucucaaaggcucuuuucagagccaccaaaaaaaaaaaaaaaaaaaaaaaaaaaaaaaaaaaaaaaaaaaaaaaaaaaaaaaaaaaaaaaaaaaaaaaaaaaaaaaaaaaaaaaaaaaaaaaaaaaaa

SEQ ID NO: 15102 - RNA, 4184 nt, Artificial Sequence
  HCoV/HKU1/N5__Q0ZME7.1 spike protein mRNA human (variant)
aggagagucccgcagucggcguccagcggcucugcuuguucgugugugugucguugcaggccuuauucaagcuuaccauguuccugaucauuuuuauacuccccaccacacuugccgugaucggcgacuucaacugcacuaauagcuuuauuaacgauuacaauaagacgaucccuagaauuuccgaggacgucguugaugugucucugggguugggaaccuauuacguauuaaacaggguguaucugaauacaacucuacucuucaccgguuacuuuccaaaaucaggcgcuaacuuccgggaccuggcacuuaaggggaguaucuaucugagcacauugugguacaaaccgcccuuucucuccgauuucaauaacggaauauuuucuaaggucaaaaauaccaagcuguaugugaacaauacucuguacucggaguucucaacaaucguuauuggcagcguguuugucaacaccaguuacacgaucgugguacagccucacaaugguauucucgaaaucacugccugucaauauaccaugugcgaauacccacauacaguuuguaaguccaaagggucuauacgcaacgagagcuggcacauugacuccucagaacccuuaugccuguucaagaaaaauuuuacuuauaacgugagugcggauuggcuuuacuuccauuucuaucaggagcgaggagucuuuuacgcuuauuacgccgacgugggcaugccuaccacauucuuguuuagccuguaccuaggcaccauccucucucacuauuacgugaugccacugacguguaacgcaauuuccucaaauacugauaacgagacacuugaauauugggucacuccccugagccguagacaguacuugcucaauuucgacgagcaugggguuaucaccaacgccguggauugcaguucuuccuuucugagcgaaauccaguguaagacacaaucguucgcuccuaauaccggaguauaugacuuaucugguuuuacggugaaaccagucgcaaccguguacaggcggauuccgaaccugcccgauugcgacauagacaauuggcucaacaauguuuccgugccuucaccacuuaacugggagcgcagaaucuucaguaauuguaacuuuaaucugagcacauugcuaaggcugguccacguggauuccuucucuugcaacaaucucgacaagagcaagauuuuuggcucauguuucaacaguaucacuguagauaaauuugccauacccaaccggcgccgagacgaucugcagcuuggguccagcggauuccugcagucuucaaauuauaagauugacaucaguagcuccucuugccaguuguacuacucgcucccucugguuaacgugaccaucaauaacuucaauccaagcuccuggaacagaagguauggcuuugguucauucaauuuaaguucuuacgaugucguguauagcgaccacugcuuuuccgucaacucagauuucugucccugcgcugacccgagcgugguuaauucuugugccaaauccaagccucccagugcgauuugcccagcagggacaaaauaccggcauugugaucuggacacuacccuauaugugaagaacuggugccguuguagcugccucccugaccccaucucuacauacuccccaaauaccuguccccagaaaaagguagucgugggaauuggcgagcacugcccuggccuggggauaaacgaagagaaguguggaacucaacuuaaucauucaaguugcuuuugcagcccagaugccuucuuggguuggucguuugacuccuguaucucuaacaaucgcugcaacauuuucagcaacuuuaucuucaauggcaucaacucagggacgacauguaguaaugaucugcucuauuccaacaccgaaauuucuacuggaguuugcgugaauuacgaccuguacggcauaaccggucaggggaucuuuaaagaggucagcgcugccuauuacaacaauuggcagaaccuucuguaugauuccaauggcaacauuaucggauucaaggacuuuuugacaaauaaaaccuacacuauucucccguguuauucaggcagagugagcgcagcuuucuaccaaaacaguucuucccccgcccuguuauauaggaaucugaagugcagcuacguacuaaacaauaucucguucauaucacagccuuuuuacuucgauucuuaucucgggugugugcugaacgcgguuaaccuuacaaguuacuccgucagcucuugcgacuugcggaugggaagcgguuuuuguaucgauuaugcccugccauccucaggcgggaguggaagcggcauuucuucccccuaccgauucgugacguuugaaccuuucaaugugucauuugucaacgacaguguugagaccguggguggccucuucgagauccagauuccaacuaauuuuacaaucgcagggcacgaagaguucauacaaaccagcucccccaaagugacaauugauugcucugcuuuuguauguucgaacuaugccgcuugccacgaccuguuaagcgaauacggaacuuucugcgauaauaucaacucaauucugaaugaggucaacgaccuuuuggacaucacccagcuccagguggccaaugcacugaugcagggcguuacgcuauccaguaaccugaauaccaaccuccauucugauguggacaauauagauuucaagagccugcuuggguguuugggaucccaaugcgguucaucuagccgcagucuguuagaagaccuccuguuuaacaaggucaaacuuuccgaugugggcuucguugaggccuauaauaacuguacagggggaagcgagaucagagaccuguugugcgugcagucuuuuaauggcauuaagguacucccgccuauccugucagaaacucagauuuccgguuacaccacagcugcgacugucgcagccauguucccacccuggagugcugccgcaggggugccuuuuagccuaaacgugcaguacaggaucaacggccugggagucaccauggauguucucaauaaaaaccaaaagcugauagccaaugcuuucaacaaagcccuuuugucgauucagaauggcuuuacggcaacaaacucugcgcuggcuaagauccaguccgugguaaaugccaacgcacaggccuuaaauagccuccugcaacagcuuuucaacaaguuuggggcuaucucaaguucucugcaggagauucuaucccggcucgaucccccagaagcccaggugcaaaucgaccgccugauuaauggaagauugaccgcacugaacgcuuaugucagccagcaguuaucagacauaacucucaucaaagccggcgcgaguagggccauugagaaggugaaugaauguguuaaaagccaauccccucguaucaacuucugcgguaaugggaaccacauucugucucuugugcagaacgcucccuacggacuguuguuuauccauuucagcuauaagccaacauccuuuaaaaccguccucgugucaccgggccugugucuaucuggugaucggggcauagcaccuaagcagggguacuucaucaagcagaaugacaguuggauguucacuggaucgagcuauuacuaucccgagccaauuuccgauaaaaacguuguguuuaugaacucuugcucagucaauuucaccaaggcccccuuuaucuaccugaauaacagcauuccuaaucuuuccgacuucgaggcugaacucagucugugguuuaaaaaccacacaucuaucgccccaaauuugacguucaacagccauauaaaugcaaccuuucuggacuuauacuaugagaugaacguaauucaagaaucaaucaagucccucaauggcggguacauccccgaggcgccucgagauggacaggccuaugugagaaaagacggcgaguggguucugcuuaguacuuucugaggacuagucccuguucccagagcccacuuuuuuuucuuuuuuugaaauaaaauagccugucuuucagaucucaaaggcucuuuucagagccaccaaaaaaaaaaaaaaaaaaaaaaaaaaaaaaaaaaaaaaaaaaaaaaaaaaaaaaaaaaaaaaaaaaaaaaaaaaaaaaaaaaaaaaaaaaaaaaaaaaaaa

SEQ ID NO: 15103 - RNA, 3788 nt, Artificial Sequence
  HCoV/229E/BN1/GER/2015__AOG74783.1 spike protein mRNA human (1-1171)
aggagagucccgcagucggcguccagcggcucugcuuguucgugugugugucguugcaggccuuauucaagcuuaccauguucgugcugcucgucgccuacgcacuucugcacaucgcuggcugccagaccacaaacgggacuaauacgagccauuccguuuguaacggaugcgugggucacucugagaauguauuugccguggaaucaggcggguauauucccaguaacuucgcguuuaauaacugguucuuguuaaccaauacaagcuccgucguggacggaguugugagaucuuuucaaccucugcuacucaacugucuguggucggucucaggcagccaguucacuaccgguuuuguguacuucaaugggacaggaaggggcgcuugcaagggcuuuuauaguaacgccuccucugauguaauacgguacaauaucaacuucgaggaaaaucuucgccgagggaccauucuguuuaaaacuagcuauggagcaguuguguucuacuguacaaacaauaccuuggucuccggugacgcccauaucccaucaggcacggugcucgggaacuuuuauugcuucgugaacacuaccauuggaaaugagacaacuagcgcuuucgucggcgcacugccgaagaccguucgugaauuugugaucagcagaacaggucacuucuacauaaacggguacagguauuuuucucugggagauguagaggccgugaauuucaacgucaccaaugcugccacgacuguguguacaguugcgcucgcauccuacgccgacguguuagucaacgugucacagaccgcuaucgccaauauuaucuauugcaacagcguaauuaaucggcugcgcugugaucagcuuaguuuugacguucccgauggcuucuacucuacuuccccuauccaaccaguggaguugcccgucagcauagugucgcugccugucuaucauaaacacacauuuauugugcuauacguuaacuucgaacacagaaggggcccagggaagugcuauaauugucggcccgcagugaucaacauuacccucgcuaauuuuaacgagacgaaaggaccucugugcguagacaccucucauuucacaacucaguuugucgauaaugugaaguuggcccgcugguccgcgucaaucaacaccgguaacugcccauucaguuuuggcaagguuaauaacuucgugaaauucgggagcgucuguuuuucccugaaggacaucccgggaggcugcgccaugcccauuauggcaaauuuggugaacucuaaaagccacaauauagguucacucuacguaaguugguccgauggggacgugaucacaggcguuccuaagccagucgaaggagugagcucuuucaugaacgugacucugaauaaauguaccaaguacaacauuuaugaugucucaggcguuggggugauccgaauaaguaaugacacauuuuuaaacggaauuaccuacacuagcacguccgguaaucugcucggcuucaaggacgugacaaacgggaccaucuauucuaucacucccugcaauccuccagaucagcuuguagucuaccagcaagcugugguuggagccaugcugucggagaacuuuaccagcuauggcuucuccaauguggucgagaugcccaaauuuuucuacgcuucaaacgguacauauaacuguaccgacgccguguugacuuacaguucuuuugggguuugcgcagauggcagcauuaucgccgugcagccgagaaauguauccuacgacucagucagcgcuauugugacagcgaaccuaucuauaccuuucaauuggacgaccuccgugcaggucgaauaucugcagaucacaaguacucccauuguuguggauuguagcaccuacguaugcaacggaaaugugaggugugucgagcuccugaagcaauauacaucugcaugcaaaacuaucgaagacgcccuucggaacuccgcuaugcuggagucagccgaugugagugaaauguugaccuuugacaagaaagcauucacgcucgccaauguuagcucguuuggcgauuacaaccuguccucugugaucccaaguuuaccucguucagggagucgcgucgcuggaagauccgccauugaggacauacuguucucuaagcuagugaccagcggucucggcacaguugaugcagacuauaaaaaguguacuaaggggcuguccaucgcggaccuugcuugcgcccaguacuauaauggaauuaugguguugcccggcgucgcagaugccgagaggauggcuauguacaccgguucacugaucgggggcauugcccucggaggccugacaagcgcagcuaguaucccauucucucuugccauacagucccggcugaacuacguagcguugcaaacugacgugcuccaggaaaaucagcgaauccuggccgcuagcuuuaacaaagcaaugaccaauauuguugaugccuucacgggggugaacgacgcuaucacacagaccucgcaagccuuacagacugucgcaacagcgcugaauaagauucaggaugugguaaaccagcaaggaaacucacuaaaucaucucaccucucagcugcgccagaacuuucaggccaucaguuccagcauacaagcuauuuaugacagacuugauaucauucaggccgaccaacagguggauagguugaucacuggccggcuggcagcucucaaugucuucguuucucacacccugacaaaauacacggaggugcgcgccagcagacaguuagcacagcagaaggugaacgaaugcgucaaaucccaaucaaagagguaugguuuuugugggaauggaacccacauauucagucuggugaacgccgcucccgagggccuuguuuuucuucauacuguacuccugccuacacaguacaaggacguggaagcguggagcggucuaugcgucgauggcaucaauggguaugugcugcgucagccaaaccucgcccuguacaaagagggaaauuauuaccggauuaccucucgaaucauguucgagccgaggauucccacaaucgcagacuuuguucagauagaaaacuguaaugugacuuucgucaacauuuccagaucagagcuucaaaccaucgugccugaauacaucgauguaaauaagacguugcaggagcugaguuauaaauuaccaaacuacacaguccccgaccucgugguugaacaguauaaucagaccauucugaaccuuacuagcgagaucuccacccuggagaauaagucugcugaauugaacuacacagugcaaaaacuccagacucugauugacaacauaaauucgacccuagucgaucugaaguggcucaaccgcguggagacauauaucaaguggccuugguggguuuggcugugcauuagcgugguccuuaucuuugugguaucaauguugcuguuauguugcuguuccacgggcugcuguggguucuucaguugcuuugccucuagcauucggggauguugcgaauccaccaaacucccauacuaugacguggagaagauccacauacagugaggacuagucccuguucccagagcccacuuuuuuuucuuuuuuugaaauaaaauagccugucuuucagaucucaaaggcucuuuucagagccaccaaaaaaaaaaaaaaaaaaaaaaaaaaaaaaaaaaaaaaaaaaaaaaaaaaaaaaaaaaaaaaaaaaaaaaaaaaaaaaaaaaaaaaaaaaaaaaaaaaaaa

SEQ ID NO: 15104 - RNA, 3788 nt, Artificial Sequence
  HCoV/229E/BN1/GER/2015__AOG74783.1 spike protein mRNA human (1-1171)(I869P_I870P)
aggagagucccgcagucggcguccagcggcucugcuuguucgugugugugucguugcaggccuuauucaagcuuaccauguucgugcugcucgucgccuacgcacuucugcacaucgcuggcugccagaccacaaacgggacuaauacgagccauuccguuuguaacggaugcgugggucacucugagaauguauuugccguggaaucaggcggguauauucccaguaacuucgcguuuaauaacugguucuuguuaaccaauacaagcuccgucguggacggaguugugagaucuuuucaaccucugcuacucaacugucuguggucggucucaggcagccaguucacuaccgguuuuguguacuucaaugggacaggaaggggcgcuugcaagggcuuuuauaguaacgccuccucugauguaauacgguacaauaucaacuucgaggaaaaucuucgccgagggaccauucuguuuaaaacuagcuauggagcaguuguguucuacuguacaaacaauaccuuggucuccggugacgcccauaucccaucaggcacggugcucgggaacuuuuauugcuucgugaacacuaccauuggaaaugagacaacuagcgcuuucgucggcgcacugccgaagaccguucgugaauuugugaucagcagaacaggucacuucuacauaaacggguacagguauuuuucucugggagauguagaggccgugaauuucaacgucaccaaugcugccacgacuguguguacaguugcgcucgcauccuacgccgacguguuagucaacgugucacagaccgcuaucgccaauauuaucuauugcaacagcguaauuaaucggcugcgcugugaucagcuuaguuuugacguucccgauggcuucuacucuacuuccccuauccaaccaguggaguugcccgucagcauagugucgcugccugucuaucauaaacacacauuuauugugcuauacguuaacuucgaacacagaaggggcccagggaagugcuauaauugucggcccgcagugaucaacauuacccucgcuaauuuuaacgagacgaaaggaccucugugcguagacaccucucauuucacaacucaguuugucgauaaugugaaguuggcccgcugguccgcgucaaucaacaccgguaacugcccauucaguuuuggcaagguuaauaacuucgugaaauucgggagcgucuguuuuucccugaaggacaucccgggaggcugcgccaugcccauuauggcaaauuuggugaacucuaaaagccacaauauagguucacucuacguaaguugguccgauggggacgugaucacaggcguuccuaagccagucgaaggagugagcucuuucaugaacgugacucugaauaaauguaccaaguacaacauuuaugaugucucaggcguuggggugauccgaauaaguaaugacacauuuuuaaacggaauuaccuacacuagcacguccgguaaucugcucggcuucaaggacgugacaaacgggaccaucuauucuaucacucccugcaauccuccagaucagcuuguagucuaccagcaagcugugguuggagccaugcugucggagaacuuuaccagcuauggcuucuccaauguggucgagaugcccaaauuuuucuacgcuucaaacgguacauauaacuguaccgacgccguguugacuuacaguucuuuugggguuugcgcagauggcagcauuaucgccgugcagccgagaaauguauccuacgacucagucagcgcuauugugacagcgaaccuaucuauaccuuucaauuggacgaccuccgugcaggucgaauaucugcagaucacaaguacucccauuguuguggauuguagcaccuacguaugcaacggaaaugugaggugugucgagcuccugaagcaauauacaucugcaugcaaaacuaucgaagacgcccuucggaacuccgcuaugcuggagucagccgaugugagugaaauguugaccuuugacaagaaagcauucacgcucgccaauguuagcucguuuggcgauuacaaccuguccucugugaucccaaguuuaccucguucagggagucgcgucgcuggaagauccgccauugaggacauacuguucucuaagcuagugaccagcggucucggcacaguugaugcagacuauaaaaaguguacuaaggggcuguccaucgcggaccuugcuugcgcccaguacuauaauggaauuaugguguugcccggcgucgcagaugccgagaggauggcuauguacaccgguucacugaucgggggcauugcccucggaggccugacaagcgcagcuaguaucccauucucucuugccauacagucccggcugaacuacguagcguugcaaacugacgugcuccaggaaaaucagcgaauccuggccgcuagcuuuaacaaagcaaugaccaauauuguugaugccuucacgggggugaacgacgcuaucacacagaccucgcaagccuuacagacugucgcaacagcgcugaauaagauucaggaugugguaaaccagcaaggaaacucacuaaaucaucucaccucucagcugcgccagaacuuucaggccaucaguuccagcauacaagcuauuuaugacagacuugaucccccucaggccgaccaacagguggauagguugaucacuggccggcuggcagcucucaaugucuucguuucucacacccugacaaaauacacggaggugcgcgccagcagacaguuagcacagcagaaggugaacgaaugcgucaaaucccaaucaaagagguaugguuuuugugggaauggaacccacauuuucagucuggugaacgccgcuccagagggccuuguuuuucuucauacuguacuccugccgacacaguacaaggacguggaagcguggagcggucuaugcgucgauggcaucaauggguaugugcugcgucagcccaaccucgcccuguacaaagagggaaauuauuaccggauaaccucucgaaucauguucgagccuaggauuccaacaaucgcagacuuuguucagauugaaaacuguaaugugacuuucgucaacaucuccagaucagagcuucaaaccauagugcccgaauacauugauguaaauaagacguugcaggagcugaguuauaaauuaccuaacuacacagucccagaccucgugguugaacaguauaaucagaccauccugaaccuuacuagcgagaucuccacccuggagaauaagucugcugaauugaacuacacagugcaaaaacuccagacucugauugacaacaucaauucgacccuagucgaucugaaguggcucaaccgcguggagacauauauuaaguggcccugguggguuuggcugugcauaagcgugguccuuaucuuugugguaucaauguugcuguuauguugcuguuccacgggcugcuguggguucuucaguugcuuugccucuagcauucggggauguugcgaauccaccaaacucccguacuaugacguggagaagauccacauucagugaggacuagucccuguucccagagcccacuuuuuuuucuuuuuuugaaauaaaauagccugucuuucagaucucaaaggcucuuuucagagccaccaaaaaaaaaaaaaaaaaaaaaaaaaaaaaaaaaaaaaaaaaaaaaaaaaaaaaaaaaaaaaaaaaaaaaaaaaaaaaaaaaaaaaaaaaaaaaaaaaaaaa

SEQ ID NO: 15105 - RNA, 3599 nt, Artificial Sequence
  HCoV/229E/BN1/GER/2015__AOG74783.1 spike protein mRNA human (variant)
aggagagucccgcagucggcguccagcggcucugcuuguucgugugugugucguugcaggccuuauucaagcuuaccauguucgugcugcucgucgccuacgcacuucugcacaucgcuggcugccagaccacaaacgggacuaauacgagccauuccguuuguaacggaugcgugggucacucugagaauguauuugccguggaaucaggcggguauauucccaguaacuucgcguuuaauaacugguucuuguuaaccaauacaagcuccgucguggacggaguugugagaucuuuucaaccucugcuacucaacugucuguggucggucucaggcagccaguucacuaccgguuuuguguacuucaaugggacaggaaggggcgcuugcaagggcuuuuauaguaacgccuccucugauguaauacgguacaauaucaacuucgaggaaaaucuucgccgagggaccauucuguuuaaaacuagcuauggagcaguuguguucuacuguacaaacaauaccuuggucuccggugacgcccauaucccaucaggcacggugcucgggaacuuuuauugcuucgugaacacuaccauuggaaaugagacaacuagcgcuuucgucggcgcacugccgaagaccguucgugaauuugugaucagcagaacaggucacuucuacauaaacggguacagguauuuuucucugggagauguagaggccgugaauuucaacgucaccaaugcugccacgacuguguguacaguugcgcucgcauccuacgccgacguguuagucaacgugucacagaccgcuaucgccaauauuaucuauugcaacagcguaauuaaucggcugcgcugugaucagcuuaguuuugacguucccgauggcuucuacucuacuuccccuauccaaccaguggaguugcccgucagcauagugucgcugccugucuaucauaaacacacauuuauugugcuauacguuaacuucgaacacagaaggggcccagggaagugcuauaauugucggcccgcagugaucaacauuacccucgcuaauuuuaacgagacgaaaggaccucugugcguagacaccucucauuucacaacucaguuugucgauaaugugaaguuggcccgcugguccgcgucaaucaacaccgguaacugcccauucaguuuuggcaagguuaauaacuucgugaaauucgggagcgucuguuuuucccugaaggacaucccgggaggcugcgccaugcccauuauggcaaauuuggugaacucuaaaagccacaauauagguucacucuacguaaguugguccgauggggacgugaucacaggcguuccuaagccagucgaaggagugagcucuuucaugaacgugacucugaauaaauguaccaaguacaacauuuaugaugucucaggcguuggggugauccgaauaaguaaugacacauuuuuaaacggaauuaccuacacuagcacguccgguaaucugcucggcuucaaggacgugacaaacgggaccaucuauucuaucacucccugcaauccuccagaucagcuuguagucuaccagcaagcugugguuggagccaugcugucggagaacuuuaccagcuauggcuucuccaauguggucgagaugcccaaauuuuucuacgcuucaaacgguacauauaacuguaccgacgccguguugacuuacaguucuuuugggguuugcgcagauggcagcauuaucgccgugcagccgagaaauguauccuacgacucagucagcgcuauugugacagcgaaccuaucuauaccuuucaauuggacgaccuccgugcaggucgaauaucugcagaucacaaguacucccauuguuguggauuguagcaccuacguaugcaacggaaaugugaggugugucgagcuccugaagcaauauacaucugcaugcaaaacuaucgaagacgcccuucggaacuccgcuaugcuggagucagccgaugugagugaaauguugaccuuugacaagaaagcauucacgcucgccaauguuagcucguuuggcgauuacaaccuguccucugugaucccaaguuuaccucguucagggagucgcgucgcuggaagauccgccauugaggacauacuguucucuaagcuagugaccagcggucucggcacaguugaugcagacuauaaaaaguguacuaaggggcuguccaucgcggaccuugcuugcgcccaguacuauaauggaauuaugguguugcccggcgucgcagaugccgagaggauggcuauguacaccgguucacugaucgggggcauugcccucggaggccugacaagcgcagcuaguaucccauucucucuugccauacagucccggcugaacuacguagcguugcaaacugacgugcuccaggaaaaucagcgaauccuggccgcuagcuuuaacaaagcaaugaccaauauuguugaugccuucacgggggugaacgacgcuaucacacagaccucgcaagccuuacagacugucgcaacagcgcugaauaagauucaggaugugguaaaccagcaaggaaacucacuaaaucaucucaccucucagcugcgccagaacuuucaggccaucaguuccagcauacaagcuauuuaugacagacuugaucccccucaggccgaccaacagguggauagguugaucacuggccggcuggcagcucucaaugucuucguuucucacacccugacaaaauacacggaggugcgcgccagcagacaguuagcacagcagaaggugaacgaaugcgucaaaucccaaucaaagagguaugguuuuugugggaauggaacccacauuuucagucuggugaacgccgcuccagagggccuuguuuuucuucauacuguacuccugccgacacaguacaaggacguggaagcguggagcggucuaugcgucgauggcaucaauggguaugugcugcgucagcccaaccucgcccuguacaaagagggaaauuauuaccggauaaccucucgaaucauguucgagccuaggauuccaacaaucgcagacuuuguucagauugaaaacuguaaugugacuuucgucaacaucuccagaucagagcuucaaaccauagugcccgaauacauugauguaaauaagacguugcaggagcugaguuauaaauuaccuaacuacacagucccagaccucgugguugaacaguauaaucagaccauccugaaccuuacuagcgagaucuccacccuggagaauaagucugcugaauugaacuacacagugcaaaaacuccagacucugauugacaacaucaauucgacccuagucgaucugaaguggcucaaccgcguggagacaugaggacuagucccuguucccagagcccacuuuuuuuucuuuuuuugaaauaaaauagccugucuuucagaucucaaaggcucuuuucagagccaccaaaaaaaaaaaaaaaaaaaaaaaaaaaaaaaaaaaaaaaaaaaaaaaaaaaaaaaaaaaaaaaaaaaaaaaaaaaaaaaaaaaaaaaaaaaaaaaaaaaaa

SEQ ID NO: 15106 - RNA, 3680 nt, Artificial Sequence
  HCoV/229E/BN1/GER/2015__AOG74783.1 spike protein mRNA human (variant)
aggagagucccgcagucggcguccagcggcucugcuuguucgugugugugucguugcaggccuuauucaagcuuaccauguucgugcugcucgucgccuacgcacuucugcacaucgcuggcugccagaccacaaacgggacuaauacgagccauuccguuuguaacggaugcgugggucacucugagaauguauuugccguggaaucaggcggguauauucccaguaacuucgcguuuaauaacugguucuuguuaaccaauacaagcuccgucguggacggaguugugagaucuuuucaaccucugcuacucaacugucuguggucggucucaggcagccaguucacuaccgguuuuguguacuucaaugggacaggaaggggcgcuugcaagggcuuuuauaguaacgccuccucugauguaauacgguacaauaucaacuucgaggaaaaucuucgccgagggaccauucuguuuaaaacuagcuauggagcaguuguguucuacuguacaaacaauaccuuggucuccggugacgcccauaucccaucaggcacggugcucgggaacuuuuauugcuucgugaacacuaccauuggaaaugagacaacuagcgcuuucgucggcgcacugccgaagaccguucgugaauuugugaucagcagaacaggucacuucuacauaaacggguacagguauuuuucucugggagauguagaggccgugaauuucaacgucaccaaugcugccacgacuguguguacaguugcgcucgcauccuacgccgacguguuagucaacgugucacagaccgcuaucgccaauauuaucuauugcaacagcguaauuaaucggcugcgcugugaucagcuuaguuuugacguucccgauggcuucuacucuacuuccccuauccaaccaguggaguugcccgucagcauagugucgcugccugucuaucauaaacacacauuuauugugcuauacguuaacuucgaacacagaaggggcccagggaagugcuauaauugucggcccgcagugaucaacauuacccucgcuaauuuuaacgagacgaaaggaccucugugcguagacaccucucauuucacaacucaguuugucgauaaugugaaguuggcccgcugguccgcgucaaucaacaccgguaacugcccauucaguuuuggcaagguuaauaacuucgugaaauucgggagcgucuguuuuucccugaaggacaucccgggaggcugcgccaugcccauuauggcaaauuuggugaacucuaaaagccacaauauagguucacucuacguaaguugguccgauggggacgugaucacaggcguuccuaagccagucgaaggagugagcucuuucaugaacgugacucugaauaaauguaccaaguacaacauuuaugaugucucaggcguuggggugauccgaauaaguaaugacacauuuuuaaacggaauuaccuacacuagcacguccgguaaucugcucggcuucaaggacgugacaaacgggaccaucuauucuaucacucccugcaauccuccagaucagcuuguagucuaccagcaagcugugguuggagccaugcugucggagaacuuuaccagcuauggcuucuccaauguggucgagaugcccaaauuuuucuacgcuucaaacgguacauauaacuguaccgacgccguguugacuuacaguucuuuugggguuugcgcagauggcagcauuaucgccgugcagccgagaaauguauccuacgacucagucagcgcuauugugacagcgaaccuaucuauaccuuucaauuggacgaccuccgugcaggucgaauaucugcagaucacaaguacucccauuguuguggauuguagcaccuacguaugcaacggaaaugugaggugugucgagcuccugaagcaauauacaucugcaugcaaaacuaucgaagacgcccuucggaacuccgcuaugcuggagucagccgaugugagugaaauguugaccuuugacaagaaagcauucacgcucgccaauguuagcucguuuggcgauuacaaccuguccucugugaucccaaguuuaccucguucagggagucgcgucgcuggaagauccgccauugaggacauacuguucucuaagcuagugaccagcggucucggcacaguugaugcagacuauaaaaaguguacuaaggggcuguccaucgcggaccuugcuugcgcccaguacuauaauggaauuaugguguugcccggcgucgcagaugccgagaggauggcuauguacaccgguucacugaucgggggcauugcccucggaggccugacaagcgcagcuaguaucccauucucucuugccauacagucccggcugaacuacguagcguugcaaacugacgugcuccaggaaaaucagcgaauccuggccgcuagcuuuaacaaagcaaugaccaauauuguugaugccuucacgggggugaacgacgcuaucacacagaccucgcaagccuuacagacugucgcaacagcgcugaauaagauucaggaugugguaaaccagcaaggaaacucacuaaaucaucucaccucucagcugcgccagaacuuucaggccaucaguuccagcauacaagcuauuuaugacagacuugaucccccucaggccgaccaacagguggauagguugaucacuggccggcuggcagcucucaaugucuucguuucucacacccugacaaaauacacggaggugcgcgccagcagacaguuagcacagcagaaggugaacgaaugcgucaaaucccaaucaaagagguaugguuuuugugggaauggaacccacauuuucagucuggugaacgccgcuccagagggccuuguuuuucuucauacuguacuccugccgacacaguacaaggacguggaagcguggagcggucuaugcgucgauggcaucaauggguaugugcugcgucagcccaaccucgcccuguacaaagagggaaauuauuaccggauaaccucucgaaucauguucgagccuaggauuccaacaaucgcagacuuuguucagauugaaaacuguaaugugacuuucgucaacaucuccagaucagagcuucaaaccauagugcccgaauacauugauguaaauaagacguugcaggagcugaguuauaaauuaccuaacuacacagucccagaccucgugguugaacaguauaaucagaccauccugaaccuuacuagcgagaucuccacccuggagaauaagucugcugaauugaacuacacagugcaaaaacuccagacucugauugacaacaucaauucgacccuagucgaucugaaguggcucaaccgcguggagacaggcggguauauucccgaagccccgcgggacggacaggccuacguuagaaaggauggcgagugggugcugcuuagcacguuuugaggacuagucccuguucccagagcccacuuuuuuuucuuuuuuugaaauaaaauagccugucuuucagaucucaaaggcucuuuucagagccaccaaaaaaaaaaaaaaaaaaaaaaaaaaaaaaaaaaaaaaaaaaaaaaaaaaaaaaaaaaaaaaaaaaaaaaaaaaaaaaaaaaaaaaaaaaaaaaaaaaaaa

SEQ ID NO: 15107 - RNA, 4343 nt, Artificial Sequence
  HCoV/NL63/RPTEC/2004__AFV53148.1 spike protein mRNA human (1-1356)
aggagagucccgcagucggcguccagcggcucugcuuguucgugugugugucguugcaggccuuauucaagcuuaccaugaagcuguuccucauccuucugguguugcccuuagccagcugcuuuuucaccuguaacuccaaugcuaaccugucuaugcuacagcucggcgucccugacaauucaaguacaauuguuacugggcugcuuccaacgcacugguuuugcgcaaaccaaagcaccuccguguacucugccaauggauucuuuuauauagauguagguaaccauagaucggcguucgcucugcacacaggcuacuaugacgccaaucaguacuauaucuacgugacuaacgagauuggguugaaugcaucagucacccucaaaaucuguaaguuuagcaggaacacaaccuucgauuuucugaguaaugccuccucuagcuucgacugcauugugaaccugcucuuuacugaacaguuaggagcuccgcugggcaucacaauauccggugagaccguucggcuucauuuguauaaugugacgcgcacuuucuacguccccgcagccuacaaacugaccaagcuaucagugaaauguuauuuuaacuacaguugcguauucagcguugugaaugcuacagucacugugaacgugaccacacacaacgggcgagucguuaauuauaccgugugugaugacugcaacggauacacggauaauaucuucucuguacagcaagacggccguauuccuaacggcuuuccauucaauaacugguuucuccugacuaauggguccacacuuguggauggagucucaagacuguaucagcccuugaggcucaccugucuguggccugugccagguuuaaagagcaguacuggcuucguuuacuuuaacgccacagggucugacgugaauugcaacggauaucagcauaauuccgucguggauguaaugcgguacaaccugaauuucagcgcgaacucgcucgacaaucuuaagucuggcguuaucguguuuaaaacccugcaguacgaugucuuguucuauuguuccaacucaaguagcggugugcuagacacgaccauucccuuugggccuuccucucaaccauacuauugcuucaucaacagcacaauaaauacuacccacgucucaacauuugugggcauucugccgcccacuguucgcgaaaucgugguagcaagaaccggacaguucuacauuaacggcuuuaaguauuucgaccucggguucaucgaggccgucaauuuuaacgugacaaccgcuagugccacugauuucuggacgguugcauuugcuacauucguggacguccuggugaauguauccgccaccaacauccagaaucuucuguacugcgauagcccuuuugaaaaauugcagugugagcaccuccaauucggacugcaggacgguuuuuauucugcgaacuucuuagaugacaaugugcugccagagacuuacguugcccuacccauuuacuaucagcauaccgauauaaacuuuacagcaaccgcuucauucggcgggaguugcuacgucuguaagccucaccaagugaauaucagccucaacggaaauacuuccgugugcgucaggacaucucauuuuucgauucgguauaucuacaaccgcguuaaaagcggcuccccaggugacucaaguuggcacauauaucugaagucugggacgugucccuucagcuuuuccaaacuuaauaacuuccagaaguucaagaccauuugcuuuucaacuguggaagugccgggcagcuguaacuucccuuuggaggccacauggcacuacaccucuuauacaaucguaggagcucuguacgucacuugguccgaaggcaauaguaucaccggggugcccuacccaguuagcgguauucgagaguuuucuaaccucgugcugaauaacugcacgaaauauaauaucuacgauuaugucggaaccggcauuauaagauccucaaaccagagucuugccgggggaaucacauacgugagcaauucgggcaaccuguuggguuucaagaauguuuccacugggaacauuuuuaucgugaccccuuguaaucagcccgaccaaguagcagucuaucagcagucuaucauuggcgccaugacagcugugaacgagagcagguacggacuccagaaucuguuacaacugccaaacuucuauuacgugucaaauggcgggaacaacugcacuaccgcggucaugacguacaguaauuuuggaauaugugcagaugguucccuaauccccguucggccucguaacucuagcgacaauggcauuuccgccaucauuacagcuaaccucucaaucccaagcaauuggaccacaagugugcagguagaauaucugcagauaacuucuaccccgaucguggucgacugcgccacuuacgugugcaacgggaauccccgcuguaaaaaccuuuugaagcaguauaccuccgcaugcaaaacaauugaggaugcccugagacucagcgcucaucuggaaacgaaugacguuucgucaauguuaaccuucgauucuaacgccuuuagucuggcaaaugugacuuccuucggagacuacaaccuuagcucugucuugccucaaaggaauauccggagcucccgaauugcgggccgcucagcucucgaggaucugcuauuuaguaaggugguuacaagcggucuggggaccguggacgucgauuauaagucuuguacaaaaggccucuccaucgccgaccuggcaugcgcccaguacuauaacggaauaaugguacuuccaggcguggcugaugccgaaagaauggcaauguacacugggucauugauuggaggcaugguucuggguggguuaaccagugcugccgcgauccccuucagccucgcccugcaggcuaggcuuaauuacguggcacugcagacggacgucuugcaagagaaccagaagauucucgccgcuuccuucaauaaagccaucaacaacauaguggcaucuuuuucgagcguaaaugaugcgaucacacagaccgccgaggcuauucacacugugaccaucgcccugaacaagauucaagacgucguuaaucagcagggaucagcacuaaaccaucugacaucccagcuccggcacaauuuccaagcuaucaguaacucuauacaggccauuuaugaucgccuggacagcauccaggcagaccagcaaguggauagacuuaucacuggcagguuggccgcucugaaugcguuugugucccaggucuuaaacaaauacaccgaagugcgugguucacggcgacucgcccagcagaagauuaaugaguguguuaagucucaaagcaacagauauggcuucugcgggaauggaacacauaucuuuaguauuguaaacuccgcaccugacggccugcuuuuccugcacacggugcuacucccaaccgauuacaaaaaugucaaggcuuggagcgggauauguguggacggaaucuauggcuacguucugaggcagcccaacuuggugcuguauucugauaauggugucuuucgcgugacuucacggauuauguuccagccgagauuaccuguacucuccgacuuuguccaaaucuacaacugcaacgugacauucguuaauauuaguaggguggaacugcacaccgucaucccagauuacguggacguuaacaaaacucuucaggaguuugcccagaaucugcccaaguaugugaaaccuaacuucgauuugacacccuuuaaucucaccuaccugaaccuaagcucggaacugaagcagcuugaggccaagacggcuucucucuuccaaacuaccgucgagcugcagggguugauagaccagaucaauuccacauauguggaucugaaauuacucaaccgcuucgaaaauuacauuaaguggccaugguggguauggcugaucauuagcgugguuuuugucgugcuucugucauugcucguguucuguugccugaguaccggauguugcggcugcuguaacugccuaacuucuuccaugcgagguuguugcgacuguggcagcacaaaacugccuuauuacgaguuugaaaagguccauguacagugaggacuagucccuguucccagagcccacuuuuuuuucuuuuuuugaaauaaaauagccugucuuucagaucucaaaggcucuuuucagagccaccaaaaaaaaaaaaaaaaaaaaaaaaaaaaaaaaaaaaaaaaaaaaaaaaaaaaaaaaaaaaaaaaaaaaaaaaaaaaaaaaaaaaaaaaaaaaaaaaaaaaa

SEQ ID NO: 15108 - RNA, 4343 nt, Artificial Sequence
  HCoV/NL63/RPTEC/2004__AFV53148.1 spike protein mRNA human (1-1356)(S1052P_I1053P)
aggagagucccgcagucggcguccagcggcucugcuuguucgugugugugucguugcaggccuuauucaagcuuaccaugaagcuguuccucauccuucugguguugcccuuagccagcugcuuuuucaccuguaacuccaaugcuaaccugucuaugcuacagcucggcgucccugacaauucaaguacaauuguuacugggcugcuuccaacgcacugguuuugcgcaaaccaaagcaccuccguguacucugccaauggauucuuuuauauagauguagguaaccauagaucggcguucgcucugcacacaggcuacuaugacgccaaucaguacuauaucuacgugacuaacgagauuggguugaaugcaucagucacccucaaaaucuguaaguuuagcaggaacacaaccuucgauuuucugaguaaugccuccucuagcuucgacugcauugugaaccugcucuuuacugaacaguuaggagcuccgcugggcaucacaauauccggugagaccguucggcuucauuuguauaaugugacgcgcacuuucuacguccccgcagccuacaaacugaccaagcuaucagugaaauguuauuuuaacuacaguugcguauucagcguugugaaugcuacagucacugugaacgugaccacacacaacgggcgagucguuaauuauaccgugugugaugacugcaacggauacacggauaauaucuucucuguacagcaagacggccguauuccuaacggcuuuccauucaauaacugguuucuccugacuaauggguccacacuuguggauggagucucaagacuguaucagcccuugaggcucaccugucuguggccugugccagguuuaaagagcaguacuggcuucguuuacuuuaacgccacagggucugacgugaauugcaacggauaucagcauaauuccgucguggauguaaugcgguacaaccugaauuucagcgcgaacucgcucgacaaucuuaagucuggcguuaucguguuuaaaacccugcaguacgaugucuuguucuauuguuccaacucaaguagcggugugcuagacacgaccauucccuuugggccuuccucucaaccauacuauugcuucaucaacagcacaauaaauacuacccacgucucaacauuugugggcauucugccgcccacuguucgcgaaaucgugguagcaagaaccggacaguucuacauuaacggcuuuaaguauuucgaccucggguucaucgaggccgucaauuuuaacgugacaaccgcuagugccacugauuucuggacgguugcauuugcuacauucguggacguccuggugaauguauccgccaccaacauccagaaucuucuguacugcgauagcccuuuugaaaaauugcagugugagcaccuccaauucggacugcaggacgguuuuuauucugcgaacuucuuagaugacaaugugcugccagagacuuacguugcccuacccauuuacuaucagcauaccgauauaaacuuuacagcaaccgcuucauucggcgggaguugcuacgucuguaagccucaccaagugaauaucagccucaacggaaauacuuccgugugcgucaggacaucucauuuuucgauucgguauaucuacaaccgcguuaaaagcggcuccccaggugacucaaguuggcacauauaucugaagucugggacgugucccuucagcuuuuccaaacuuaauaacuuccagaaguucaagaccauuugcuuuucaacuguggaagugccgggcagcuguaacuucccuuuggaggccacauggcacuacaccucuuauacaaucguaggagcucuguacgucacuugguccgaaggcaauaguaucaccggggugcccuacccaguuagcgguauucgagaguuuucuaaccucgugcugaauaacugcacgaaauauaauaucuacgauuaugucggaaccggcauuauaagauccucaaaccagagucuugccgggggaaucacauacgugagcaauucgggcaaccuguuggguuucaagaauguuuccacugggaacauuuuuaucgugaccccuuguaaucagcccgaccaaguagcagucuaucagcagucuaucauuggcgccaugacagcugugaacgagagcagguacggacuccagaaucuguuacaacugccaaacuucuauuacgugucaaauggcgggaacaacugcacuaccgcggucaugacguacaguaauuuuggaauaugugcagaugguucccuaauccccguucggccucguaacucuagcgacaauggcauuuccgccaucauuacagcuaaccucucaaucccaagcaauuggaccacuucggugcagguagaauaucugcagauaacaucuaccccgaucguggucgacugcgccacuuacgugugcaacgggaauccccgcuguaaaaaccuuuugaagcaguauaccuccgcaugcaaaacaauugaggaugcccugagacucagcgcucaucuggaaacgaaugacguuucgucaauguuaaccuucgauucuaacgccuuuagucuggcaaaugugacuuccuucggagacuacaaccuuagcucugucuugccucaaaggaauauccggagcucccgaauugcgggccgcucagcucucgaggaucugcuauuuaguaaggugguuacaagcggucuggggaccguggacgucgauuauaagucuuguacaaaaggccucuccaucgccgaccuggcaugcgcccaguacuauaacggaauaaugguacuuccaggcguggcugaugccgaaagaauggcaauguacacugggucauugauuggaggcaugguucuggguggguuaaccagugcugccgcgauccccuucagccucgcccugcaggcuaggcuuaauuacguggcacugcagacggacgucuugcaagagaaccagaagauucucgccgcuuccuucaauaaagccaucaacaacauaguggcaucuuuuucgagcguaaaugaugcgaucacacagaccgccgaggcuauucacacugugaccaucgcccugaacaagauucaagacgucguuaaucagcagggaucagcacuaaaccaucugacaucccagcuccggcacaauuuccaagcuaucaguaacucuauacaggccauuuaugaucgccuggacccuccacaggcagaccagcaaguggauagacuuaucacuggcagguuggccgcucugaaugcguuugugagccaggucuuaaacaaauacaccgaagugcgugguucccggcgacucgcccagcagaagaucaaugaguguguuaagucacaaucuaacagauauggcuucugcgggaauggaacacauauuuuuagcaucguaaacagugcacccgacggccugcuuuuccugcacacggugcuacucccgaccgauuacaaaaaugucaaggcuugguccgggauuuguguggacggaauauauggcuacguucugaggcagccuaacuuggugcuguauagcgauaauggugucuuucgcgugacuucucggaucauguuccagccaagauuacccguacucucagacuuuguccaaauuuacaacugcaacgugacauucguuaauaucuccaggguggaacugcacaccgucauuccugauuacguggacguuaacaaaacucuucaggaguuugcccagaaucugcccaaguaugugaaaccaaacuucgauuugacaccuuuuaaucucaccuaccugaaccuaaguagcgaacugaagcagcuugaggccaagacggcuagucucuuccaaacuaccgucgagcugcagggguugaucgaccagauaaauucuacauauguggaucugaaauuacucaaccgcuucgaaaauuacaucaaguggcccugguggguauggcugauuaucuccgugguuuuugucgugcuucugagcuugcucguguucuguugccugucaaccggauguugcggcugcuguaacugccuaacaaguucuaugcgagguuguugcgacuguggcuccacuaaacugccauauuacgaguuugaaaagguccauguacagugaggacuagucccuguucccagagcccacuuuuuuuucuuuuuuugaaauaaaauagccugucuuucagaucucaaaggcucuuuucagagccaccaaaaaaaaaaaaaaaaaaaaaaaaaaaaaaaaaaaaaaaaaaaaaaaaaaaaaaaaaaaaaaaaaaaaaaaaaaaaaaaaaaaaaaaaaaaaaaaaaaaaa

SEQ ID NO: 15109 - RNA, 4148 nt, Artificial Sequence
  HCoV/NL63/RPTEC/2004__AFV53148.1 spike protein mRNA human (variant)
aggagagucccgcagucggcguccagcggcucugcuuguucgugugugugucguugcaggccuuauucaagcuuaccaugaagcuguuccucauccuucugguguugcccuuagccagcugcuuuuucaccuguaacuccaaugcuaaccugucuaugcuacagcucggcgucccugacaauucaaguacaauuguuacugggcugcuuccaacgcacugguuuugcgcaaaccaaagcaccuccguguacucugccaauggauucuuuuauauagauguagguaaccauagaucggcguucgcucugcacacaggcuacuaugacgccaaucaguacuauaucuacgugacuaacgagauuggguugaaugcaucagucacccucaaaaucuguaaguuuagcaggaacacaaccuucgauuuucugaguaaugccuccucuagcuucgacugcauugugaaccugcucuuuacugaacaguuaggagcuccgcugggcaucacaauauccggugagaccguucggcuucauuuguauaaugugacgcgcacuuucuacguccccgcagccuacaaacugaccaagcuaucagugaaauguuauuuuaacuacaguugcguauucagcguugugaaugcuacagucacugugaacgugaccacacacaacgggcgagucguuaauuauaccgugugugaugacugcaacggauacacggauaauaucuucucuguacagcaagacggccguauuccuaacggcuuuccauucaauaacugguuucuccugacuaauggguccacacuuguggauggagucucaagacuguaucagcccuugaggcucaccugucuguggccugugccagguuuaaagagcaguacuggcuucguuuacuuuaacgccacagggucugacgugaauugcaacggauaucagcauaauuccgucguggauguaaugcgguacaaccugaauuucagcgcgaacucgcucgacaaucuuaagucuggcguuaucguguuuaaaacccugcaguacgaugucuuguucuauuguuccaacucaaguagcggugugcuagacacgaccauucccuuugggccuuccucucaaccauacuauugcuucaucaacagcacaauaaauacuacccacgucucaacauuugugggcauucugccgcccacuguucgcgaaaucgugguagcaagaaccggacaguucuacauuaacggcuuuaaguauuucgaccucggguucaucgaggccgucaauuuuaacgugacaaccgcuagugccacugauuucuggacgguugcauuugcuacauucguggacguccuggugaauguauccgccaccaacauccagaaucuucuguacugcgauagcccuuuugaaaaauugcagugugagcaccuccaauucggacugcaggacgguuuuuauucugcgaacuucuuagaugacaaugugcugccagagacuuacguugcccuacccauuuacuaucagcauaccgauauaaacuuuacagcaaccgcuucauucggcgggaguugcuacgucuguaagccucaccaagugaauaucagccucaacggaaauacuuccgugugcgucaggacaucucauuuuucgauucgguauaucuacaaccgcguuaaaagcggcuccccaggugacucaaguuggcacauauaucugaagucugggacgugucccuucagcuuuuccaaacuuaauaacuuccagaaguucaagaccauuugcuuuucaacuguggaagugccgggcagcuguaacuucccuuuggaggccacauggcacuacaccucuuauacaaucguaggagcucuguacgucacuugguccgaaggcaauaguaucaccggggugcccuacccaguuagcgguauucgagaguuuucuaaccucgugcugaauaacugcacgaaauauaauaucuacgauuaugucggaaccggcauuauaagauccucaaaccagagucuugccgggggaaucacauacgugagcaauucgggcaaccuguuggguuucaagaauguuuccacugggaacauuuuuaucgugaccccuuguaaucagcccgaccaaguagcagucuaucagcagucuaucauuggcgccaugacagcugugaacgagagcagguacggacuccagaaucuguuacaacugccaaacuucuauuacgugucaaauggcgggaacaacugcacuaccgcggucaugacguacaguaauuuuggaauaugugcagaugguucccuaauccccguucggccucguaacucuagcgacaauggcauuuccgccaucauuacagcuaaccucucaaucccaagcaauuggaccacuucggugcagguagaauaucugcagauaacaucuaccccgaucguggucgacugcgccacuuacgugugcaacgggaauccccgcuguaaaaaccuuuugaagcaguauaccuccgcaugcaaaacaauugaggaugcccugagacucagcgcucaucuggaaacgaaugacguuucgucaauguuaaccuucgauucuaacgccuuuagucuggcaaaugugacuuccuucggagacuacaaccuuagcucugucuugccucaaaggaauauccggagcucccgaauugcgggccgcucagcucucgaggaucugcuauuuaguaaggugguuacaagcggucuggggaccguggacgucgauuauaagucuuguacaaaaggccucuccaucgccgaccuggcaugcgcccaguacuauaacggaauaaugguacuuccaggcguggcugaugccgaaagaauggcaauguacacugggucauugauuggaggcaugguucuggguggguuaaccagugcugccgcgauccccuucagccucgcccugcaggcuaggcuuaauuacguggcacugcagacggacgucuugcaagagaaccagaagauucucgccgcuuccuucaauaaagccaucaacaacauaguggcaucuuuuucgagcguaaaugaugcgaucacacagaccgccgaggcuauucacacugugaccaucgcccugaacaagauucaagacgucguuaaucagcagggaucagcacuaaaccaucugacaucccagcuccggcacaauuuccaagcuaucaguaacucuauacaggccauuuaugaucgccuggacccuccacaggcagaccagcaaguggauagacuuaucacuggcagguuggccgcucugaaugcguuugugagccaggucuuaaacaaauacaccgaagugcgugguucccggcgacucgcccagcagaagaucaaugaguguguuaagucacaaucuaacagauauggcuucugcgggaauggaacacauauuuuuagcaucguaaacagugcacccgacggccugcuuuuccugcacacggugcuacucccgaccgauuacaaaaaugucaaggcuugguccgggauuuguguggacggaauauauggcuacguucugaggcagccuaacuuggugcuguauagcgauaauggugucuuucgcgugacuucucggaucauguuccagccaagauuacccguacucucagacuuuguccaaauuuacaacugcaacgugacauucguuaauaucuccaggguggaacugcacaccgucauuccugauuacguggacguuaacaaaacucuucaggaguuugcccagaaucugcccaaguaugugaaaccaaacuucgauuugacaccuuuuaaucucaccuaccugaaccuaaguagcgaacugaagcagcuugaggccaagacggcuagucucuuccaaacuaccgucgagcugcagggguugaucgaccagauaaauucuacauauguggaucugaaauuacucaaccgcuucgaaaauugaggacuagucccuguucccagagcccacuuuuuuuucuuuuuuugaaauaaaauagccugucuuucagaucucaaaggcucuuuucagagccaccaaaaaaaaaaaaaaaaaaaaaaaaaaaaaaaaaaaaaaaaaaaaaaaaaaaaaaaaaaaaaaaaaaaaaaaaaaaaaaaaaaaaaaaaaaaaaaaaaaaaa

SEQ ID NO: 15110 - RNA, 4229 nt, Artificial Sequence
  HCoV/NL63/RPTEC/2004__AFV53148.1 spike protein mRNA human (variant)
aggagagucccgcagucggcguccagcggcucugcuuguucgugugugugucguugcaggccuuauucaagcuuaccaugaagcuguuccucauccuucugguguugcccuuagccagcugcuuuuucaccuguaacuccaaugcuaaccugucuaugcuacagcucggcgucccugacaauucaaguacaauuguuacugggcugcuuccaacgcacugguuuugcgcaaaccaaagcaccuccguguacucugccaauggauucuuuuauauagauguagguaaccauagaucggcguucgcucugcacacaggcuacuaugacgccaaucaguacuauaucuacgugacuaacgagauuggguugaaugcaucagucacccucaaaaucuguaaguuuagcaggaacacaaccuucgauuuucugaguaaugccuccucuagcuucgacugcauugugaaccugcucuuuacugaacaguuaggagcuccgcugggcaucacaauauccggugagaccguucggcuucauuuguauaaugugacgcgcacuuucuacguccccgcagccuacaaacugaccaagcuaucagugaaauguuauuuuaacuacaguugcguauucagcguugugaaugcuacagucacugugaacgugaccacacacaacgggcgagucguuaauuauaccgugugugaugacugcaacggauacacggauaauaucuucucuguacagcaagacggccguauuccuaacggcuuuccauucaauaacugguuucuccugacuaauggguccacacuuguggauggagucucaagacuguaucagcccuugaggcucaccugucuguggccugugccagguuuaaagagcaguacuggcuucguuuacuuuaacgccacagggucugacgugaauugcaacggauaucagcauaauuccgucguggauguaaugcgguacaaccugaauuucagcgcgaacucgcucgacaaucuuaagucuggcguuaucguguuuaaaacccugcaguacgaugucuuguucuauuguuccaacucaaguagcggugugcuagacacgaccauucccuuugggccuuccucucaaccauacuauugcuucaucaacagcacaauaaauacuacccacgucucaacauuugugggcauucugccgcccacuguucgcgaaaucgugguagcaagaaccggacaguucuacauuaacggcuuuaaguauuucgaccucggguucaucgaggccgucaauuuuaacgugacaaccgcuagugccacugauuucuggacgguugcauuugcuacauucguggacguccuggugaauguauccgccaccaacauccagaaucuucuguacugcgauagcccuuuugaaaaauugcagugugagcaccuccaauucggacugcaggacgguuuuuauucugcgaacuucuuagaugacaaugugcugccagagacuuacguugcccuacccauuuacuaucagcauaccgauauaaacuuuacagcaaccgcuucauucggcgggaguugcuacgucuguaagccucaccaagugaauaucagccucaacggaaauacuuccgugugcgucaggacaucucauuuuucgauucgguauaucuacaaccgcguuaaaagcggcuccccaggugacucaaguuggcacauauaucugaagucugggacgugucccuucagcuuuuccaaacuuaauaacuuccagaaguucaagaccauuugcuuuucaacuguggaagugccgggcagcuguaacuucccuuuggaggccacauggcacuacaccucuuauacaaucguaggagcucuguacgucacuugguccgaaggcaauaguaucaccggggugcccuacccaguuagcgguauucgagaguuuucuaaccucgugcugaauaacugcacgaaauauaauaucuacgauuaugucggaaccggcauuauaagauccucaaaccagagucuugccgggggaaucacauacgugagcaauucgggcaaccuguuggguuucaagaauguuuccacugggaacauuuuuaucgugaccccuuguaaucagcccgaccaaguagcagucuaucagcagucuaucauuggcgccaugacagcugugaacgagagcagguacggacuccagaaucuguuacaacugccaaacuucuauuacgugucaaauggcgggaacaacugcacuaccgcggucaugacguacaguaauuuuggaauaugugcagaugguucccuaauccccguucggccucguaacucuagcgacaauggcauuuccgccaucauuacagcuaaccucucaaucccaagcaauuggaccacuucggugcagguagaauaucugcagauaacaucuaccccgaucguggucgacugcgccacuuacgugugcaacgggaauccccgcuguaaaaaccuuuugaagcaguauaccuccgcaugcaaaacaauugaggaugcccugagacucagcgcucaucuggaaacgaaugacguuucgucaauguuaaccuucgauucuaacgccuuuagucuggcaaaugugacuuccuucggagacuacaaccuuagcucugucuugccucaaaggaauauccggagcucccgaauugcgggccgcucagcucucgaggaucugcuauuuaguaaggugguuacaagcggucuggggaccguggacgucgauuauaagucuuguacaaaaggccucuccaucgccgaccuggcaugcgcccaguacuauaacggaauaaugguacuuccaggcguggcugaugccgaaagaauggcaauguacacugggucauugauuggaggcaugguucuggguggguuaaccagugcugccgcgauccccuucagccucgcccugcaggcuaggcuuaauuacguggcacugcagacggacgucuugcaagagaaccagaagauucucgccgcuuccuucaauaaagccaucaacaacauaguggcaucuuuuucgagcguaaaugaugcgaucacacagaccgccgaggcuauucacacugugaccaucgcccugaacaagauucaagacgucguuaaucagcagggaucagcacuaaaccaucugacaucccagcuccggcacaauuuccaagcuaucaguaacucuauacaggccauuuaugaucgccuggacccuccacaggcagaccagcaaguggauagacuuaucacuggcagguuggccgcucugaaugcguuugugagccaggucuuaaacaaauacaccgaagugcgugguucccggcgacucgcccagcagaagaucaaugaguguguuaagucacaaucuaacagauauggcuucugcgggaauggaacacauauuuuuagcaucguaaacagugcacccgacggccugcuuuuccugcacacggugcuacucccgaccgauuacaaaaaugucaaggcuugguccgggauuuguguggacggaauauauggcuacguucugaggcagccuaacuuggugcuguauagcgauaauggugucuuucgcgugacuucucggaucauguuccagccaagauuacccguacucucagacuuuguccaaauuuacaacugcaacgugacauucguuaauaucuccaggguggaacugcacaccgucauuccugauuacguggacguuaacaaaacucuucaggaguuugcccagaaucugcccaaguaugugaaaccaaacuucgauuugacaccuuuuaaucucaccuaccugaaccuaaguagcgaacugaagcagcuugaggccaagacggcuagucucuuccaaacuaccgucgagcugcagggguugaucgaccagauaaauucuacauauguggaucugaaauuacucaaccgcuucgaaaauggaggcuacauccccgaggcaccacgagacggucaggccuauguacggaaggauggcgaaugggugcugcuuuccaccuuuugaggacuagucccuguucccagagcccacuuuuuuuucuuuuuuugaaauaaaauagccugucuuucagaucucaaaggcucuuuucagagccaccaaaaaaaaaaaaaaaaaaaaaaaaaaaaaaaaaaaaaaaaaaaaaaaaaaaaaaaaaaaaaaaaaaaaaaaaaaaaaaaaaaaaaaaaaaaaaaaaaaaaa

SEQ ID NO: 15111 - RNA, 4043 nt, Artificial Sequence
  Bat SARS-like CoV/WIV1__AGZ48828.1 spike protein mRNA human (1-1256)
aggagagucccgcagucggcguccagcggcucugcuuguucgugugugugucguugcaggccuuauucaagcuuaccaugaagcugcucgugcuugucuucgccacccugguuagcuccuacacaaucgagaaaugcuuggacuuugaugacagaacucccccugcuaacacgcaguucuuaucuucacacaggggcguguauuacccagaugacauuuuucggaguaauguacugcaucuagugcaagaucacuuccucccguuugacagcaacgucacccgcuucauaacauuugggcugaauuucgauaaccccaucauuccuuuuaaggacggaaucuauuucgcagccacugaaaaauccaaugugauucgagguuggguuuuuggcucuaccaugaacaauaagucgcagucagugaucauaaugaacaauagcacaaaccuugucauccgugcguguaauuucgagcugugcgauaacccauuuuucgugguauugaaaaguaauaacacccagauucccuccuacaucuucaauaacgcuuuuaacuguacuuucgaauauguuucuaaggacuuuaaucucgaucugggggagaagccuggaaacuucaaagaccugagagaauuuguguucaggaauaaggauggcuuucuccaugucuacagcgguuaucagccaauuuccgccgcaucaggguuacccacaggauucaacgcccugaaaccuaucuuuaagcuaccauugggcauaaauauuaccaacuuccggacgcugcuaacugcuuuuccgccccgcccugacuacuggggcaccagugcagccgcuuacuucgugggguaucucaaaccaacaacuuuuaugcugaaguacgacgagaauggaaccaucacagaugccguggacugcagccaaaacccccuugcggagcugaaguguucugucaaauccuucgaaauugauaaggguaucuaucagaccucaaauuucagaguugcaccuagcaaagaggugguaagguuuccaaacaucacgaauuugugccccuucggcgaaguguuuaacgccacuacauucccgagugucuacgcuugggagcggaagcgcauuucuaauuguguggccgacuauuccguucucuacaacagcaccucguuuucuacuuucaaaugcuaugggguguccgcaacaaagcugaaugauuuauguuuuucaaacgucuacgcugacaguuucgugguaaaaggagaugacguucgacagauagccccuggccagaccggugugaucgcggauuacaacuauaagcugcccgacgauuuuacggggugcguccucgccuggaauaccagaaacauugacgcaacacaaacuggaaauuacaacuauaaguacaggagccuucggcacggcaaacugcguccauucgagcgcgacaucuccaaugugccuuuuucucccgauggcaagccauguacacccccugcuuucaacugcuauuggccauugaaugacuacggguuuuauauaaccaacggaauugguuaccagccguacagagucgugguucuuagcuucgaacugcucaaugcccccgcuacugugugcggcccuaaacugucaaccgaucuuaucaagaaccaguguguaaauuucaacuuuaaugggcugacaggaaccggcgucuugacuccaaguuccaaaagguuccagcccuuucaacaguucggucgggacgugagcgauuuuacggacucuguucgagauccuaagacaucagagauccucgacauuaguccaugcagcuucgggggcguguccgucaucacccccggaacuaacaccucuucggaaguggccguacuguaucaggaugugaauuguacagacguuccggucgcaauucaugccgaucaauuaaccccuagcuggcgcgugcacuccacuggcaacaacguguuucagacacaggcugggugccugauaggagcggagcacgucgacacgucauacgaaugugauaucccaauuggugcaggcaucugcgccaguuaucauaccguuucuagccuaagauccacuucacaaaagagcaucguggcuuacacaaugucucucggggccgacuccaguauugcauauagcaauaacaccauagccauccccacaaauuucucuauuuccaucacuaccgaggugaugccuguaucaauggcuaaaacgagugucgacuguaacauguacauuugcggagauagcaccgagugugccaaucugcuuuugcaguauggcucguuuugcacacagcugaacagggcacucuccgguaucgcgguggaacaggaccggaauacucgcgagguuuucgcucaggugaagcaaauguacaaaacccccacacugaaggauuuugggggcuucaacuucucucagauacuuccagacccucugaaacccacuaagagauccuuuaucgaagaucuucucuucaauaaggucacccuggccgacgcaggauuuaugaaacaguacggcgaguguuuaggggauauuaacgccagggaccugaucugcgcucagaaguucaauggacuaacggugcucccaccgcugcuuacagaugacaugauugccgcauauaccgcugccuugguuucagguacugcgacagccggcuggaccuuuggggcuggagcagcccugcaaaucccuuucgcuaugcagauggccuaccguuuuaacggcauaggugugacucagaauguacucuaugaaaaccagaaacaaauugcaaaucaguucaacaaggcgaucagucagauucaagagucccugaccacaacgucuaccgccuuagggaaacugcaggaugucgugaaccagaaugcucaggcccuuaacacuuuggugaagcaacucagcuccaauuuuggcgcaaucucaagcguccugaacgacauacuaagucggcuggauaagguugaggcugaagugcagaucgaccgacucauuacaggaagacugcagucucuucagaccuacguaacacaacaguugaucagggccgcagagauucgcgccuccgcuaaucuggcggccacuaaaaugagcgaaugcguguuaggccagucgaagcgggucgacuucugugggaaaggauaucaccucaugucauuuccccaggcagcuccacauggcgugguuuuccugcacgugaccuacguccccucucaagagagaaacuuuacgacagccccugccaucugccacgaagguaaggcuuauuucccaagggaggggguguucguuuuuaauggaaccaguugguucauaacucagcgcaacuuuuucagcccccagauuaucaccacagauaauacuuuugugagcggcucuugugacgucguaaucgguauuaucaacaauaccguguacgauccucuucaaccggagcuggacagcuucaaagaagaguuggauaaguacuuuaaaaaccauacauccccagacguugaucucggcgacauuucagggauaaaugcaaguguggucaacauccagaaggaaauugaucgacugaaugagguggccaagaaccuaaaugagagccugaucgaccuccaggaacugggaaaauaugagcaguacauuaaguggcccugguauguauggcuuggcuucaucgcgggguugauagcuaucgugauggucacgauucuguuaugcuguaugaccucuugcuguuccugccucaaaggagccuguucaugcggcaguuguugcaaguuugaugaagacgacagcgagccuguucugaaaggugugaaguugcacuacacuugaggacuagucccuguucccagagcccacuuuuuuuucuuuuuuugaaauaaaauagccugucuuucagaucucaaaggcucuuuucagagccaccaaaaaaaaaaaaaaaaaaaaaaaaaaaaaaaaaaaaaaaaaaaaaaaaaaaaaaaaaaaaaaaaaaaaaaaaaaaaaaaaaaaaaaaaaaaaaaaaaaaaa

SEQ ID NO: 15112 - RNA, 4043 nt, Artificial Sequence
  Bat SARS-like CoV/WIV1__AGZ48828.1 spike protein mRNA human (1-1256)(K969P_V970P)
aggagagucccgcagucggcguccagcggcucugcuuguucgugugugugucguugcaggccuuauucaagcuuaccaugaagcugcucgugcuugucuucgccacccugguuagcuccuacacaaucgagaaaugcuuggacuuugaugacagaacucccccugcuaacacgcaguucuuaucuucacacaggggcguguauuacccagaugacauuuuucggaguaauguacugcaucuagugcaagaucacuuccucccguuugacagcaacgucacccgcuucauaacauuugggcugaauuucgauaaccccaucauuccuuuuaaggacggaaucuauuucgcagccacugaaaaauccaaugugauucgagguuggguuuuuggcucuaccaugaacaauaagucgcagucagugaucauaaugaacaauagcacaaaccuugucauccgugcguguaauuucgagcugugcgauaacccauuuuucgugguauugaaaaguaauaacacccagauucccuccuacaucuucaauaacgcuuuuaacuguacuuucgaauauguuucuaaggacuuuaaucucgaucugggggagaagccuggaaacuucaaagaccugagagaauuuguguucaggaauaaggauggcuuucuccaugucuacagcgguuaucagccaauuuccgccgcaucaggguuacccacaggauucaacgcccugaaaccuaucuuuaaacuuccauugggcauaaauauuaccaacuuccggacgcugcuaacugcuuuuccgccccgcccugacuacuggggcaccagugcagccgcuuacuucgugggguaucucaaaccaacaacuuuuaugcugaaguacgacgagaauggaaccaucacagaugccguggacugcagccaaaacccccuugcggagcugaaguguucugucaaauccuucgaaauugauaaggguaucuaucagaccucaaauuucagaguugcaccuagcaaagaggugguaagguuuccaaacaucacgaauuugugccccuucggcgaaguguuuaacgccacuacauucccgagugucuacgcuugggagcggaagcgcauuucuaauuguguggccgacuauuccguucucuacaacagcaccucguuuucuacuuucaaaugcuaugggguguccgcaacaaagcugaaugauuuauguuuuucaaacgucuacgcugacaguuucgugguaaaaggagaugacguucgacagauagccccuggccagaccggugugaucgcggauuacaacuauaagcugcccgacgauuuuacggggugcguccucgccuggaauaccagaaacauugacgcaacacaaacuggaaauuacaacuauaaguacaggagccuucggcacggcaaacugcguccauucgagcgcgacaucuccaaugugccuuuuucucccgauggcaagccauguacacccccugcuuucaacugcuauuggccauugaaugacuacggguuuuauauaaccaacggaauugguuaccagccguacagagucgugguuuugagcuucgaacugcucaaugcccccgcuacugugugcggcccuaaacugucaaccgaucuuaucaagaaccaguguguaaauuucaacuuuaaugggcugacaggaaccggcgucuugacuccaaguuccaaaagguuccagcccuuucaacaguucggucgggacgugagcgauuuuacggacucuguucgagauccuaagacaucagagauccucgacauuaguccaugcagcuucgggggcguguccgucaucacccccggaacuaacaccucuucggaaguggccguacuguaucaggaugugaauuguacagacguuccggucgcaauucaugccgaucaauuaaccccuagcuggcgcgugcacuccacuggcaacaacguguuucagacacaggcugggugccugauaggagcggagcacgucgacacgucauacgaaugugauaucccaauuggugcaggcaucugcgccaguuaucauaccguuucuagccuaagauccacuucacaaaagagcaucguggcuuacacaaugucucucggggccgacuccaguauugcauauagcaauaacaccauagccauccccacaaauuucucuauuuccaucacuaccgaggugaugccuguaucaauggcuaaaacgagugucgacuguaacauguacauuugcggagauagcaccgagugugccaaucugcuuuugcaguauggcucguuuugcacacagcugaacagggcacucuccgguaucgcgguggaacaggaccggaauacucgcgagguuuucgcucaggugaagcaaauguacaaaacccccacacugaaggauuuugggggcuucaacuucucucagauacuuccagacccucugaaacccacuaagaggagcuuuaucgaagaucuacucuucaauaaggucacccuggccgacgcaggauuuaugaaacaguacggcgaguguuuaggggauauuaacgccagagaccugaucugcgcucagaaguucaauggacuaacggugcucccaccgcugcuuacagaugacaugauugccgcauauaccgcugccuugguuucagguacugcgacagccggcuggaccuuuggggcuggagcagcccugcaaaucccuuucgcuaugcagauggccuaccguuuuaacggcauaggugugacucagaauguacucuaugaaaaccagaaacaaauugcaaaucaguucaacaaggcgaucagucagauucaagagucccugaccacaacgucuaccgccuuagggaaacugcaggaugucgugaaccagaaugcucaggcccuuaacacuuuggugaagcaacucagcuccaauuuuggcgcaaucucaagcguccugaacgacauacuaagucggcuggaucccccagaggcugaaguucagaucgaccgacucauuacaggaagacugcagucucuucagaccuacgugacacaacaguugaucagggccgcagagauucgcgccuccgcuaaucuggcggccacuaagaugagcgaaugcguauuaggccagucgaaacggguggacuucugugggaagggauaucaccucaugucauuuccccaggcagcuccucauggcgucguguuccugcacguuaccuacgugccaucucaagagagaaacuuuacgacagcccccgccaucugccacgaagguaaggcuuauuucccuagggagggggucuucguguuuaauggaaccaguugguucauaacucagcgcaacuuuuucuccccgcagauuaucaccacagauaauacuuuuguuagcggcucuugugacguggucaucgguauuaucaacaauaccguauacgauccacuucaacccgagcuggacagcuucaaggaagaguuggauaaauacuuuaagaaccauacauccccugacguggaucucggcgacauuucagggauaaaugcaaguguugugaacauccagaaagaaauugaucgacugaaugaggucgccaagaaccuaaaugagagccugaucgaccuccaggaacugggaaaguaugagcaguacauuaaauggccaugguauguguggcuuggcuucaucgcgggguugauagcuaucguaauggugacgauucuguuaugcuguaugaccucuugcuguuccugccucaagggagccuguucaugcggcaguuguugcaaauuugaugaagacgacagcgagcccguccugaaggguguuaaacuucacuacacuugaggacuagucccuguucccagagcccacuuuuuuuucuuuuuuugaaauaaaauagccugucuuucagaucucaaaggcucuuuucagagccaccaaaaaaaaaaaaaaaaaaaaaaaaaaaaaaaaaaaaaaaaaaaaaaaaaaaaaaaaaaaaaaaaaaaaaaaaaaaaaaaaaaaaaaaaaaaaaaaaaaaaa

SEQ ID NO: 15113 - RNA, 3848 nt, Artificial Sequence
  Bat SARS-like CoV/WIV1__AGZ48828.1 spike protein mRNA human (variant)
aggagagucccgcagucggcguccagcggcucugcuuguucgugugugugucguugcaggccuuauucaagcuuaccaugaagcugcucgugcuugucuucgccacccugguuagcuccuacacaaucgagaaaugcuuggacuuugaugacagaacucccccugcuaacacgcaguucuuaucuucacacaggggcguguauuacccagaugacauuuuucggaguaauguacugcaucuagugcaagaucacuuccucccguuugacagcaacgucacccgcuucauaacauuugggcugaauuucgauaaccccaucauuccuuuuaaggacggaaucuauuucgcagccacugaaaaauccaaugugauucgagguuggguuuuuggcucuaccaugaacaauaagucgcagucagugaucauaaugaacaauagcacaaaccuugucauccgugcguguaauuucgagcugugcgauaacccauuuuucgugguauugaaaaguaauaacacccagauucccuccuacaucuucaauaacgcuuuuaacuguacuuucgaauauguuucuaaggacuuuaaucucgaucugggggagaagccuggaaacuucaaagaccugagagaauuuguguucaggaauaaggauggcuuucuccaugucuacagcgguuaucagccaauuuccgccgcaucaggguuacccacaggauucaacgcccugaaaccuaucuuuaaacuuccauugggcauaaauauuaccaacuuccggacgcugcuaacugcuuuuccgccccgcccugacuacuggggcaccagugcagccgcuuacuucgugggguaucucaaaccaacaacuuuuaugcugaaguacgacgagaauggaaccaucacagaugccguggacugcagccaaaacccccuugcggagcugaaguguucugucaaauccuucgaaauugauaaggguaucuaucagaccucaaauuucagaguugcaccuagcaaagaggugguaagguuuccaaacaucacgaauuugugccccuucggcgaaguguuuaacgccacuacauucccgagugucuacgcuugggagcggaagcgcauuucuaauuguguggccgacuauuccguucucuacaacagcaccucguuuucuacuuucaaaugcuaugggguguccgcaacaaagcugaaugauuuauguuuuucaaacgucuacgcugacaguuucgugguaaaaggagaugacguucgacagauagccccuggccagaccggugugaucgcggauuacaacuauaagcugcccgacgauuuuacggggugcguccucgccuggaauaccagaaacauugacgcaacacaaacuggaaauuacaacuauaaguacaggagccuucggcacggcaaacugcguccauucgagcgcgacaucuccaaugugccuuuuucucccgauggcaagccauguacacccccugcuuucaacugcuauuggccauugaaugacuacggguuuuauauaaccaacggaauugguuaccagccguacagagucgugguuuugagcuucgaacugcucaaugcccccgcuacugugugcggcccuaaacugucaaccgaucuuaucaagaaccaguguguaaauuucaacuuuaaugggcugacaggaaccggcgucuugacuccaaguuccaaaagguuccagcccuuucaacaguucggucgggacgugagcgauuuuacggacucuguucgagauccuaagacaucagagauccucgacauuaguccaugcagcuucgggggcguguccgucaucacccccggaacuaacaccucuucggaaguggccguacuguaucaggaugugaauuguacagacguuccggucgcaauucaugccgaucaauuaaccccuagcuggcgcgugcacuccacuggcaacaacguguuucagacacaggcugggugccugauaggagcggagcacgucgacacgucauacgaaugugauaucccaauuggugcaggcaucugcgccaguuaucauaccguuucuagccuaagauccacuucacaaaagagcaucguggcuuacacaaugucucucggggccgacuccaguauugcauauagcaauaacaccauagccauccccacaaauuucucuauuuccaucacuaccgaggugaugccuguaucaauggcuaaaacgagugucgacuguaacauguacauuugcggagauagcaccgagugugccaaucugcuuuugcaguauggcucguuuugcacacagcugaacagggcacucuccgguaucgcgguggaacaggaccggaauacucgcgagguuuucgcucaggugaagcaaauguacaaaacccccacacugaaggauuuugggggcuucaacuucucucagauacuuccagacccucugaaacccacuaagaggagcuuuaucgaagaucuacucuucaauaaggucacccuggccgacgcaggauuuaugaaacaguacggcgaguguuuaggggauauuaacgccagagaccugaucugcgcucagaaguucaauggacuaacggugcucccaccgcugcuuacagaugacaugauugccgcauauaccgcugccuugguuucagguacugcgacagccggcuggaccuuuggggcuggagcagcccugcaaaucccuuucgcuaugcagauggccuaccguuuuaacggcauaggugugacucagaauguacucuaugaaaaccagaaacaaauugcaaaucaguucaacaaggcgaucagucagauucaagagucccugaccacaacgucuaccgccuuagggaaacugcaggaugucgugaaccagaaugcucaggcccuuaacacuuuggugaagcaacucagcuccaauuuuggcgcaaucucaagcguccugaacgacauacuaagucggcuggaucccccagaggcugaaguucagaucgaccgacucauuacaggaagacugcagucucuucagaccuacgugacacaacaguugaucagggccgcagagauucgcgccuccgcuaaucuggcggccacuaagaugagcgaaugcguauuaggccagucgaaacggguggacuucugugggaagggauaucaccucaugucauuuccccaggcagcuccucauggcgucguguuccugcacguuaccuacgugccaucucaagagagaaacuuuacgacagcccccgccaucugccacgaagguaaggcuuauuucccuagggagggggucuucguguuuaauggaaccaguugguucauaacucagcgcaacuuuuucuccccgcagauuaucaccacagauaauacuuuuguuagcggcucuugugacguggucaucgguauuaucaacaauaccguauacgauccacuucaacccgagcuggacagcuucaaggaagaguuggauaaauacuuuaagaaccauacauccccugacguggaucucggcgacauuucagggauaaaugcaaguguugugaacauccagaaagaaauugaucgacugaaugaggucgccaagaaccuaaaugagagccugaucgaccuccaggaacugggaaaguaugagcagugaggacuagucccuguucccagagcccacuuuuuuuucuuuuuuugaaauaaaauagccugucuuucagaucucaaaggcucuuuucagagccaccaaaaaaaaaaaaaaaaaaaaaaaaaaaaaaaaaaaaaaaaaaaaaaaaaaaaaaaaaaaaaaaaaaaaaaaaaaaaaaaaaaaaaaaaaaaaaaaaaaaaa

SEQ ID NO: 15114 - RNA, 3929 nt, Artificial Sequence
  Bat SARS-like CoV/WIV1__AGZ48828.1 spike protein mRNA human (variant)
aggagagucccgcagucggcguccagcggcucugcuuguucgugugugugucguugcaggccuuauucaagcuuaccaugaagcugcucgugcuugucuucgccacccugguuagcuccuacacaaucgagaaaugcuuggacuuugaugacagaacucccccugcuaacacgcaguucuuaucuucacacaggggcguguauuacccagaugacauuuuucggaguaauguacugcaucuagugcaagaucacuuccucccguuugacagcaacgucacccgcuucauaacauuugggcugaauuucgauaaccccaucauuccuuuuaaggacggaaucuauuucgcagccacugaaaaauccaaugugauucgagguuggguuuuuggcucuaccaugaacaauaagucgcagucagugaucauaaugaacaauagcacaaaccuugucauccgugcguguaauuucgagcugugcgauaacccauuuuucgugguauugaaaaguaauaacacccagauucccuccuacaucuucaauaacgcuuuuaacuguacuuucgaauauguuucuaaggacuuuaaucucgaucugggggagaagccuggaaacuucaaagaccugagagaauuuguguucaggaauaaggauggcuuucuccaugucuacagcgguuaucagccaauuuccgccgcaucaggguuacccacaggauucaacgcccugaaaccuaucuuuaaacuuccauugggcauaaauauuaccaacuuccggacgcugcuaacugcuuuuccgccccgcccugacuacuggggcaccagugcagccgcuuacuucgugggguaucucaaaccaacaacuuuuaugcugaaguacgacgagaauggaaccaucacagaugccguggacugcagccaaaacccccuugcggagcugaaguguucugucaaauccuucgaaauugauaaggguaucuaucagaccucaaauuucagaguugcaccuagcaaagaggugguaagguuuccaaacaucacgaauuugugccccuucggcgaaguguuuaacgccacuacauucccgagugucuacgcuugggagcggaagcgcauuucuaauuguguggccgacuauuccguucucuacaacagcaccucguuuucuacuuucaaaugcuaugggguguccgcaacaaagcugaaugauuuauguuuuucaaacgucuacgcugacaguuucgugguaaaaggagaugacguucgacagauagccccuggccagaccggugugaucgcggauuacaacuauaagcugcccgacgauuuuacggggugcguccucgccuggaauaccagaaacauugacgcaacacaaacuggaaauuacaacuauaaguacaggagccuucggcacggcaaacugcguccauucgagcgcgacaucuccaaugugccuuuuucucccgauggcaagccauguacacccccugcuuucaacugcuauuggccauugaaugacuacggguuuuauauaaccaacggaauugguuaccagccguacagagucgugguuuugagcuucgaacugcucaaugcccccgcuacugugugcggcccuaaacugucaaccgaucuuaucaagaaccaguguguaaauuucaacuuuaaugggcugacaggaaccggcgucuugacuccaaguuccaaaagguuccagcccuuucaacaguucggucgggacgugagcgauuuuacggacucuguucgagauccuaagacaucagagauccucgacauuaguccaugcagcuucgggggcguguccgucaucacccccggaacuaacaccucuucggaaguggccguacuguaucaggaugugaauuguacagacguuccggucgcaauucaugccgaucaauuaaccccuagcuggcgcgugcacuccacuggcaacaacguguuucagacacaggcugggugccugauaggagcggagcacgucgacacgucauacgaaugugauaucccaauuggugcaggcaucugcgccaguuaucauaccguuucuagccuaagauccacuucacaaaagagcaucguggcuuacacaaugucucucggggccgacuccaguauugcauauagcaauaacaccauagccauccccacaaauuucucuauuuccaucacuaccgaggugaugccuguaucaauggcuaaaacgagugucgacuguaacauguacauuugcggagauagcaccgagugugccaaucugcuuuugcaauauggcucguuuugcacacagcugaacagggcacucuccgguaucgcgguggaacaggaccggaauacucgcgagguuuucgcucaggugaagcaaauguacaaaacccccacacugaaggauuuugggggcuucaacuucucucagauacuuccagacccucugaaacccacuaagaggagcuuuaucgaagaucuacucuucaauaaggucacccuggccgacgcaggauuuaugaaacaguacggcgaguguuuaggggauauuaacgccagagaccugaucugcgcucagaaguucaauggacuaacggugcucccaccgcugcuuacagaugacaugauugccgcauauaccgcugccuugguuucagguacugcgacagccggcuggaccuuuggggcuggagcagcccugcaaaucccuuucgcuaugcagauggccuaccguuuuaacggcauaggugugacucagaauguacucuaugaaaaccagaaacaaauugcaaaucaguucaacaaggcgaucagucagauucaagagucccugaccacaacgucuaccgccuuagggaaacugcaggaugucgugaaccagaaugcucaggcccuuaacacuuuggugaagcaacucagcuccaauuuuggcgcaaucucaagcguccugaacgacauacuaagucggcuggaucccccagaggcugaaguucagaucgaccgacucauuacaggaagacugcagucucuucagaccuacgugacacaacaguugaucagggccgcagagauucgcgccuccgcuaaucuggcggccacuaagaugagcgaaugcguauuaggccagucgaaacggguggacuucugugggaagggauaucaccucaugucauuuccccaggcagcuccucauggcgucguguuccugcacguuaccuacgugccaucucaagagagaaacuuuacgacagcccccgccaucugccacgaagguaaggcuuauuucccuagggagggggucuucguguuuaauggaaccaguugguucauaacucagcgcaacuuuuucuccccgcagauuaucaccacagauaauacuuuuguuagcggcucuugugacguggucaucgguauuaucaacaauaccguauacgauccacuucaacccgagcuggacagcuucaaggaagaguuggauaaauacuuuaagaaccauacauccccugacguggaucucggcgacauuucagggauaaaugcaaguguugugaacauccagaaagaaauugaucgacugaaugaggucgccaagaaccuaaaugagagccugaucgaccuccaggaacugggaaaguaugagcagggcggguacauuccagaagcgccccgggauggacaggcuuaugugcguaaagacggcgaguggguacuuuugucuacguucugaggacuagucccuguucccagagcccacuuuuuuuucuuuuuuugaaauaaaauagccugucuuucagaucucaaaggcucuuuucagagccaccaaaaaaaaaaaaaaaaaaaaaaaaaaaaaaaaaaaaaaaaaaaaaaaaaaaaaaaaaaaaaaaaaaaaaaaaaaaaaaaaaaaaaaaaaaaaaaaaaaaaa

SEQ ID NO: 15115 - RNA, 4097 nt, Artificial Sequence
  BatCoV/HKU9-1 BF_005I__YP_001039971.1 spike protein mRNA human (1-1274)
aggagagucccgcagucggcguccagcggcucugcuuguucgugugugugucguugcaggccuuauucaagcuuaccaugcugcucauccuugugcugggcgucagcuuggccgcugcauccagacccgagugcuucaacccuagguuuaccuuaacaccacugaaucacacucuaaacuacacgucuauuaaggccaaaguuucaaaugugcuccugccggaccccuauauagcguacagugggcagacccuucggcaaaaccuguucauggcugauaugagcaauacaaucuuguauccuguaacuccacccgccaacggagcaaaugguggcuuuauuuacaacaccuccaucauuccugugucugccggacucuucgucaauacauggauguaucgccagccagcuucgucacgagcauacugucaggaacccuuugggguggccuucggcgacaccuuugagaacgaucguaucgcuauacugaucauggccccugacaaucuggguagcuggagugcgguugcaccaagaaaccagacuaauauuuaucucuuagugugcuccaacgccacacuguguaucaauccgggguucaacagguggggacccgcuggcucuuuuauugccccugaugcacuugucgaccauagcaacuccugcuucgugaauaacaccuuuucaguaaauaucaguacgagccggauaucuuuggcuuuccuguuuaaggauggcgaccuacucauuuaccacuccggguggcugccaacuucaaacuucgaacauggauucagccgcgguagucaccccaugaccuacuuuaugucucuuccuguuggcgggaaucugccaagagcccaauucuuucaguccaucgugaggagcaacgcgauugauaaaggagacggcauguguacaaauuucgaugucaacuugcauguggcccaccucaucaaucgggaccuguuagugucguauuuuaacaaugguucugucgcaaacgcugccgauugcgcugacuccgccgcagaggaacuguacuguguuacugggucauucgaucccccgaccggaguguauccucucagucgcuaccgagcccagguagcuggcuuugugagagucacacagaggggcagcuauugcacgcccccauacuccgugcuucaagacccuccccagccaguuguguggcggcguuauaugcuguacgacugugucuucgauuuuaccgugguaguugacucuuugcccacucaccagcuacagugcuacggggugagcccucgcagacuggcgucaauguguuauggaagugucacacucgaugugaugaggaucaaugagacccaucugaacaaucuuuucaaccgggucccagacacuuuuucccuguacaacuaugcauugccggauaauuucuacgguugccuccacgccuuuuaucugaacagcacagcucccuacgccguggcaaaucgauucccuauuaagccaggcgggcgccaaucuaacucagccuucauagacaccguuaucaaugcugcccauuauagucccuuuagcuacguguacggauuagcaguaauuacgcugaaaccugcggcuggcuccaagcuagucugcccaguggccaacgauaccguugugaucacagacagauguguccaguauaaucucuacgguuauacugggaccggcgugcugucuaagaacacaucgcuuguaauacccgauggaaaaguguucacugcaagcuccaccggcacaauuaucgggguuucaaucaauaguaccacuuacucuauuaugccgugcgucacggugccugugagcgucggauaucacccaaacuuugagagggccuugcuguucaauggucucuccuguucacagcggagccgcgcuguuacagaacccgugucugugcugugguccgccagugcaaccgcucaagacgccuuugacacuccuagcggcugcguagucaacguggagcuuagaaauaccacaaucguuaacaccugugcgaugcccauuggaaauucucugugcuucauaaacggguccaucgccacugcuaacgcagauucauugccaaggcuccagcuggugaauuacgacccuuuauaugauaacaguacagccacgcccaugaccccagucuacugggugaagguuccgacuaauuuuacacugagcgcuaccgaagaguacauucagacaacugccccuaaaaucaccaucgacugugcacguuaucuaugcggcgauucgucccggugucucaacgugcugcuucacuacgguacguucugcaaugacauuaacaaggcguugucucgaguaagcaccauacuggauucagcccuccugaguuuagucaaagagcuguccaucaauacaagagacgaagugacuaccuuuucuuucgauggggacuauaacuuuacaggccuuaugggauguuugggccccaauugcggggcuacuaccuacaggagcgccuucuccgaucuccuguaugacaaggugcgcauuacggauccaggauuuaugcagucauaccaaaagugcaucgacagccagugggguggcaguauucgggaccuacuguguacacagaccuauaacgggaucgcaguccugcccccuauaguuucuccagcuaugcaggcccucuacacuucccuuuuggugggagcaguagccagcucgggcuacacauucgguaucaccucagcuggggugauucccuucgcgacucaacugcaguuuagauuaaauggcaucggagucaccacacaggugcucguugagaaccagaaacugauugccucuaguuucaauaacgcacuugugaauauccaaaagggcuuuacggaaaccuccauagcucugagcaaaaugcaggaugucauuaaccagcaugccgcccaguugcacacucucgugguucaacuggggaacucuuucggagcuaucagcuccucaauuaaugagaucuuuaguaggcuagaaggccuggcagccaacgcggagguggaccgccucauaaauggucgaaugaugguccugaacacauauguaacccagcuuuugauccaggcuagcgaggccaaggcacaaaaugcccuggcugcacagaaaauuucugaaugcgugaaggcccaguccuuacggaacgauuucugugggaauggaacacauguucucucaaucccucagcuggcgccgaacggcgugcuuuuuauucacuacgcuuauacuccaaccgaguacgccuucguccaaacgagugcaggucugugccauaauggcacaggguaugcuccccgucagggaauguuugugcuaccuaacaauaccaacauguggcacuucacuaccaugcaguuuuacaauccaguaaacaucagcgccuccaauacacaggugcucacuucuuguucggucaacuauaccagcguuaauuacacagugcuggaacccucagugccuggcgacuacgauuuccaaaaagaguucgacaaguuuuauaagaacuuguccacgauauucaacaauaccuuuaacccgaaugauuucaacuuuaguacugucgacgugacagcccagauuaaaucucugcacgauguuguaaaucaguuaaaccagagcuucaucgaccucaagaaacugaauguguacgaaaagaccaucaaauggcccugguaugucuggcuugcaaugauugcugggaucgugggacugguuuuggccgugauuaugcucaugugcaugacuaacuguugcuccuguuuuaagggcaugugcgauuguagaaggugcugcgguucauacgacucuuaugaugacgucuacccagcggugcgcguaaauaagaaacggacagucugaggacuagucccuguucccagagcccacuuuuuuuucuuuuuuugaaauaaaauagccugucuuucagaucucaaaggcucuuuucagagccaccaaaaaaaaaaaaaaaaaaaaaaaaaaaaaaaaaaaaaaaaaaaaaaaaaaaaaaaaaaaaaaaaaaaaaaaaaaaaaaaaaaaaaaaaaaaaaaaaaaaaa

SEQ ID NO: 15116 - RNA, 4097 nt, Artificial Sequence
  BatCoV/HKU9-1 BF_005I__YP_001039971.1 spike protein mRNA human (1-1274)(G983P_L984P)
aggagagucccgcagucggcguccagcggcucugcuuguucgugugugugucguugcaggccuuauucaagcuuaccaugcugcucauccuugugcugggcgucagcuuggccgcugcauccagacccgagugcuucaacccuagguuuaccuuaacaccacugaaucacacucuaaacuacacgucuauuaaggccaaaguuucaaaugugcuccugccggaccccuauauagcguacagugggcagacccuucggcaaaaccuguucauggcugauaugagcaauacaaucuuguauccuguaacuccacccgccaacggagcaaaugguggcuuuauuuacaacaccuccaucauuccugugucugccggacucuucgucaauacauggauguaucgccagccagcuucgucacgagcauacugucaggaacccuuugggguggccuucggcgacaccuuugagaacgaucguaucgcuauacugaucauggccccugacaaucuggguagcuggagugcgguugcaccaagaaaccagacuaauauuuaucucuuagugugcuccaacgccacacuguguaucaauccgggguucaacagguggggacccgcuggcucuuuuauugccccugaugcacuugucgaccauagcaacuccugcuucgugaauaacaccuuuucaguaaauaucaguacgagccggauaucuuuggcuuuccuguuuaaggauggcgaccuacucauuuaccacuccggguggcugccaacuucaaacuucgaacauggauucagccgcgguagucaccccaugaccuacuuuaugucucuuccuguuggcgggaaucugccaagagcccaauucuuucaguccaucgugaggagcaacgcgauugauaaaggagacggcauguguacaaauuucgaugucaacuugcauguggcccaccucaucaaucgggaccuguuagugucguauuuuaacaaugguucugucgcaaacgcugccgauugcgcugacuccgccgcagaggaacuguacuguguuacugggucauucgaucccccgaccggaguguauccucucagucgcuaccgagcccagguagcuggcuuugugagagucacacagaggggcagcuauugcacgcccccauacuccgugcuucaagacccuccccagccaguuguguggcggcguuauaugcuguacgacugugucuucgauuuuaccgugguaguugacucuuugcccacucaccagcuacagugcuacggggugagcccucgcagacuggcgucaauguguuauggaagugucacacucgaugugaugaggaucaaugagacccaucugaacaaucuuuucaaccgggucccagacacuuuuucccuguacaacuaugcauugccggauaauuucuacgguugccuccacgccuuuuaucugaacagcacagcucccuacgccguggcaaaucgauucccuauuaagccaggcgggcgccaaucuaacucagccuucauagacaccguuaucaaugcugcccauuauagucccuuuagcuacguguacggauuagcaguaauuacgcugaaaccugcggcuggcuccaagcuagucugcccaguggccaacgauaccguugugaucacagacagauguguccaguauaaucucuacgguuauacugggaccggcgugcugucuaagaacacaucgcuuguaauacccgauggaaaaguguucacugcaagcuccaccggcacaauuaucgggguuucaaucaauaguaccacuuacucuauuaugccgugcgucacggugccugugagcgucggauaucacccaaacuuugagagggccuugcuguucaauggucucuccuguucacagcggagccgcgcuguuacagaacccgugucugugcugugguccgccagugcaaccgcucaagacgccuuugacacuccuagcggcugcguagucaacguggagcuuagaaauaccacaaucguuaacaccugugcgaugcccauuggaaauucucugugcuucauaaacggguccaucgccacugcuaacgcagauucauugccaaggcuccagcuggugaauuacgacccuuuauaugauaacaguacagccacgcccaugaccccagucuacugggugaagguuccgacuaauuuuacacugagcgcuaccgaagaguacauucagacaacugccccuaaaaucaccaucgacugugcacguuaucuaugcggcgauucgucccggugucucaacgugcugcuucacuacgguacguucugcaaugacauuaacaaggcguugucucgaguaagcaccauacuggauucagcccuccugaguuuagucaaagagcuguccaucaauacaagagacgaagugacuaccuuuucuuucgauggggacuauaacuuuacaggccuuaugggauguuugggccccaauugcggggcuacuaccuacaggagcgccuucuccgaucuccuguaugacaaggugcgcauuacggauccaggauuuaugcagucauaccaaaagugcaucgacagccagugggguggcaguauucgggaccuacuguguacacagaccuauaacgggaucgcaguccugcccccuauaguuucuccagcuaugcaggcccucuacacuucccuuuuggugggagcaguagccagcucgggcuacacauucgguaucaccucagcuggggugauucccuucgcgacucaacugcaguuuagauuaaauggcaucggagucaccacacaggugcucguugagaaccagaaacugauugccucuaguuucaauaacgcacuugugaauauccaaaagggcuuuacggaaaccuccauagcucugagcaaaaugcaggaugucauuaaccagcaugccgcccaguugcacacucucgugguucaacuggggaacucuuucggagcuaucagcuccucaauuaaugagaucuuuaguaggcuagaaccuccggcagccaacgcggagguggaccgccugauaaauggccgaaugaugguccucaacacauauguaacccagcugcuuauccaggcuagcgaggccaaggcacaaaaugccuuggcugcacagaaaauuucugaaugcgugaaggcccagucccugcggaacgauuucugugguaaugggacacauguuuuaucaaucccacagcucgcgcccaacggagugcuguuuauucacuacgcuuauacuccuaccgaguacgccuucguccaaacgagugcaggccuuugccauaaugguacaggcuaugccccacgucaggggauguuugugcugcccaacaauaccaacauguggcacuucacuaccaugcaguuuuacaauccuguaaacaucagcgcuuccaauacacaggugcuaacuucuuguucggucaacuauaccagcguuaauuacacagugcucgaaccgucagugcccggagacuacgauuuccaaaaagaguucgacaaguuuuauaagaaccuguccacgauauucaacaauaccuuuaacccaaaugauuucaacuuuaguacugucgacgugacagcccagauuaaaucuuugcacgauguuguaaaucagcugaaccagagcuucaucgacuuaaagaaacucaauguguacgaaaagaccaucaaauggccuugguaugucuggcuggcaaugauugcuggcaucguggggcuuguucuggccgugauuauguugaugugcaugacuaacuguugcuccuguuuuaagggaaugugcgauuguagaaggugcugcggcucauacgacucuuaugaugacgucuaccccgcggugcgcguaaauaagaaacggacagucugaggacuagucccuguucccagagcccacuuuuuuuucuuuuuuugaaauaaaauagccugucuuucagaucucaaaggcucuuuucagagccaccaaaaaaaaaaaaaaaaaaaaaaaaaaaaaaaaaaaaaaaaaaaaaaaaaaaaaaaaaaaaaaaaaaaaaaaaaaaaaaaaaaaaaaaaaaaaaaaaaaaaa

SEQ ID NO: 15117 - RNA, 3896 nt, Artificial Sequence
  BatCoV/HKU9-1 BF_005I__YP_001039971.1 spike protein mRNA human (variant)
aggagagucccgcagucggcguccagcggcucugcuuguucgugugugugucguugcaggccuuauucaagcuuaccaugcugcucauccuugugcugggcgucagcuuggccgcugcauccagacccgagugcuucaacccuagguuuaccuuaacaccacugaaucacacucuaaacuacacgucuauuaaggccaaaguuucaaaugugcuccugccggaccccuauauagcguacagugggcagacccuucggcaaaaccuguucauggcugauaugagcaauacaaucuuguauccuguaacuccacccgccaacggagcaaaugguggcuuuauuuacaacaccuccaucauuccugugucugccggacucuucgucaauacauggauguaucgccagccagcuucgucacgagcauacugucaggaacccuuugggguggccuucggcgacaccuuugagaacgaucguaucgcuauacugaucauggccccugacaaucuggguagcuggagugcgguugcaccaagaaaccagacuaauauuuaucucuuagugugcuccaacgccacacuguguaucaauccgggguucaacagguggggacccgcuggcucuuuuauugccccugaugcacuugucgaccauagcaacuccugcuucgugaauaacaccuuuucaguaaauaucaguacgagccggauaucuuuggcuuuccuguuuaaggauggcgaccuacucauuuaccacuccggguggcugccaacuucaaacuucgaacauggauucagccgcgguagucaccccaugaccuacuuuaugucucuuccuguuggcgggaaucugccaagagcccaauucuuucaguccaucgugaggagcaacgcgauugauaaaggagacggcauguguacaaauuucgaugucaacuugcauguggcccaccucaucaaucgggaccuguuagugucguauuuuaacaaugguucugucgcaaacgcugccgauugcgcugacuccgccgcagaggaacuguacuguguuacugggucauucgaucccccgaccggaguguauccucucagucgcuaccgagcccagguagcuggcuuugugagagucacacagaggggcagcuauugcacgcccccauacuccgugcuucaagacccuccccagccaguuguguggcggcguuauaugcuguacgacugugucuucgauuuuaccgugguaguugacucuuugcccacucaccagcuacagugcuacggggugagcccucgcagacuggcgucaauguguuauggaagugucacacucgaugugaugaggaucaaugagacccaucugaacaaucuuuucaaccgggucccagacacuuuuucccuguacaacuaugcauugccggauaauuucuacgguugccuccacgccuuuuaucugaacagcacagcucccuacgccguggcaaaucgauucccuauuaagccaggcgggcgccaaucuaacucagccuucauagacaccguuaucaaugcugcccauuauagucccuuuagcuacguguacggauuagcaguaauuacgcugaaaccugcggcuggcuccaagcuagucugcccaguggccaacgauaccguugugaucacagacagauguguccaguauaaucucuacgguuauacugggaccggcgugcugucuaagaacacaucgcuuguaauacccgauggaaaaguguucacugcaagcuccaccggcacaauuaucgggguuucaaucaauaguaccacuuacucuauuaugccgugcgucacggugccugugagcgucggauaucacccaaacuuugagagggccuugcuguucaauggucucuccuguucacagcggagccgcgcuguuacagaacccgugucugugcugugguccgccagugcaaccgcucaagacgccuuugacacuccuagcggcugcguagucaacguggagcuuagaaauaccacaaucguuaacaccugugcgaugcccauuggaaauucucugugcuucauaaacggguccaucgccacugcuaacgcagauucauugccaaggcuccagcuggugaauuacgacccuuuauaugauaacaguacagccacgcccaugaccccagucuacugggugaagguuccgacuaauuuuacacugagcgcuaccgaagaguacauucagacaacugccccuaaaaucaccaucgacugugcacguuaucuaugcggcgauucgucccggugucucaacgugcugcuucacuacgguacguucugcaaugacauuaacaaggcguugucucgaguaagcaccauacuggauucagcccuccugaguuuagucaaagagcuguccaucaauacaagagacgaagugacuaccuuuucuuucgauggggacuauaacuuuacaggccuuaugggauguuugggccccaauugcggggcuacuaccuacaggagcgccuucuccgaucuccuguaugacaaggugcgcauuacggauccaggauuuaugcagucauaccaaaagugcaucgacagccagugggguggcaguauucgggaccuacuguguacacagaccuauaacgggaucgcaguccugcccccuauaguuucuccagcuaugcaggcccucuacacuucccuuuuggugggagcaguagccagcucgggcuacacauucgguaucaccucagcuggggugauucccuucgcgacucaacugcaguuuagauuaaauggcaucggagucaccacacaggugcucguugagaaccagaaacugauugccucuaguuucaauaacgcacuugugaauauccaaaagggcuuuacggaaaccuccauagcucugagcaaaaugcaggaugucauuaaccagcaugccgcccaguugcacacucucgugguucaacuggggaacucuuucggagcuaucagcuccucaauuaaugagaucuuuaguaggcuagaaccuccggcagccaacgcggagguggaccgccugauaaauggccgaaugaugguccucaacacauauguaacccagcugcuuauccaggcuagcgaggccaaggcacaaaaugccuuggcugcacagaaaauuucugaaugcgugaaggcccagucccugcggaacgauuucugugguaaugggacacauguuuuaucaaucccacagcucgcgcccaacggagugcuguuuauucacuacgcuuauacuccuaccgaguacgccuucguccaaacgagugcaggccuuugccauaaugguacaggcuaugccccacgucaggggauguuugugcugcccaacaauaccaacauguggcacuucacuaccaugcaguuuuacaauccuguaaacaucagcgcuuccaauacacaggugcuaacuucuuguucggucaacuauaccagcguuaauuacacagugcucgaaccgucagugcccggagacuacgauuuccaaaaagaguucgacaaguuuuauaagaaccuguccacgauauucaacaauaccuuuaacccaaaugauuucaacuuuaguacugucgacgugacagcccagauuaaaucuuugcacgauguuguaaaucagcugaaccagagcuucaucgacuuaaagaaacucaauguguacgaaaagugaggacuagucccuguucccagagcccacuuuuuuuucuuuuuuugaaauaaaauagccugucuuucagaucucaaaggcucuuuucagagccaccaaaaaaaaaaaaaaaaaaaaaaaaaaaaaaaaaaaaaaaaaaaaaaaaaaaaaaaaaaaaaaaaaaaaaaaaaaaaaaaaaaaaaaaaaaaaaaaaaaaaa

SEQ ID NO: 15118 - RNA, 3977 nt, Artificial Sequence
  BatCoV/HKU9-1 BF_005I__YP_001039971.1 spike protein mRNA human (variant)
aggagagucccgcagucggcguccagcggcucugcuuguucgugugugugucguugcaggccuuauucaagcuuaccaugcugcucauccuugugcugggcgucagcuuggccgcugcauccagacccgagugcuucaacccuagguuuaccuuaacaccacugaaucacacucuaaacuacacgucuauuaaggccaaaguuucaaaugugcuccugccggaccccuauauagcguacagugggcaaacccuucggcaaaaccuguucauggcugauaugagcaauacaaucuuguauccuguaacuccacccgccaacggagcaaaugguggcuuuauuuacaacaccuccaucauuccugugucugccggacucuucgucaauacauggauguaucgccagccagcuucgucacgagcauacugucaggaacccuuugggguggccuucggcgacaccuuugagaacgaucguaucgcuauacugaucauggccccugacaaucuggguagcuggagugcgguugcaccaagaaaccagacuaauauuuaucucuuagugugcuccaacgccacacuguguaucaauccgggguucaacagguggggacccgcuggcucuuuuauugccccugaugcacuugucgaccauagcaacuccugcuucgugaauaacaccuuuucaguaaauaucaguacgagccggauaucuuuggcuuuccuguuuaaggauggcgaccuacucauuuaccacuccggguggcugccaacuucaaacuucgaacauggauucagccgcgguagucaccccaugaccuacuuuaugucucuuccuguuggcgggaaucugccaagagcccaauucuuucaguccaucgugaggagcaacgcgauugauaaaggagacggcauguguacaaauuucgaugucaacuugcauguggcccaccucaucaaucgggaccuguuagugucguauuuuaacaaugguucugucgcaaacgcugccgauugcgcugacuccgccgcagaggaacuguacuguguuacugggucauucgaucccccgaccggaguguauccucucagucgcuaccgagcccagguagcuggcuuugugagagucacacagaggggcagcuauugcacgcccccauacuccgugcuucaagacccuccccagccaguuguguggcggcguuauaugcuguacgacugugucuucgauuuuaccgugguaguugacucuuugcccacucaccagcuacagugcuacggggugagcccucgcagacuggcgucaauguguuauggaagugucacacucgaugugaugaggaucaaugagacccaucugaacaaucuuuucaaccgggucccagacacuuuuucccuguacaacuaugcauugccggauaauuucuacgguugccuccacgccuuuuaucugaacagcacagcucccuacgccguggcaaaucgauucccuauuaagccaggcgggcgccaaucuaacucagccuucauagacaccguuaucaaugcugcccauuauagucccuuuagcuacguguacggauuagcaguaauuacgcugaaaccugcggcuggcuccaagcuagucugcccaguggccaacgauaccguugugaucacagacagauguguccaguauaaucucuacgguuauacugggaccggcgugcugucuaagaacacaucgcuuguaauacccgauggaaaaguguucacugcaagcuccaccggcacaauuaucgggguuucaaucaauaguaccacuuacucuauuaugccgugcgucacggugccugugagcgucggauaucacccaaacuuugagagggccuugcuguucaauggucucuccuguucacagcggagccgcgcuguuacagaacccgugucugugcugugguccgccagugcaaccgcucaagacgccuuugacacuccuagcggcugcguagucaacguggagcuuagaaauaccacaaucguuaacaccugugcgaugcccauuggaaauucucugugcuucauaaacggguccaucgccacugcuaacgcagauucauugccaaggcuccagcuggugaauuacgacccuuuauaugauaacaguacagccacgcccaugaccccagucuacugggugaagguuccgacuaauuuuacacugagcgcuaccgaagaguacauucagacaacugccccuaaaaucaccaucgacugugcacguuaucuaugcggcgauucgucccggugucucaacgugcugcuucacuacgguacguucugcaaugacauuaacaaggcguugucucgaguaagcaccauacuggauucagcccuccugaguuuagucaaagagcuguccaucaauacaagagacgaagugacuaccuuuucuuucgauggggacuauaacuuuacaggccuuaugggauguuugggccccaauugcggggcuacuaccuacaggagcgccuucuccgaucuccuguaugacaaggugcgcauuacggauccaggauuuaugcagucauaccaaaagugcaucgacagccagugggguggcaguauucgggaccuacuguguacacagaccuauaacgggaucgcaguccugcccccuauaguuucuccagcuaugcaggcccucuacacuucccuuuuggugggagcaguagccagcucgggcuacacauucgguaucaccucagcuggggugauucccuucgcgacucaacugcaguuuagauuaaauggcaucggagucaccacacaggugcucguugagaaccagaaacugauugccucuaguuucaauaacgcacuugugaauauccaaaagggcuuuacggaaaccuccauagcucugagcaaaaugcaggaugucauuaaccagcaugccgcccaguugcacacucucgugguucaacuggggaacucuuucggagcuaucagcuccucaauuaaugagaucuuuaguaggcuagaaccuccggcagccaacgcggagguggaccgccugauaaauggccgaaugaugguccucaacacauauguaacccagcugcuuauccaggcuagcgaggccaaggcacaaaaugccuuggcugcacagaaaauuucugaaugcgugaaggcccagucccugcggaacgauuucugugguaaugggacacauguuuuaucaaucccacagcucgcgcccaacggagugcuguuuauucacuacgcuuauacuccuaccgaguacgccuucguccaaacgagugcaggccuuugccauaaugguacaggcuaugccccacgucaggggauguuugugcugcccaacaauaccaacauguggcacuucacuaccaugcaguuuuacaauccuguaaacaucagcgcuuccaauacacaggugcuaacuucuuguucggucaacuauaccagcguuaauuacacagugcucgaaccgucagugcccggagacuacgauuuccaaaaagaguucgacaaguuuuauaagaaccuguccacgauauucaacaauaccuuuaacccaaaugauuucaacuuuaguacugucgacgugacagcccagauuaaaucuuugcacgauguuguaaaucagcugaaccagagcuucaucgacuuaaagaaacucaauguguacgaaaagggcggguauaucccugaggcacccagagauggacaggcuuacgucaggaaagacggcgagugggugcugcuuuccaccuuuugaggacuagucccuguucccagagcccacuuuuuuuucuuuuuuugaaauaaaauagccugucuuucagaucucaaaggcucuuuucagagccaccaaaaaaaaaaaaaaaaaaaaaaaaaaaaaaaaaaaaaaaaaaaaaaaaaaaaaaaaaaaaaaaaaaaaaaaaaaaaaaaaaaaaaaaaaaaaaaaaaaaaa

SEQ ID NO: 15119 - RNA, 3755 nt, Artificial Sequence
  PDCoV/Swine/Thailand/S5011/2015__AMN91621.1 spike protein mRNA human (1-1160)
aggagagucccgcagucggcguccagcggcucugcuuguucgugugugugucguugcaggccuuauucaagcuuaccaugcagagagcccugcucaucaugacccuucugugcuuggcuagggcaaaguucgccgacgauuuacuggaccuacucacauuucccggcgcgcaccgguuccugcauaaaccuacucgcaacgauagcauucuuuacucccgagcuaauaacaauuuugacguggggguccugccaggauauccgacgaagaacguuaauuuguucucuccccucaccaacucaacacugccuauaaauggucugcaccguaguuaccaaccacucauguuaaacugucugacuaaaaucaccaaucagacacuuagcauguauuugcagcccuccgagauucagaccuacucuugcggcggggccauggugaaguaucaaacucaugaugcaguaagaaucauucuggaccuaaucgccacagauaggauaucgguggaagucgugggacaggcuggcgagaacuacguuuuuguguguucagaccaguucaauuauaccacggcacuccacaacagcaccuuuuucagucuuaauucccagcuguacugcuuuacuaacaauacauaccuggguaucuugccuccagaucucacugacuucaccgucuaucggacagggcaauuuuacgccaacggauaucuguuaggcacccugcccauuacggugaacuacguacgccucuauagaggccagcuuucugcuaauagcgcccauuucgcgcuggcaaacuugacugauacacuaaucacccugacuaauacaaccauuucccagaucacguacugugacaaaucaguuguggauaguauagccugccagaggagcucucaccaagucgaagacggguuuuauuccgacccuaagucagcugugcgggcccgccagcgaaccauugugacacucccaaagcugccggagcuugaagucguucagcugaacaucagcgcacacauggauuucggagaggcuagauuggacagugugacuauuaaugguaacaccucuuacuguguaacaaaacccuacuucaggcucgagacuaauuuucugugccggggcuguaccaugaacuuacguacagauaccugcuccuucgaccugagcgccgugaauaacgggaugucguuuucucaauucugucuauccacugaaucaggagcgugcgagaugaagaucaucgucacguauguguggaauuaccuccugcgccagagacuuuauguuacagccguggaaggccagacccauacugguaccacaaguguccacgcaaccgauacuagcuccgugauuacagacguaugcacggauuacaccauauaugggguuucuggaacuggcaucauuaaaccuagcgacuugcugcuccauaacggcaucgcuuuuacaucaccaaccggggagcuguacgccuucaagaauauaacaacuggaaaaacccuucaggugcugcccugugagacgccuagucaauugauugucaucaacaauaccguggucggugcuaucacauccagcaacucuacugaaaacaauagguuuaccacaacuauugugaccccaacguucuuuuauucaacaaacgccaccacucucaauugcacaaagcccguucugaguuacggcccgaucagcguguguuccgauggggcaauugccggaaccucuacuuuacagaacacccggccuucgauaguaagccuguacgacggcgagaucgaaauucccuccgcuuucucacuaaguguccagacagaguaucuccaggugcaagcggaacagguuaucguggauugcccacaguacgucuguaaugguaacucucgaugccugcagcuuuuggcacaauauacgagcgccuguuccaauaucgagguggcucugcacucaagcgcccagcucgacucucgcgagauuauauccauguuuaagaccaguacucagagccugcaguuagcaaacaucacaaauuucaaaggggacuacaacuuuucuuccauucugaccucaagaguaggcggaaggagugccaucgaagaucuuuuguucaauaaggugguuacaagcggccucgggacugucgaccaagauuauaaaucgugcucccggaacauggcuauugccgaccugguguguucucaguacuauaauggaaucauggugcuaccuggugucguugaugcagagaagauggcgauguacaccggcagccugacgggggcuaugguguucggaggccucacagccgcagccgcuauacccuuugccaccgcagugcaggcucgccugaacuacguagcccuucaaacuaaugucuugcaggaaaaccagaaaauccuggcggagucauucaaccaggccguggguaauauuaguuuagcucucuccucuguuaacgacgcaauccaacagaccagcgaagcccugaauacaguggcuauugccaucaagaaaauacagacugucgugaaccagcaaggggaggcacuuucccaccugaccgcgcaguugucaaauaacuuucaggccauuagcacaaguauccaggauauuuauaauagacucgaggaaguugaggcuaaccaacagguggacaggcugaucaauggccgucuagccgcacugaacgcuuacguaacgcagcuccugaaucaaaugucucagauacggcagucccgacuuuuggcccagcaaaagaucaacgaaugcgucaagagccagucgccaagauauggauucuguggcaaugggacccauaucuuuucacugacucagacagcacccaacggaauuuucuuuaugcacgccguguuagugccuaauaaauucaccagggucaacgcuucugcggguauuugcguugauaacacucgcggcuacagucuccagccacaacugauccuuuaucaguuuaauaacuccuggcgggugacaccgagaaauauguacgagcccaggcugccucgccaggccgacuucauacagcuaaccgauugcagcguaacguuuuauaacacuaccgcagcuaaucucccaaacauuauccccgacgugaucgaugucaaucaaacagugucugacauuaucgacaaccugccuaccgccacuccaccccagugggauguugggauuuacaauaacacaauauugaaucugaccguggaaaucaacgacuuacaggagcgaagcaagaaucucucccagauugccgaucggcugcaaaacuacaucgacaaucuuaacaauacacuggucgauuuggaguggcucaaccguguggaaacuuaucugaaauggccgugguacauuuggcuagcuaucgcacuggcccuuauagcguucguuaccauccucauuacgaucuuucuguguacaggaugcuguggcgguugcuucggguguugcggcggauguuucggcuuguuuucaaagaaaaagagauauaccgacgaucagccuacuccaaguuucaaguuuaaagaguggugaggacuagucccuguucccagagcccacuuuuuuuucuuuuuuugaaauaaaauagccugucuuucagaucucaaaggcucuuuucagagccaccaaaaaaaaaaaaaaaaaaaaaaaaaaaaaaaaaaaaaaaaaaaaaaaaaaaaaaaaaaaaaaaaaaaaaaaaaaaaaaaaaaaaaaaaaaaaaaaaaaaaa

SEQ ID NO: 15120 - RNA, 3755 nt, Artificial Sequence
  PDCoV/Swine/Thailand/S5011/2015__AMN91621.1 spike protein mRNA human (1-1160)(E855P_V856P)
aggagagucccgcagucggcguccagcggcucugcuuguucgugugugugucguugcaggccuuauucaagcuuaccaugcagagagcccugcucaucaugacccuucugugcuuggcuagggcaaaguucgccgacgauuuacuggaccuacucacauuucccggcgcgcaccgguuccugcauaaaccuacucgcaacgauagcauucuuuacucccgagcuaauaacaauuuugacguggggguccugccaggauauccgacgaagaacguuaauuuguucucuccccucaccaacucaacacugccuauaaauggucugcaccguaguuaccaaccacucauguuaaacugucugacuaaaaucaccaaucagacacuuagcauguauuugcagcccuccgagauucagaccuacucuugcggcggggccauggugaaguaucaaacucaugaugcaguaagaaucauucuggaccuaaucgccacagauaggauaucgguggaagucgugggacaggcuggcgagaacuacguuuuuguguguucagaccaguucaauuauaccacggcacuccacaacagcaccuuuuucagucuuaauucccagcuguacugcuuuacuaacaauacauaccuggguaucuugccuccagaucucacugacuucaccgucuaucggacagggcaauuuuacgccaacggauaucuguuaggcacccugcccauuacggugaacuacguacgccucuauagaggccagcuuucugcuaauagcgcccauuucgcgcuggcaaacuugacugauacacuaaucacccugacuaauacaaccauuucccagaucacguacugugacaaaucaguuguggauaguauagccugccagaggagcucucaccaagucgaagacggguuuuauuccgacccuaagucagcugugcgggcccgccagcgaaccauugugacacucccaaagcugccggagcuugaagucguucagcugaacaucagcgcacacauggauuucggagaggcuagauuggacagugugacuauuaaugguaacaccucuuacuguguaacaaaacccuacuucaggcucgagacuaauuuucugugccggggcuguaccaugaacuuacguacagauaccugcuccuucgaccugagcgccgugaauaacgggaugucguuuucucaauucugucuauccacugaaucaggagcgugcgagaugaagaucaucgucacguauguguggaauuaccuccugcgccagagacuuuauguuacagccguggaaggccagacccauacugguaccacaaguguccacgcaaccgauacuagcuccgugauuacagacguaugcacggauuacaccauauaugggguuucuggaacuggcaucauuaaaccuagcgacuugcugcuccauaacggcaucgcuuuuacaucaccaaccggggagcuguacgccuucaagaauauaacaacuggaaaaacccuucaggugcugcccugugagacgccuagucaauugauugucaucaacaauaccguggucggugcuaucacauccagcaacucuacugaaaacaauagguuuaccacaacuauugugaccccaacguucuuuuauucaacaaacgccaccacucucaauugcacaaagcccguucugaguuacggcccgaucagcguguguuccgauggggcaauugccggaaccucuacuuuacagaacacccggccuucgauaguaagccuguacgacggcgagaucgaaauucccuccgcuuucucacuaaguguccagacagaguaucuccaggugcaagcggaacagguuaucguggauugcccacaguacgucuguaaugguaacucucgaugccugcagcuuuuggcacaauauacgagcgccuguuccaauaucgagguggcucugcacucaagcgcccagcucgacucucgcgagauuauauccauguuuaagaccaguacucagagccugcaguuagcaaacaucacaaauuucaaaggggacuacaacuuuucuuccauucugaccucaagaguaggcggaaggagugccaucgaagaucuuuuguucaauaaggugguuacaagcggccucgggacugucgaccaagauuauaaaucgugcucccggaacauggcuauugccgaccugguguguucucaguacuauaauggaaucauggugcuaccuggugucguugaugcagagaagauggcgauguacaccggcagccugacgggggcuaugguguucggaggccucacagccgcagccgcuauacccuuugccaccgcagugcaggcucgccugaacuacguagcccuucaaacuaaugucuugcaggaaaaccagaaaauccuggcggagucauucaaccaggccguggguaauauuaguuuagcucucuccucuguuaacgacgcaauccaacagaccagcgaagcccugaauacaguggcuauugccaucaagaaaauacagacugucgugaaccagcaaggggaggcacuuucccaccugaccgcgcaguugucaaauaacuuucaggccauuagcacaaguauccaggauauuuauaauagacucgagccacccgaagcuaaccaacagguugacaggcugaucaauggccgucuagccgcacugaacgcuuacgugacgcagcuccugaaucaaaugucucagauacggcagucccgacuuuuggcccagcaaaagaucaacgagugcguaaagagccagucgccuagauauggauucuguggcaaugggacccauaucuuuucacugacucagacagcaccaaacggaauuuucuuuaugcacgccgucuuagugccgaauaaauucaccagggugaacgcuucugcggguauuugcgucgauaacacucgcggcuacagucuccagccccaacugauccuuuaucaguuuaauaacuccuggcggguuacaccuagaaauauguacgaaccaaggcugccccgccaggccgacuucauacagcuaaccgauugcagcgugacguuuuauaacacuaccgcagcuaaucucccuaacauuaucccagacguaaucgaugugaaucaaacagucucugacauuaucgacaaccugcccaccgccacuccgccucagugggauguggggauuuacaauaacacaauauugaaucugaccguugagaucaacgacuuacaggaacgaagcaagaaucucucccagauugccgaucggcugcaaaacuacaucgacaaucuuaacaauacacugguggauuuggaguggcucaaccgugucgagacuuaucugaaauggccaugguacauuuggcuagcuaucgcacuggcccuuauagcguucgugaccauccucauuacgaucuuucuguguacaggaugcuguggcgguugcuucggguguugcggcggauguuucggcuuguuuucaaagaaaaagagauauaccgacgaucagcccacuccuaguuucaaguuuaaagaauggugaggacuagucccuguucccagagcccacuuuuuuuucuuuuuuugaaauaaaauagccugucuuucagaucucaaaggcucuuuucagagccaccaaaaaaaaaaaaaaaaaaaaaaaaaaaaaaaaaaaaaaaaaaaaaaaaaaaaaaaaaaaaaaaaaaaaaaaaaaaaaaaaaaaaaaaaaaaaaaaaaaaaa

SEQ ID NO: 15121 - RNA, 3554 nt, Artificial Sequence
  PDCoV/Swine/Thailand/S5011/2015__AMN91621.1 spike protein mRNA human (variant)
aggagagucccgcagucggcguccagcggcucugcuuguucgugugugugucguugcaggccuuauucaagcuuaccaugcagagagcccugcucaucaugacccuucugugcuuggcuagggcaaaguucgccgacgauuuacuggaccuacucacauuucccggcgcgcaccgguuccugcauaaaccuacucgcaacgauagcauucuuuacucccgagcuaauaacaauuuugacguggggguccugccaggauauccgacgaagaacguuaauuuguucucuccccucaccaacucaacacugccuauaaauggucugcaccguaguuaccaaccacucauguuaaacugucugacuaaaaucaccaaucagacacuuagcauguauuugcagcccuccgagauucagaccuacucuugcggcggggccauggugaaguaucaaacucaugaugcaguaagaaucauucuggaccuaaucgccacagauaggauaucgguggaagucgugggacaggcuggcgagaacuacguuuuuguguguucagaccaguucaauuauaccacggcacuccacaacagcaccuuuuucagucuuaauucccagcuguacugcuuuacuaacaauacauaccuggguaucuugccuccagaucucacugacuucaccgucuaucggacagggcaauuuuacgccaacggauaucuguuaggcacccugcccauuacggugaacuacguacgccucuauagaggccagcuuucugcuaauagcgcccauuucgcgcuggcaaacuugacugauacacuaaucacccugacuaauacaaccauuucccagaucacguacugugacaaaucaguuguggauaguauagccugccagaggagcucucaccaagucgaagacggguuuuauuccgacccuaagucagcugugcgggcccgccagcgaaccauugugacacucccaaagcugccggagcuugaagucguucagcugaacaucagcgcacacauggauuucggagaggcuagauuggacagugugacuauuaaugguaacaccucuuacuguguaacaaaacccuacuucaggcucgagacuaauuuucugugccggggcuguaccaugaacuuacguacagauaccugcuccuucgaccugagcgccgugaauaacgggaugucguuuucucaauucugucuauccacugaaucaggagcgugcgagaugaagaucaucgucacguauguguggaauuaccuccugcgccagagacuuuauguuacagccguggaaggccagacccauacugguaccacaaguguccacgcaaccgauacuagcuccgugauuacagacguaugcacggauuacaccauauaugggguuucuggaacuggcaucauuaaaccuagcgacuugcugcuccauaacggcaucgcuuuuacaucaccaaccggggagcuguacgccuucaagaauauaacaacuggaaaaacccuucaggugcugcccugugagacgccuagucaauugauugucaucaacaauaccguggucggugcuaucacauccagcaacucuacugaaaacaauagguuuaccacaacuauugugaccccaacguucuuuuauucaacaaacgccaccacucucaauugcacaaagcccguucugaguuacggcccgaucagcguguguuccgauggggcaauugccggaaccucuacuuuacagaacacccggccuucgauaguaagccuguacgacggcgagaucgaaauucccuccgcuuucucacuaaguguccagacagaguaucuccaggugcaagcggaacagguuaucguggauugcccacaguacgucuguaaugguaacucucgaugccugcagcuuuuggcacaauauacgagcgccuguuccaauaucgagguggcucugcacucaagcgcccagcucgacucucgcgagauuauauccauguuuaagaccaguacucagagccugcaguuagcaaacaucacaaauuucaaaggggacuacaacuuuucuuccauucugaccucaagaguaggcggaaggagugccaucgaagaucuuuuguucaauaaggugguuacaagcggccucgggacugucgaccaagauuauaaaucgugcucccggaacauggcuauugccgaccugguguguucucaguacuauaauggaaucauggugcuaccuggugucguugaugcagagaagauggcgauguacaccggcagccugacgggggcuaugguguucggaggccucacagccgcagccgcuauacccuuugccaccgcagugcaggcucgccugaacuacguagcccuucaaacuaaugucuugcaggaaaaccagaaaauccuggcggagucauucaaccaggccguggguaauauuaguuuagcucucuccucuguuaacgacgcaauccaacagaccagcgaagcccugaauacaguggcuauugccaucaagaaaauacagacugucgugaaccagcaaggggaggcacuuucccaccugaccgcgcaguugucaaauaacuuucaggccauuagcacaaguauccaggauauuuauaauagacucgagccacccgaagcuaaccaacagguugacaggcugaucaauggccgucuagccgcacugaacgcuuacgugacgcagcuccugaaucaaaugucucagauacggcagucccgacuuuuggcccagcaaaagaucaacgagugcguaaagagccagucgccuagauauggauucuguggcaaugggacccauaucuuuucacugacucagacagcaccaaacggaauuuucuuuaugcacgccgucuuagugccgaauaaauucaccagggugaacgcuucugcggguauuugcgucgauaacacucgcggcuacagucuccagccccaacugauccuuuaucaguuuaauaacuccuggcggguuacaccuagaaauauguacgaaccaaggcugccccgccaggccgacuucauacagcuaaccgauugcagcgugacguuuuauaacacuaccgcagcuaaucucccuaacauuaucccagacguaaucgaugugaaucaaacagucucugacauuaucgacaaccugcccaccgccacuccgccucagugggauguggggauuuacaauaacacaauauugaaucugaccguugagaucaacgacuuacaggaacgaagcaagaaucucucccagauugccgaucggcugcaaaacuacaucgacaaucuuaacaauacacugguggauuuggaguggcucaaccgugucgagacuugaggacuagucccuguucccagagcccacuuuuuuuucuuuuuuugaaauaaaauagccugucuuucagaucucaaaggcucuuuucagagccaccaaaaaaaaaaaaaaaaaaaaaaaaaaaaaaaaaaaaaaaaaaaaaaaaaaaaaaaaaaaaaaaaaaaaaaaaaaaaaaaaaaaaaaaaaaaaaaaaaaaaa

SEQ ID NO: 15122 - RNA, 3635 nt, Artificial Sequence
  PDCoV/Swine/Thailand/S5011/2015__AMN91621.1 spike protein mRNA human (variant)
aggagagucccgcagucggcguccagcggcucugcuuguucgugugugugucguugcaggccuuauucaagcuuaccaugcagagagcccugcucaucaugacccuucugugcuuggcuagggcaaaguucgccgacgauuuacuggaccuacucacauuucccggcgcgcaccgguuccugcauaaaccuacucgcaacgauagcauucuuuacucccgagcuaauaacaauuuugacguggggguccugccaggauauccgacgaagaacguuaauuuguucucuccccucaccaacucaacacugccuauaaauggucugcaccguaguuaccaaccacucauguuaaacugucugacuaaaaucaccaaucagacacuuagcauguauuugcagcccuccgagauucagaccuacucuugcggcggggccauggugaaguaucaaacucaugaugcaguaagaaucauucuggaccuaaucgccacagauaggauaucgguggaagucgugggacaggcuggcgagaacuacguuuuuguguguucagaccaguucaauuauaccacggcacuccacaacagcaccuuuuucagucuuaauucccagcuguacugcuuuacuaacaauacauaccuggguaucuugccuccagaucucacugacuucaccgucuaucggacagggcaauuuuacgccaacggauaucuguuaggcacccugcccauuacggugaacuacguacgccucuauagaggccagcuuucugcuaauagcgcccauuucgcgcuggcaaacuugacugauacacuaaucacccugacuaauacaaccauuucccagaucacguacugugacaaaucaguuguggauaguauagccugccagaggagcucucaccaagucgaagacggguuuuauuccgacccuaagucagcugugcgggcccgccagcgaaccauugugacacucccaaagcugccggagcuugaagucguucagcugaacaucagcgcacacauggauuucggagaggcuagauuggacagugugacuauuaaugguaacaccucuuacuguguaacaaaacccuacuucaggcucgagacuaauuuucugugccggggcuguaccaugaacuuacguacagauaccugcuccuucgaccugagcgccgugaauaacgggaugucguuuucucaauucugucuauccacugaaucaggagcgugcgagaugaagaucaucgucacguauguguggaauuaccuccugcgccagagacuuuauguuacagccguggaaggccagacccauacugguaccacaaguguccacgcaaccgauacuagcuccgugauuacagacguaugcacggauuacaccauauaugggguuucuggaacuggcaucauuaaaccuagcgacuugcugcuccauaacggcaucgcuuuuacaucaccaaccggggagcuguacgccuucaagaauauaacaacuggaaaaacccuucaggugcugcccugugagacgccuagucaauugauugucaucaacaauaccguggucggugcuaucacauccagcaacucuacugaaaacaauagguuuaccacaacuauugugaccccaacguucuuuuauucaacaaacgccaccacucucaauugcacaaagcccguucugaguuacggcccgaucagcguguguuccgauggggcaauugccggaaccucuacuuuacagaacacccggccuucgauaguaagccuguacgacggcgagaucgaaauucccuccgcuuucucacuaaguguccagacagaguaucuccaggugcaagcggaacagguuaucguggauugcccacaguacgucuguaaugguaacucucgaugccugcagcuuuuggcacaauauacgagcgccuguuccaauaucgagguggcucugcacucaagcgcccagcucgacucucgcgagauuauauccauguuuaagaccaguacucagagccugcaguuagcaaacaucacaaauuucaaaggggacuacaacuuuucuuccauucugaccucaagaguaggcggaaggagugccaucgaagaucuuuuguucaauaaggugguuacaagcggccucgggacugucgaccaagauuauaaaucgugcucccggaacauggcuauugccgaccugguguguucucaguacuauaauggaaucauggugcuaccuggugucguugaugcagagaagauggcgauguacaccggcagccugacgggggcuaugguguucggaggccucacagccgcagccgcuauacccuuugccaccgcagugcaggcucgccugaacuacguagcccuucaaacuaaugucuugcaggaaaaccagaaaauccuggcggagucauucaaccaggccguggguaauauuaguuuagcucucuccucuguuaacgacgcaauccaacagaccagcgaagcccugaauacaguggcuauugccaucaagaaaauacagacugucgugaaccagcaaggggaggcacuuucccaccugaccgcgcaguugucaaauaacuuucaggccauuagcacaaguauccaggauauuuauaauagacucgagccacccgaagcuaaccaacagguugacaggcugaucaauggccgucuagccgcacugaacgcuuacgugacgcagcuccugaaucaaaugucucagauacggcagucccgacuuuuggcccagcaaaagaucaacgagugcguaaagagccagucgccuagauauggauucuguggcaaugggacccauaucuuuucacugacucagacagcaccaaacggaauuuucuuuaugcacgccgucuuagugccgaauaaauucaccagggugaacgcuucugcggguauuugcgucgauaacacucgcggcuacagucuccagccccaacugauccuuuaucaguuuaauaacuccuggcggguuacaccuagaaauauguacgaaccaaggcugccccgccaggccgacuucauacagcuaaccgauugcagcgugacguuuuauaacacuaccgcagcuaaucucccuaacauuaucccagacguaaucgaugugaaucaaacagucucugacauuaucgacaaccugcccaccgccacuccgccucagugggauguggggauuuacaauaacacaauauugaaucugaccguugagaucaacgacuuacaggaacgaagcaagaaucucucccagauugccgaucggcugcaaaacuacaucgacaaucuuaacaauacacugguggauuuggaguggcucaaccgugucgagacuggaggcuauauuccagaagcucccagagacggucaggcauacgugaggaaagauggggaguggguucugcuaucaaccuucugaggacuagucccuguucccagagcccacuuuuuuuucuuuuuuugaaauaaaauagccugucuuucagaucucaaaggcucuuuucagagccaccaaaaaaaaaaaaaaaaaaaaaaaaaaaaaaaaaaaaaaaaaaaaaaaaaaaaaaaaaaaaaaaaaaaaaaaaaaaaaaaaaaaaaaaaaaaaaaaaaaaaa

SEQ ID NO: 15123 - RNA, 4433 nt, Artificial Sequence
  PEDV/NPL-PEDv/2013/P10__AHZ94887.1 spike protein mRNA human (1-1386)
aggagagucccgcagucggcguccagcggcucugcuuguucgugugugugucguugcaggccuuauucaagcuuaccaugaaaagccugaccuacuucuggcucuuucuucccgugcuguccacauugucuuuaccucaggacgucacuagaugcucagccaacacgaauuucaggcgguuuuucaguaaauuuaacguucaagcuccagcagugguagugcugggcggguaucuaccgaucggagagaaucagggugucaacagcaccugguacugugccggccagcaccccacagcguccggggugcauggaauuuucguuucucacauacgcggcggucauggguuugaaaucggaauuucgcaggagccuuucgauccaucaggcuaucaacucuaccugcacaaggcuacuaauggcaacaccaaugccacagcacgacuucguaucugccaguuucccagcauuaaaacccuggggccuacugccaacaaugacgugacaaccggaagaaacuguuuguucaauaaggcuaucccagcacauaugagugaacacuccgucguggguauaacgugggauaacgacaggguaacuguguuuucugauaaaaucuauuacuucuauuuuaagaaugacuggagccggguugccaccaagugcuacaacuccggcgggugugcuaugcaguacgucuaugagcccacauacuauaugcucaaugugacuucagccggagaagauggcauuaguuaccagccuugcaccgcgaacuguaucgguuaugcagccaacguguucgcuacagagccaaaugggcacauuccggagggauucagcuuuaacaauugguuccugcugucuaacgacuccacccucguccauggcaaaguugugucaaaucaacccuuacugguaaacugccuuuuggccaucccuaagauauacggccuggggcaguuuuucagcuuuaaucagacgauugauggaguguguaacggugcagcuguccagcgcgccccagaagcgcuaagauucaauaucaacgacauuagugugauccucgccgagggcucuaucguucugcacacugcacuugggacaaauuuuuccuucgugugcagcaacucgucuaauccccaucuggcuaccuuugccauuccuuugggagcuacucaagucccauauuacuguuucuuuaaaguggauacauacaacuccaccguauauaaguuccucgccguucugcccccgacggugagggaaauagucaucaccaaauacggcgacguguaugucaaugguuuuggguacuuacaccugggccuccuugaugcagugacaauuaacuucacuggacacggcaccgacgacgauguuucaggguucuggacaaucgccaguacuaacuuuguggacgcucugauagagguacagggaaccgcgauucagcggaucuuguauugcgaugacccugucagccaacuaaagugcucccagguggcauucgaucuggacgaugguuuuuacacaaucucuagccgcaaucuccugucacaugagcagcccauuaguuucguuacccuuccauccuuuaacgaccacagcuucgugaauaucacugucucugccucauuuggcgggcauaguggagcuaaccugauugccagcgauacgacaauaaauggcuucuccucuuuuuguguggacacccgacaguucacuaucucguuguuuuauaacguaaccaauagcuacgguuacguguccaagucacaagauaguaacugcccuuucacacuccagucuguuaaugacuaucugagcuuuuccaaauucugugucucaaccagcuuacuggcaucugccugcacuauugaccuauucggguaccccgaauuuggcuccggagugaaguucacaagucucuauuuucaguucacgaaaggcgagcugaucaccgggacuccaaagccccuugaaggagugacagaugucagcuuuaugaccuuggacguuuguacaaaauacacuaucuaugguuucaagggcgaggggauuauaacccugacgaacucuuccuuucucgcuggaguguacuauaccucagauaguggccagcugcuugccuucaaaaaugugacaagcggugcaguauacucggucacuccuugcuccuuuucugaacaagcggcuuacguggacgaugacaucguuggggugauuagcucacugaguuccucuaccuucaacagcacaagagaguugccaggcuuuuucuaucacuccaaugauggaucaaacuguacugagccgguccucguguacagcaauaucggcguuugcaagagugggucuauuggauaugugcccucccagagcggccagguaaagaucgccccuaccgucacggguaacauaucgaucccaacaaacuucucaaugucuauuaggaccgaauaccugcaguuauauaauacucccgugaguguggacugugcaacauacgucugcaacggaaauucccgguguaaacaacugcuaacccaguauacugccgcuugcaagaccaucgagagcgcccuccagcugucugcacgucuugaaagcguugaggugaacuccauguugacaauuucagaugaagcucugcagcucgccacgaucaguagcuuuaauggggacggcuacaacuucaccaauguacugggugugucugucuacgauccugcgucccgcagagugguucaaaagaggucauuuauagaggacuuacuguucaacaagguggucacuaauggccuugggacaguggaugaggacuauaaacggugcaguaacggacgaagcguugccgacuuggugugugcucaguacuauuccggcgucaugguacucccaggggugguugaugcagaaaagcugcauauguacucugccucgcuaauuggaggcauggugcuggguggguuuaccagcgcugccgcacuccccuucucauaugcgguccaggcccgccugaauuaccuugcuuugcaaacagacgugcugcagagaaaccagcaguuacucgccgaguccuuuaauagugcaaucggaaacauuacuucugcuuucgaaagcguaaaggaggccaucucccaaaccucaaaaggccugaauacgguggcacacgcccuuacaaagguccaggaaguugugaacucucagggugcugcgcugacccaguugacugugcaacuccagcacaacuuucaggccauaagcaguuccaucgaugacauuuauagcaggcuggauauccuaucugcagacgcucaggucgaucggcugauuaccggccgccucucagcccugaaugccuucguggcucaaacacuuacuaaauacaccgagguucaggcauccagaaaguuggcccagcaaaaaguaaacgagugcgugaagagucagagccagagguacggguuuuguggaggcgacggggaacauaucuucucgcugguccaggcggcuccgcaaggauuacucuuucugcacacagugcuuguuccuucugauuucguggacgucauagccauugcaggccugugcgugaaugaugagaucgcccuaacgcuccgugaaccaggucugguauuguucacccaugagcugcagaaccacacugcuacagaguauuuugucuccagccggcgaauguucgaacccagaaagccuaccgugucagacuuuguucagaucgagaguuguguggucacuuacgugaauuuaacaagggaucagcuccccgacguuauuccagacuauaucgaugugaacaaaacccuguacgaaauucuugcaucucugccuaaucgcacggggcccuccuugccacucgacgucuucaacgccacuuaucugaaucuaaccggagagauagcggaucuggaacaacggagcgagucacuuagaaacacaaccgaggaacuccagagucugaucuacaauauuaacaauacuuugguggaccuggagugguuaaacaggguagaaacauauaucaaguggccgugguggguguggcucauuaucuuuauaguucugaucuucgucgugagccuucugguguuuugcuguauuuccaccggcugcugugguugcuguggcugcugcugugcuugcuucucuggguguugccgcggaccucgauugcagcccuacgaggucuuugaaaaaguacacgugcagugaggacuagucccuguucccagagcccacuuuuuuuucuuuuuuugaaauaaaauagccugucuuucagaucucaaaggcucuuuucagagccaccaaaaaaaaaaaaaaaaaaaaaaaaaaaaaaaaaaaaaaaaaaaaaaaaaaaaaaaaaaaaaaaaaaaaaaaaaaaaaaaaaaaaaaaaaaaaaaaaaaaaa

SEQ ID NO: 15124 - RNA, 4433 nt, Artificial Sequence
  PEDV/NPL-PEDv/2013/P10__AHZ94887.1 spike protein mRNA human (1-1386)(I1076P_L1077P)
aggagagucccgcagucggcguccagcggcucugcuuguucgugugugugucguugcaggccuuauucaagcuuaccaugaagucucugaccuacuucuggcucuuucuucccgugcuguccacauugucuuuaccucaggacgucacuagaugcucagccaacacgaauuucaggcgguuuuucaguaaauuuaacguucaagcuccagcagugguagugcugggcggguaucuaccgaucggagagaaucagggugucaacagcaccugguacugugccggccagcaccccacagcguccggggugcauggaauuuucguuucucacauacgcggcggucauggguuugaaaucggaauuucgcaggagccuuucgauccaucaggcuaucaacucuaccugcacaaggcuacuaauggcaacaccaaugccacagcacgacuucguaucugccaguuucccagcauuaaaacccuggggccuacugccaacaaugacgugacaaccggaagaaacuguuuguucaauaaggcuaucccagcacauaugagugaacacuccgucguggguauaacgugggauaacgacaggguaacuguuuuuagcgauaaaaucuauuacuucuauuuuaagaaugacuggagccggguggccaccaagugcuacaacuccggcgggugugcuaugcaguacgucuaugagcccacauacuauaugcucaaugugacuucagccggagaagauggcauuaguuaccagccuugcaccgcgaacuguaucgguuaugcagccaacguguucgcuacagagccaaaugggcacauuccggagggauucagcuuuaacaauugguuccugcugucuaacgacuccacccucguccauggcaaaguugugucaaaucaacccuuacugguaaacugccuuuuggccaucccuaagauauacggccuggggcaguuuuucagcuuuaaucagacgauugauggaguguguaacggugcagcuguccagcgcgccccagaagcgcuaagauucaauaucaacgacauuagugugauccucgccgagggcucuaucguucugcacacugcacuugggacaaauuuuuccuucgugugcagcaacucgucuaauccccaucuggcuaccuuugccauuccuuugggagcuacucaagucccauauuacuguuucuuuaaaguggauacauacaacuccaccguauauaaguuccucgccguucugcccccgacggugagggaaauagucaucaccaaauacggcgacguguaugucaaugguuuuggguacuuacaccugggccuccuugaugcagugacaauuaacuucacuggacacggcaccgacgacgauguuucaggguucuggacaaucgccaguacuaacuuuguggacgcucugauagagguacagggaaccgcgauucagcggaucuuguauugcgaugacccugucagccaacuaaagugcucccagguggcauucgaucuggacgaugguuuuuacacaaucucuagccgcaaucuccugucacaugagcagcccauuaguuucguuacccuuccauccuuuaacgaccacagcuucgugaauaucacugucucugccucauuuggcgggcauaguggagcuaaccugauugccagcgauacgacaauaaauggcuucuccucuuuuuguguggacacccgacaguucacuaucucguuguuuuauaacguaaccaauagcuacgguuacguguccaagucacaagauaguaacugcccuuucacacuccagucuguuaaugacuaucugagcuuuuccaaauucugugucucaaccagcuuacuggcaucugccugcacuauugaccuauucggguaccccgaauuuggcuccggagugaaguucacaagucucuauuuucaguucacgaaaggcgagcugaucaccgggacuccaaagccccuugaaggagugacagaugucagcuuuaugaccuuggacguuuguacaaaauacacuaucuaugguuucaagggcgaggggauuauaacccugacgaacucuuccuuucucgcuggaguguacuauaccucagauaguggccagcugcuugccuucaaaaaugugacaagcggugcaguauacucggucacuccuugcuccuuuucugaacaagcggcuuacguggacgaugacaucguuggggugauuagcucacugaguuccucuaccuucaacagcacaagagaguugccaggcuuuuucuaucacuccaaugauggaucaaacuguacugagccgguccucguguacagcaauaucggcguuugcaagagugggucuauuggauaugugcccucccagagcggccagguaaagaucgccccuaccgucacggguaacauaucgaucccaacaaacuucucaaugucuauuaggaccgaauaccugcaguuauauaauacucccgugaguguggacugugcaacauacgucugcaacggaaauucccgguguaaacaacugcuaacccaguauacugccgcuugcaagaccaucgagagcgcccuccagcugucugcacgucuugaaagcguugaggugaacuccauguugacaauuucagaugaagcucugcagcucgccacgaucaguagcuuuaauggggacggcuacaacuucaccaauguacugggugugucugucuacgauccugcgucccgcagagugguucaaaagaggucauuuauagaggacuuacuguucaacaagguggucacuaauggccuugggacaguggaugaggacuauaaacggugcaguaacggacgaagcguugccgacuuggugugugcucaguacuauuccggcgucaugguacucccaggggugguugaugcagaaaagcugcauauguacucugccucgcuaauuggaggcauggugcuggguggguuuaccagcgcugccgcacuccccuucucauaugcgguccaggcccgccugaauuaccuugcuuugcaaacagacgugcugcagagaaaccagcaguuacucgccgaguccuuuaauagugcaaucggaaacauuacuucugcuuucgaaagcguaaaggaggccaucucccaaaccucaaaaggccugaauacgguggcacacgcccuuacaaagguccaggaaguugugaacucucagggugcugcgcugacccaguugacugugcaacuccagcacaacuuucaggccauaagcaguuccaucgaugacauuuauagcaggcuggauccgccuucugcagacgcucaggucgaucggcuaaucaccggccgccugucagcccucaaugccuucguggcucaaacacugacuaaauacaccgagguucaggcauccagaaaacuugcccagcaaaaaguaaacgagugcgugaagagucagagccagagguacggguuuuguggaggcgacggggaacauauuuucucguugguccaggcggcuccacaaggacuguuauuucuccacacagugcugguucccucugauuucguggacgucaucgccauagcaggccuuugcgugaaugaugagauugcccugacgcuacgugaaccuggucucguacuguucacccaugaguugcagaaccacacugcuacagaguauuuugucuccagccggcgaauguucgaacccagaaagccaaccgugucagacuuuguucagaucgagaguuguguggucacuuacgugaaucugacaagggaucaguuaccugacguuauccccgacuauauugaugugaacaaaacccucuacgaaauccuggcaucucuuccaaaucgcacggggccgucccugccuuuggacgucuucaacgccacuuaucucaaucugaccggagagauugcggaucuagaacaacggagcgagucacugagaaacacaaccgaggaacuucagagucucauauacaauaucaacaauacucugguggacuuggaguggcugaacaggguagaaacauauauuaaguggcccuggugggugugguuaaucauuuuuaucguucucauauucgucgugagccugcuuguguuuugcuguaucuccaccggcugcugugguugcuguggcugcugcugugcuugcuucucuggguguugccgcggaccacgacugcagcccuacgaggucuuugaaaaaguacacgugcagugaggacuagucccuguucccagagcccacuuuuuuuucuuuuuuugaaauaaaauagccugucuuucagaucucaaaggcucuuuucagagccaccaaaaaaaaaaaaaaaaaaaaaaaaaaaaaaaaaaaaaaaaaaaaaaaaaaaaaaaaaaaaaaaaaaaaaaaaaaaaaaaaaaaaaaaaaaaaaaaaaaaaa

SEQ ID NO: 15125 - RNA, 4241 nt, Artificial Sequence
  PEDV/NPL-PEDv/2013/P10__AHZ94887.1 spike protein mRNA human (variant)
aggagagucccgcagucggcguccagcggcucugcuuguucgugugugugucguugcaggccuuauucaagcuuaccaugaagucucugaccuacuucuggcucuuucuucccgugcuguccacauugucuuuaccucaggacgucacuagaugcucagccaacacgaauuucaggcgguuuuucaguaaauuuaacguucaagcuccagcagugguagugcugggcggguaucuaccgaucggagagaaucagggugucaacagcaccugguacugugccggccagcaccccacagcguccggggugcauggaauuuucguuucucacauacgcggcggucauggguuugaaaucggaauuucgcaggagccuuucgauccaucaggcuaucaacucuaccugcacaaggcuacuaauggcaacaccaaugccacagcacgacuucguaucugccaguuucccagcauuaaaacccuggggccuacugccaacaaugacgugacaaccggaagaaacuguuuguucaauaaggcuaucccagcacauaugagugaacacuccgucguggguauaacgugggauaacgacaggguaacuguuuuuagcgauaaaaucuauuacuucuauuuuaagaaugacuggagccggguggccaccaagugcuacaacuccggcgggugugcuaugcaguacgucuaugagcccacauacuauaugcucaaugugacuucagccggagaagauggcauuaguuaccagccuugcaccgcgaacuguaucgguuaugcagccaacguguucgcuacagagccaaaugggcacauuccggagggauucagcuuuaacaauugguuccugcugucuaacgacuccacccucguccauggcaaaguugugucaaaucaacccuuacugguaaacugccuuuuggccaucccuaagauauacggccuggggcaguuuuucagcuuuaaucagacgauugauggaguguguaacggugcagcuguccagcgcgccccagaagcgcuaagauucaauaucaacgacauuagugugauccucgccgagggcucuaucguucugcacacugcacuugggacaaauuuuuccuucgugugcagcaacucgucuaauccccaucuggcuaccuuugccauuccuuugggagcuacucaagucccauauuacuguuucuuuaaaguggauacauacaacuccaccguauauaaguuccucgccguucugcccccgacggugagggaaauagucaucaccaaauacggcgacguguaugucaaugguuuuggguacuuacaccugggccuccuugaugcagugacaauuaacuucacuggacacggcaccgacgacgauguuucaggguucuggacaaucgccaguacuaacuuuguggacgcucugauagagguacagggaaccgcgauucagcggaucuuguauugcgaugacccugucagccaacuaaagugcucccagguggcauucgaucuggacgaugguuuuuacacaaucucuagccgcaaucuccugucacaugagcagcccauuaguuucguuacccuuccauccuuuaacgaccacagcuucgugaauaucacugucucugccucauuuggcgggcauaguggagcuaaccugauugccagcgauacgacaauaaauggcuucuccucuuuuuguguggacacccgacaguucacuaucucguuguuuuauaacguaaccaauagcuacgguuacguguccaagucacaagauaguaacugcccuuucacacuccagucuguuaaugacuaucugagcuuuuccaaauucugugucucaaccagcuuacuggcaucugccugcacuauugaccuauucggguaccccgaauuuggcuccggagugaaguucacaagucucuauuuucaguucacgaaaggcgagcugaucaccgggacuccaaagccccuugaaggagugacagaugucagcuuuaugaccuuggacguuuguacaaaauacacuaucuaugguuucaagggcgaggggauuauaacccugacgaacucuuccuuucucgcuggaguguacuauaccucagauaguggccagcugcuugccuucaaaaaugugacaagcggugcaguauacucggucacuccuugcuccuuuucugaacaagcggcuuacguggacgaugacaucguuggggugauuagcucacugaguuccucuaccuucaacagcacaagagaguugccaggcuuuuucuaucacuccaaugauggaucaaacuguacugagccgguccucguguacagcaauaucggcguuugcaagagugggucuauuggauaugugcccucccagagcggccagguaaagaucgccccuaccgucacggguaacauaucgaucccaacaaacuucucaaugucuauuaggaccgaauaccugcaguuauauaauacucccgugaguguggacugugcaacauacgucugcaacggaaauucccgguguaaacaacugcuaacccaguauacugccgcuugcaagaccaucgagagcgcccuccagcugucugcacgucuugaaagcguugaggugaacuccauguugacaauuucagaugaagcucugcagcucgccacgaucaguagcuuuaauggggacggcuacaacuucaccaauguacugggugugucugucuacgauccugcgucccgcagagugguucaaaagaggucauuuauagaggacuuacuguucaacaagguggucacuaauggccuugggacaguggaugaggacuauaaacggugcaguaacggacgaagcguugccgacuuggugugugcucaguacuauuccggcgucaugguacucccaggggugguugaugcagaaaagcugcauauguacucugccucgcuaauuggaggcauggugcuggguggguuuaccagcgcugccgcacuccccuucucauaugcgguccaggcccgccugaauuaccuugcuuugcaaacagacgugcugcagagaaaccagcaguuacucgccgaguccuuuaauagugcaaucggaaacauuacuucugcuuucgaaagcguaaaggaggccaucucccaaaccucaaaaggccugaauacgguggcacacgcccuuacaaagguccaggaaguugugaacucucagggugcugcgcugacccaguugacugugcaacuccagcacaacuuucaggccauaagcaguuccaucgaugacauuuauagcaggcuggauccgccuucugcagacgcucaggucgaucggcuaaucaccggccgccugucagcccucaaugccuucguggcucaaacacugacuaaauacaccgagguucaggcauccagaaaacuugcccagcaaaaaguaaacgagugcgugaagagucagagccagagguacggguuuuguggaggcgacggggaacauauuuucucguugguccaggcggcuccacaaggacuguuauuucuccacacagugcugguucccucugauuucguggacgucaucgccauagcaggccuuugcgugaaugaugagauugcccugacgcuacgugaaccuggucucguacuguucacccaugaguugcagaaccacacugcuacagaguauuuugucuccagccggcgaauguucgaacccagaaagccaaccgugucagacuuuguucagaucgagaguuguguggucacuuacgugaaucugacaagggaucaguuaccugacguuauccccgacuauauugaugugaacaaaacccucuacgaaauccuggcaucucuuccaaaucgcacggggccgucccugccuuuggacgucuucaacgccacuuaucucaaucugaccggagagauugcggaucuagaacaacggagcgagucacugagaaacacaaccgaggaacuucagagucucauauacaauaucaacaauacucugguggacuuggaguggcugaacaggguagaaacaugaggacuagucccuguucccagagcccacuuuuuuuucuuuuuuugaaauaaaauagccugucuuucagaucucaaaggcucuuuucagagccaccaaaaaaaaaaaaaaaaaaaaaaaaaaaaaaaaaaaaaaaaaaaaaaaaaaaaaaaaaaaaaaaaaaaaaaaaaaaaaaaaaaaaaaaaaaaaaaaaaaaaa

SEQ ID NO: 15126 - RNA, 4322 nt, Artificial Sequence
  PEDV/NPL-PEDv/2013/P10__AHZ94887.1 spike protein mRNA human (variant)
aggagagucccgcagucggcguccagcggcucugcuuguucgugugugugucguugcaggccuuauucaagcuuaccaugaagucucugaccuacuucuggcucuuucuucccgugcuguccacauugucuuuaccucaggacgucacuagaugcucagccaacacgaauuucaggcgguuuuucaguaaauuuaacguucaagcuccagcagugguagugcugggcggguaucuaccgaucggagagaaucagggugucaacagcaccugguacugugccggccagcaccccacagcguccggggugcauggaauuuucguuucucacauacgcggcggucauggguuugaaaucggaauuucgcaggagccuuucgauccaucaggcuaucaacucuaccugcacaaggcuacuaauggcaacaccaaugccacagcacgacuucguaucugccaguuucccagcauuaaaacccuggggccuacugccaacaaugacgugacaaccggaagaaacuguuuguucaauaaggcuaucccagcacauaugagugaacacuccgucguggguauaacgugggauaacgacaggguaacuguuuuuagcgauaaaaucuauuacuucuauuuuaagaaugacuggagccggguggccaccaagugcuacaacuccggcgggugugcuaugcaguacgucuaugagcccacauacuauaugcucaaugugacuucagccggagaagauggcauuaguuaccagccuugcaccgcgaacuguaucgguuaugcagccaacguguucgcuacagagccaaaugggcacauuccggagggauucagcuuuaacaauugguuccugcugucuaacgacuccacccucguccauggcaaaguugugucaaaucaacccuuacugguaaacugccuuuuggccaucccuaagauauacggccuggggcaguuuuucagcuuuaaucagacgauugauggaguguguaacggugcagcuguccagcgcgccccagaagcgcuaagauucaauaucaacgacauuagugugauccucgccgagggcucuaucguucugcacacugcacuugggacaaauuuuuccuucgugugcagcaacucgucuaauccccaucuggcuaccuuugccauuccuuugggagcuacucaagucccauauuacuguuucuuuaaaguggauacauacaacuccaccguauauaaguuccucgccguucugcccccgacggugagggaaauagucaucaccaaauacggcgacguguaugucaaugguuuuggguacuuacaccugggccuccuugaugcagugacaauuaacuucacuggacacggcaccgacgacgauguuucaggguucuggacaaucgccaguacuaacuuuguggacgcucugauagagguacagggaaccgcgauucagcggaucuuguauugcgaugacccugucagccaacuaaagugcucccagguggcauucgaucuggacgaugguuuuuacacaaucucuagccgcaaucuccugucacaugagcagcccauuaguuucguuacccuuccauccuuuaacgaccacagcuucgugaauaucacugucucugccucauuuggcgggcauaguggagcuaaccugauugccagcgauacgacaauaaauggcuucuccucuuuuuguguggacacccgacaguucacuaucucguuguuuuauaacguaaccaauagcuacgguuacguguccaagucacaagauaguaacugcccuuucacacuccagucuguuaaugacuaucugagcuuuuccaaauucugugucucaaccagcuuacuggcaucugccugcacuauugaccuauucggguaccccgaauuuggcuccggagugaaguucacaagucucuauuuucaguucacgaaaggcgagcugaucaccgggacuccaaagccccuugaaggagugacagaugucagcuuuaugaccuuggacguuuguacaaaauacacuaucuaugguuucaagggcgaggggauuauaacccugacgaacucuuccuuucucgcuggaguguacuauaccucagauaguggccagcugcuugccuucaaaaaugugacaagcggugcaguauacucggucacuccuugcuccuuuucugaacaagcggcuuacguggacgaugacaucguuggggugauuagcucacugaguuccucuaccuucaacagcacaagagaguugccaggcuuuuucuaucacuccaaugauggaucaaacuguacugagccgguccucguguacagcaauaucggcguuugcaagagugggucuauuggauaugugcccucccagagcggccagguaaagaucgccccuaccgucacggguaacauaucgaucccaacaaacuucucaaugucuauuaggaccgaauaccugcaguuauauaauacucccgugaguguggacugugcaacauacgucugcaacggaaauucccgguguaaacaacugcuaacccaguauacugccgcuugcaagaccaucgagagcgcccuccagcugucugcacgucuugaaagcguugaggugaacuccauguugacaauuucagaugaagcucugcagcucgccacgaucaguagcuuuaauggggacggcuacaacuucaccaauguacugggugugucugucuacgauccugcgucccgcagagugguucaaaagaggucauuuauagaggacuuacuguucaacaagguggucacuaauggccuugggacaguggaugaggacuauaaacggugcaguaacggacgaagcguugccgacuuggugugugcucaguacuauuccggcgucaugguacucccaggggugguugaugcagaaaagcugcauauguacucugccucgcuaauuggaggcauggugcuggguggguuuaccagcgcugccgcacuccccuucucauaugcgguccaggcccgccugaauuaccuugcuuugcaaacagacgugcugcagagaaaccagcaguuacucgccgaguccuuuaauagugcaaucggaaacauuacuucugcuuucgaaagcguaaaggaggccaucucccaaaccucaaaaggccugaauacgguggcacacgcccuuacaaagguccaggaaguugugaacucucagggugcugcgcugacccaguugacugugcaacuccagcacaacuuucaggccauaagcaguuccaucgaugacauuuauagcaggcuggauccgccuucugcagacgcucaggucgaucggcuaaucaccggccgccugucagcccucaaugccuucguggcucaaacacugacuaaauacaccgagguucaggcauccagaaaacuugcccagcaaaaaguaaacgagugcgugaagagucagagccagagguacggguuuuguggaggcgacggggaacauauuuucucguugguccaggcggcuccacaaggacuguuauuucuccacacagugcugguucccucugauuucguggacgucaucgccauagcaggccuuugcgugaaugaugagauugcccugacgcuacgugaaccuggucucguacuguucacccaugaguugcagaaccacacugcuacagaguauuuugucuccagccggcgaauguucgaacccagaaagccaaccgugucagacuuuguucagaucgagaguuguguggucacuuacgugaaucugacaagggaucaguuaccugacguuauccccgacuauauugaugugaacaaaacccucuacgaaauccuggcaucucuuccaaaucgcacggggccgucccugccuuuggacgucuucaacgccacuuaucucaaucugaccggagagauugcggaucuagaacaacggagcgagucacugagaaacacaaccgaggaacuucagagucucauauacaauaucaacaauacucugguggacuuggaguggcugaacaggguagaaacaggcgguuauauucccgaggcuccacgcgauggccaggccuacgugcgaaaggacggggaauggguuuuacucagcaccuuuugaggacuagucccuguucccagagcccacuuuuuuuucuuuuuuugaaauaaaauagccugucuuucagaucucaaaggcucuuuucagagccaccaaaaaaaaaaaaaaaaaaaaaaaaaaaaaaaaaaaaaaaaaaaaaaaaaaaaaaaaaaaaaaaaaaaaaaaaaaaaaaaaaaaaaaaaaaaaaaaaaaaaa

SEQ ID NO: 15127 - RNA, 4358 nt, Artificial Sequence
  MHV/S__BAK18575.1 spike protein mRNA human (1-1361)
aggagagucccgcagucggcguccagcggcucugcuuguucgugugugugucguugcaggccuuauucaagcuuaccaugcuuagcguguucauccucuuucuucccuccugccugggcuacauuggggacuucagauguauaaacuuggucaauaccgauacaucuaacgccucagcuccuaguguuagcacugaggugguagacguguccaagggaaucgguacguauuacgucuuagauaggguguaucugaaugcaacccuacuccugacaggcuacuauccaguugacgggucuaacuaccggaaucuugcccugacuggaaccaacacauugucgcucaauugguauaaaccgcccuuucugucagaauuuaacgauggcauuuuugcgaaggugaaaaaucugaaggcuagccucccuaaagacaguaccuccuacuucccaacuaucgucauugguucuaacuuugugacaaccagcuacacgguaguuuuagagcccuauaaugggaucauaauggccuccaucugccaguacacuauuugucugcuuccuuauaccgauugcaagccaaacacaggaggcaauaaguugaucggcuucuggcacauugaccugaaaucacccguguguauccuaaagcgcaacuuuacuuucaaugucaacgcagauuggcucuacuuucauuucuaucaacaagggggaaccuuuuacgccuauuacgcugacgcagguagugccacaaccuuccuguucagcucuuacauaggcgaugugcuuacgcaguauuuugugcugccuuucgucugcacuccaacaaccacugggguuuucuccccgcaguacugggugacacccuugguaaaacgacaguaucucuucaacuuuaaucagaagggaaccauuacgucagcuguggacugugccagcaguuacaccucugaaaucaaaugcaagacacaguccaugaacccuaauacuggcgucuaugaucugagcgguuacaccgugcagccaguuggguuaguguaucguagagucaggaaccugcccgacugucggauugaggacuggcucgcggcaaagacagugccuucgccacuuaauugggaacgcaaaacuuuccaaaacugcaauuuuaaccugucuuccuugcuaagacugguacaggccggaucacucaguuguagcaauaucgaugcugccaagguuuacggcaugugcuucggcuccaugucuaucgacaaauuugcaauucccaacagcaggcggguggaucugcagcuuggaaauucaggguuccugcagaguuuuaacuacaagauagacacccgcgcuacauccugccaauuguauuacagccucgcccagucuaaugucaccgugaacaaucacaacccgucaaguuggaaccgaagauaugguuucaaugaugucgcgacuuuuggcagggggaaacaugacguggccuacgcagaggcuuguuucacgguuggagccagcuauugcccuugugcuaaccccuccaucgugucuccaugcacaaccggcaagccuaaauucgccaauugucccacugguaccacaaaccgggagugcaauguacuggcauuagggucgaaccuguuuaagugugauugcaccuguaauccaagcccccuaacuacauacgaccuccguugccugcagggccgcuccaugcuuggagucggcgaucacugugaaggguugggagugcuggaggacaagugcgguggcucaaacacgugcaauuguagugccgaugcuuucguugggugggcgaaagacucuugccucagcaacggaagaugucauaucuuuuccaaucugaugcuuaacggcauuaauucagguaccacuugcagcacagaccugcaauugccuaacaccgaaguggucacagggauaugugugaaguaugaucucuacggcauuacuggacagggcguauucaaagaggugaaggcagacuacuauaauucuuggcagaaccuguuauacgauguuaacgggaaucugaacggauuuagggacaucgucaccaauaaaacguaucuaacccgguccugcuacaguggucgagugagcgccgcuuaucaccaggaugccccagagccggcacuccuguaccgcaaccuuaagugugacuauguguucaauaacaauaucuuuagagaagagacacccuugaacuacuucgauucuuaccugggcugcgucguuaaugccgacaacuccacugaacaagcuguggaugccugugaccucaggauggggucaggacugugcgugaauuauaguaccgcacaccgggcgcgcacaagcguaucgacuggcuacaaguuaaccacguuugagccuuucacagucuccauugugaacgauucuguugaaagcgugggugggcuguaugagaugcagaucccaaccaauuuuacuauugcuucacaucaggaguucauacagacaagagcccccaaagucaccaucgacugugcagccuuugugugcggcgauuacacuaccugcaggcaacagcuuguugaauauggaaguuucugugacaacauuaaugcuaucuugggcgaggugaacaaccucaucgacacaaugcagcugcagguagccuccgcacuaauucaaggggucacgcugucuagccgucucgcugauggaauauccggccagaucgacgauauuaauuucucaccucugcuugguugcuuggggagccaguguagugaaggaaccauggccgcgcagggccggucuacuguggaggaccuguuauuugauaaggugaaacucuccgacgucgguuucguugaagccuacaacaauugcacaggcgggcaagaggugcgagaucugcuuuguguacagagcuuuaacggaaucaaggugcugccacccgucuugucggagaaucaggugucaggcuauaccgcuggggcaacagccucuaguauguucccgccuugguccgcugccgcaggaguuccauuuagccucucugugcaauacagaauuaacggccugggugucacuaugaaugugcuaagcgaaaaccagaaaaugaucgcguccgccuucaauaacgcuauaggggccauccaggagggauuugacgcaaccaauucagcucuggccaagauucagaguguugugaacgcaaaugccgaagcucucaacaaucugcuuaaccaauugagcaauagguucggcgcgaucucugccucccugcaggagauuuuaucacgccucgaugcacuggaagcucaggcccagaucgaccggcuuauaaacgguagacugacggcccuaaacgcuuacgucaguaagcaacucagcgauaugacacugauuaaaguauccgcagcccaggcgaucgagaaggugaaugagugcguuaaaucucagucgcccaggauuaacuuuuguggcaaugggaaccacaucuugagccuggugcagaaugcuccuuauggauuauacuuccuccauuuuucauauguccccaccuccuucacuaccgccaacgugaguccaggccugugcauaucuggggaccgcggacuugcaccuaaggccggcuacuucguacaagaugacggugaauggaaauuuacagggagcaauuauuacuaucccgagccaaucacugacaagaacuccguggucaugucaucuugugcuguuaauuacaccaaggcaccggaaguguuccugaacacaagcauuaguaauuugccugauuuuaaagaggagcucgacaagugguucaaaaaccagacguccguggcccccgaucugagccuagacuuugaaaagcugaaugucaccuuccuugaucucucugacgagaugaaccgaauccaggaagcgauuaaaaagcugaaugagucauacaucaacuugaaagaaauaggaacuuaugagauguacgugaaguggccaugguauguuuggcuguuaauuggccucgcugguguagccgugugcguccugcuguuuuucaucuguugcugcacaggcuguggguccugcuguuuuaagaaaugcggaaacuguugcgaugaguacggcgggcaccaagacaguaucgugauucacaauaucagcucgcaugaagauugaggacuagucccuguucccagagcccacuuuuuuuucuuuuuuugaaauaaaauagccugucuuucagaucucaaaggcucuuuucagagccaccaaaaaaaaaaaaaaaaaaaaaaaaaaaaaaaaaaaaaaaaaaaaaaaaaaaaaaaaaaaaaaaaaaaaaaaaaaaaaaaaaaaaaaaaaaaaaaaaaaaaa

SEQ ID NO: 15128 - RNA, 4358 nt, Artificial Sequence
  MHV/S__BAK18575.1 spike protein mRNA human (1-1361)(A1073P_L1074P)
aggagagucccgcagucggcguccagcggcucugcuuguucgugugugugucguugcaggccuuauucaagcuuaccaugcugagcguguucauccucuuucuucccuccugccugggcuacauuggggacuucagauguauaaacuuggucaauaccgauacaucuaacgccucagcuccuaguguuagcacugaggugguagacguguccaagggaaucgguacguauuacgucuuagauaggguguaucugaaugcaacccuacuccugacaggcuacuauccaguugacgggucuaacuaccggaaucuugcccugacuggaaccaacacauugucgcucaauugguauaaaccgcccuuucugucagaauuuaacgauggcauuuuugcgaaggugaaaaaucugaaggcuagccucccuaaagacaguaccuccuacuucccaacuaucgucauugguucuaacuuugugacaaccagcuacacgguaguuuuagagcccuauaaugggaucauaauggccuccaucugccaguacacuauuugucugcuuccuuauaccgauugcaagccaaacacaggaggcaauaaguugaucggcuucuggcacauugaccugaaaucacccguguguauccuaaagcgcaacuuuacuuucaaugucaacgcagauuggcucuacuuucauuucuaucaacaagggggaaccuuuuacgccuauuacgcugacgcagguagugccacaaccuuccuguucagcucuuacauaggcgaugugcuuacgcaguauuuugugcugccuuucgucugcacuccaacaaccacugggguuuucuccccgcaguacugggugacacccuugguaaaacgacaguaucucuucaacuuuaaucagaagggaaccauuacgucagcuguggacugugccagcaguuacaccucugaaaucaaaugcaagacacaguccaugaacccuaauacuggcgucuaugaucugagcgguuacaccgugcagccaguuggguuaguguaucguagagucaggaaccugcccgacugucggauugaggacuggcucgcggcaaagacagugccuucgccacuuaauugggaacgcaaaacuuuccaaaacugcaauuuuaaccugucuuccuugcuaagacugguacaggccggaucacucaguuguagcaauaucgaugcugccaagguuuacggcaugugcuucggcuccaugucuaucgacaaauuugcaauucccaacagcaggcggguggaucugcagcuuggaaauucaggguuccugcagaguuuuaacuacaagauagacacccgcgcuacauccugccaauuguauuacagccucgcccagucuaaugucaccgugaacaaucacaacccgucaaguuggaaccgaagauaugguuucaaugaugucgcgacuuuuggcagggggaaacaugacguggccuacgcagaggcuuguuucacgguuggagccagcuauugcccuugugcuaaccccuccaucgugucuccaugcacaaccggcaagccuaaauucgccaauugucccacugguaccacaaaccgggagugcaauguacuggcauuagggucgaaccuguuuaagugugauugcaccuguaauccaagcccccuaacuacauacgaccuccguugccugcagggccgcuccaugcuuggagucggcgaucacugugaaggguugggagugcuggaggacaagugcgguggcucaaacacgugcaauuguagugccgaugcuuucguugggugggcgaaagacucuugccucagcaacggaagaugucauaucuuuuccaaucugaugcuuaacggcauuaauucagguaccacuugcagcacagaccugcaauugccuaacaccgaaguggucacagggauaugugugaaguaugaucucuacggcauuacuggacagggcguauucaaagaggugaaggcagacuacuauaauucuuggcagaaccuguuauacgauguuaacgggaaucugaacggauuuagggacaucgucaccaauaaaacguaucuaacccgguccugcuacaguggucgagugagcgccgcuuaucaccaggaugccccagagccggcacuccuguaccgcaaccuuaagugugacuauguguucaauaacaauaucuuuagagaagagacacccuugaacuacuucgauucuuaccugggcugcgucguuaaugccgacaacuccacugaacaagcuguggaugccugugaccucaggauggggucaggacugugcgugaauuauaguaccgcacaccgggcgcgcacaagcguaucgacuggcuacaaguuaaccacguuugagccuuucacagucuccauugugaacgauucuguugaaagcgugggugggcuguaugagaugcagaucccaaccaauuuuacuauugcuucacaucaggaguucauacagacaagagcccccaaagucaccaucgacugugcagccuuugugugcggcgauuacacuaccugcaggcaacagcuuguugaauauggaaguuucugugacaacauuaaugcuaucuugggcgaggugaacaaccucaucgacacaaugcagcugcagguagccuccgcacuaauucaaggggucacgcugucuagccgucucgcugauggaauauccggccagaucgacgauauuaauuucucaccucugcuugguugcuuggggagccaguguagugaaggaaccauggccgcgcagggccggucuacuguggaggaccuguuauuugauaaggugaaacucuccgacgucgguuucguugaagccuacaacaauugcacaggcgggcaagaggugcgagaucugcuuuguguacagagcuuuaacggaaucaaggugcugccacccgucuugucggagaaucaggugucaggcuauaccgcuggggcaacagccucuaguauguucccgccuugguccgcugccgcaggaguuccauuuagccucucugugcaauacagaauuaacggccugggugucacuaugaaugugcuaagcgaaaaccagaaaaugaucgcguccgccuucaauaacgcuauaggggccauccaggagggauuugacgcaaccaauucagcucuggccaagauucagaguguugugaacgcaaaugccgaagcucucaacaaucugcuuaaccaauugagcaauagguucggcgcgaucucugccucccugcaggagauuuuaucacgccucgaucccccugaagcacaggcucagaucgaccggcugauaaacgguagacuuacggcccugaacgccuacgucaguaagcaacuaagcgauaugacacucauuaaaguauccgcugcacaggccaucgagaaggugaaugagugcguuaaaucucagucgcccaggauuaacuuuuguggcaaugggaaccacauccugagcuuggugcagaaugcgccauauggacuguacuucuuacauuuuucauaugucccuaccuccuucacuaccgcuaacgugagucccggccucugcauaucuggggaccgcggacuggccccaaaggcaggcuacuucguacaagaugacggugaauggaaauuuacagggagcaauuauuacuauccggagccuaucacugacaagaacuccguggucaugucaucuugugccguuaauuacaccaaggcucccgaaguguuccuuaacacaagcauuaguaaucugccagauuuuaaagaggaguuggacaagugguucaaaaaccagacguccguggcacccgaucucagccuggacuuugaaaagcuaaaugucaccuuccuggaucuuucugacgagaugaaccgaauccaggaagccauuaaaaagcucaaugagucauacaucaaccugaaagaaauaggaacuuaugagauguacgugaaguggccuugguauguuugguugcugauuggcuuagcggguguagcugugugcguccuccuguuuuucaucuguugcugcacaggcuguggguccugcuguuuuaagaaaugcggaaacuguugcgaugaguacggcgggcaccaagacaguaucgugauucacaauaucagcucgcaugaagauugaggacuagucccuguucccagagcccacuuuuuuuucuuuuuuugaaauaaaauagccugucuuucagaucucaaaggcucuuuucagagccaccaaaaaaaaaaaaaaaaaaaaaaaaaaaaaaaaaaaaaaaaaaaaaaaaaaaaaaaaaaaaaaaaaaaaaaaaaaaaaaaaaaaaaaaaaaaaaaaaaaaaa

SEQ ID NO: 15129 - RNA, 4166 nt, Artificial Sequence
  MHV/S__BAK18575.1 spike protein mRNA human (variant)
aggagagucccgcagucggcguccagcggcucugcuuguucgugugugugucguugcaggccuuauucaagcuuaccaugcugagcguguucauccucuuucuucccuccugccugggcuacauuggggacuucagauguauaaacuuggucaauaccgauacaucuaacgccucagcuccuaguguuagcacugaggugguagacguguccaagggaaucgguacguauuacgucuuagauaggguguaucugaaugcaacccuacuccugacaggcuacuauccaguugacgggucuaacuaccggaaucuugcccugacuggaaccaacacauugucgcucaauugguauaaaccgcccuuucugucagaauuuaacgauggcauuuuugcgaaggugaaaaaucugaaggcuagccucccuaaagacaguaccuccuacuucccaacuaucgucauugguucuaacuuugugacaaccagcuacacgguaguuuuagagcccuauaaugggaucauaauggccuccaucugccaguacacuauuugucugcuuccuuauaccgauugcaagccaaacacaggaggcaauaaguugaucggcuucuggcacauugaccugaaaucacccguguguauccuaaagcgcaacuuuacuuucaaugucaacgcagauuggcucuacuuucauuucuaucaacaagggggaaccuuuuacgccuauuacgcugacgcagguagugccacaaccuuccuguucagcucuuacauaggcgaugugcuuacgcaguauuuugugcugccuuucgucugcacuccaacaaccacugggguuuucuccccgcaguacugggugacacccuugguaaaacgacaguaucucuucaacuuuaaucagaagggaaccauuacgucagcuguggacugugccagcaguuacaccucugaaaucaaaugcaagacacaguccaugaacccuaauacuggcgucuaugaucugagcgguuacaccgugcagccaguuggguuaguguaucguagagucaggaaccugcccgacugucggauugaggacuggcucgcggcaaagacagugccuucgccacuuaauugggaacgcaaaacuuuccaaaacugcaauuuuaaccugucuuccuugcuaagacugguacaggccggaucacucaguuguagcaauaucgaugcugccaagguuuacggcaugugcuucggcuccaugucuaucgacaaauuugcaauucccaacagcaggcggguggaucugcagcuuggaaauucaggguuccugcagaguuuuaacuacaagauagacacccgcgcuacauccugccaauuguauuacagccucgcccagucuaaugucaccgugaacaaucacaacccgucaaguuggaaccgaagauaugguuucaaugaugucgcgacuuuuggcagggggaaacaugacguggccuacgcagaggcuuguuucacgguuggagccagcuauugcccuugugcuaaccccuccaucgugucuccaugcacaaccggcaagccuaaauucgccaauugucccacugguaccacaaaccgggagugcaauguacuggcauuagggucgaaccuguuuaagugugauugcaccuguaauccaagcccccuaacuacauacgaccuccguugccugcagggccgcuccaugcuuggagucggcgaucacugugaaggguugggagugcuggaggacaagugcgguggcucaaacacgugcaauuguagugccgaugcuuucguugggugggcgaaagacucuugccucagcaacggaagaugucauaucuuuuccaaucugaugcuuaacggcauuaauucagguaccacuugcagcacagaccugcaauugccuaacaccgaaguggucacagggauaugugugaaguaugaucucuacggcauuacuggacagggcguauucaaagaggugaaggcagacuacuauaauucuuggcagaaccuguuauacgauguuaacgggaaucugaacggauuuagggacaucgucaccaauaaaacguaucuaacccgguccugcuacaguggucgagugagcgccgcuuaucaccaggaugccccagagccggcacuccuguaccgcaaccuuaagugugacuauguguucaauaacaauaucuuuagagaagagacacccuugaacuacuucgauucuuaccugggcugcgucguuaaugccgacaacuccacugaacaagcuguggaugccugugaccucaggauggggucaggacugugcgugaauuauaguaccgcacaccgggcgcgcacaagcguaucgacuggcuacaaguuaaccacguuugagccuuucacagucuccauugugaacgauucuguugaaagcgugggugggcuguaugagaugcagaucccaaccaauuuuacuauugcuucacaucaggaguucauacagacaagagcccccaaagucaccaucgacugugcagccuuugugugcggcgauuacacuaccugcaggcaacagcuuguugaauauggaaguuucugugacaacauuaaugcuaucuugggcgaggugaacaaccucaucgacacaaugcagcugcagguagccuccgcacuaauucaaggggucacgcugucuagccgucucgcugauggaauauccggccagaucgacgauauuaauuucucaccucugcuugguugcuuggggagccaguguagugaaggaaccauggccgcgcagggccggucuacuguggaggaccuguuauuugauaaggugaaacucuccgacgucgguuucguugaagccuacaacaauugcacaggcgggcaagaggugcgagaucugcuuuguguacagagcuuuaacggaaucaaggugcugccacccgucuugucggagaaucaggugucaggcuauaccgcuggggcaacagccucuaguauguucccgccuugguccgcugccgcaggaguuccauuuagccucucugugcaauacagaauuaacggccugggugucacuaugaaugugcuaagcgaaaaccagaaaaugaucgcguccgccuucaauaacgcuauaggggccauccaggagggauuugacgcaaccaauucagcucuggccaagauucagaguguugugaacgcaaaugccgaagcucucaacaaucugcuuaaccaauugagcaauagguucggcgcgaucucugccucccugcaggagauuuuaucacgccucgaucccccugaagcacaggcucagaucgaccggcugauaaacgguagacuuacggcccugaacgccuacgucaguaagcaacuaagcgauaugacacucauuaaaguauccgcugcacaggccaucgagaaggugaaugagugcguuaaaucucagucgcccaggauuaacuuuuguggcaaugggaaccacauccugagcuuggugcagaaugcgccauauggacuguacuucuuacauuuuucauaugucccuaccuccuucacuaccgcuaacgugagucccggccucugcauaucuggggaccgcggacuggccccaaaggcaggcuacuucguacaagaugacggugaauggaaauuuacagggagcaauuauuacuauccggagccuaucacugacaagaacuccguggucaugucaucuugugccguuaauuacaccaaggcucccgaaguguuccuuaacacaagcauuaguaaucugccagauuuuaaagaggaguuggacaagugguucaaaaaccagacguccguggcacccgaucucagccuggacuuugaaaagcuaaaugucaccuuccuggaucuuucugacgagaugaaccgaauccaggaagccauuaaaaagcucaaugagucauacaucaaccugaaagaaauaggaacuuaugagaugugaggacuagucccuguucccagagcccacuuuuuuuucuuuuuuugaaauaaaauagccugucuuucagaucucaaaggcucuuuucagagccaccaaaaaaaaaaaaaaaaaaaaaaaaaaaaaaaaaaaaaaaaaaaaaaaaaaaaaaaaaaaaaaaaaaaaaaaaaaaaaaaaaaaaaaaaaaaaaaaaaaaaa

SEQ ID NO: 15130 - RNA, 4247 nt, Artificial Sequence
  MHV/S__BAK18575.1 spike protein mRNA human (variant)
aggagagucccgcagucggcguccagcggcucugcuuguucgugugugugucguugcaggccuuauucaagcuuaccaugcugagcguguucauccucuuucuucccuccugccugggcuacauuggggacuucagauguauaaacuuggucaauaccgauacaucuaacgccucagcuccuaguguuagcacugaggugguagacguguccaagggaaucgguacguauuacgucuuagauaggguguaucugaaugcaacccuacuccugacaggcuacuauccaguugacgggucuaacuaccggaaucuugcccugacuggaaccaacacauugucgcucaauugguauaaaccgcccuuucugucagaauuuaacgauggcauuuuugcgaaggugaaaaaucugaaggcuagccucccuaaagacaguaccuccuacuucccaacuaucgucauugguucuaacuuugugacaaccagcuacacgguaguuuuagagcccuauaaugggaucauaauggccuccaucugccaguacacuauuugucugcuuccuuauaccgauugcaagccaaacacaggaggcaauaaguugaucggcuucuggcacauugaccugaaaucacccguguguauccuaaagcgcaacuuuacuuucaaugucaacgcagauuggcucuacuuucauuucuaucaacaagggggaaccuuuuacgccuauuacgcugacgcagguagugccacaaccuuccuguucagcucuuacauaggcgaugugcuuacgcaguauuuugugcugccuuucgucugcacuccaacaaccacugggguuuucuccccgcaguacugggugacacccuugguaaaacgacaauaucucuucaacuuuaaucagaagggaaccauuacgucagcuguggacugugccagcaguuacaccucugaaaucaaaugcaagacacaguccaugaacccuaauacuggcgucuaugaucugagcgguuacaccgugcagccaguuggguuaguguaucguagagucaggaaccugcccgacugucggauugaggacuggcucgcggcaaagacagugccuucgccacuuaauugggaacgcaaaacuuuccaaaacugcaauuuuaaccugucuuccuugcuaagacugguacaggccggaucacucaguuguagcaauaucgaugcugccaagguuuacggcaugugcuucggcuccaugucuaucgacaaauuugcaauucccaacagcaggcggguggaucugcagcuuggaaauucaggguuccugcagaguuuuaacuacaagauagacacccgcgcuacauccugccaauuguauuacagccucgcccagucuaaugucaccgugaacaaucacaacccgucaaguuggaaccgaagauaugguuucaaugaugucgcgacuuuuggcagggggaaacaugacguggccuacgcagaggcuuguuucacgguuggagccagcuauugcccuugugcuaaccccuccaucgugucuccaugcacaaccggcaagccuaaauucgccaauugucccacugguaccacaaaccgggagugcaauguacuggcauuagggucgaaccuguuuaagugugauugcaccuguaauccaagcccccuaacuacauacgaccuccguugccugcagggccgcuccaugcuuggagucggcgaucacugugaaggguugggagugcuggaggacaagugcgguggcucaaacacgugcaauuguagugccgaugcuuucguugggugggcgaaagacucuugccucagcaacggaagaugucauaucuuuuccaaucugaugcuuaacggcauuaauucagguaccacuugcagcacagaccugcaauugccuaacaccgaaguggucacagggauaugugugaaguaugaucucuacggcauuacuggacagggcguauucaaagaggugaaggcagacuacuauaauucuuggcagaaccuguuauacgauguuaacgggaaucugaacggauuuagggacaucgucaccaauaaaacguaucuaacccgguccugcuacaguggucgagugagcgccgcuuaucaccaggaugccccagagccggcacuccuguaccgcaaccuuaagugugacuauguguucaauaacaauaucuuuagagaagagacacccuugaacuacuucgauucuuaccugggcugcgucguuaaugccgacaacuccacugaacaagcuguggaugccugugaccucaggauggggucaggacugugcgugaauuauaguaccgcacaccgggcgcgcacaagcguaucgacuggcuacaaguuaaccacguuugagccuuucacagucuccauugugaacgauucuguugaaagcgugggugggcuguaugagaugcagaucccaaccaauuuuacuauugcuucacaucaggaguucauacagacaagagcccccaaagucaccaucgacugugcagccuuugugugcggcgauuacacuaccugcaggcaacagcuuguugaauauggaaguuucugugacaacauuaaugcuaucuugggcgaggugaacaaccucaucgacacaaugcagcugcagguagccuccgcacuaauucaaggggucacgcugucuagccgucucgcugauggaauauccggccagaucgacgauauuaauuucucaccucugcuugguugcuuggggagccaguguagugaaggaaccauggccgcgcagggccggucuacuguggaggaccuguuauuugauaaggugaaacucuccgacgucgguuucguugaagccuacaacaauugcacaggcgggcaagaggugcgagaucugcuuuguguacagagcuuuaacggaaucaaggugcugccacccgucuugucggagaaucaggugucaggcuauaccgcuggggcaacagccucuaguauguucccgccuugguccgcugccgcaggaguuccauuuagccucucugugcaauacagaauuaacggccugggugucacuaugaaugugcuaagcgaaaaccagaaaaugaucgcguccgccuucaauaacgcuauaggggccauccaggagggauuugacgcaaccaauucagcucuggccaagauucagaguguugugaacgcaaaugccgaagcucucaacaaucugcuuaaccaauugagcaauagguucggcgcgaucucugccucccugcaggagauuuuaucacgccucgaucccccugaagcacaggcucagaucgaccggcugauaaacgguagacuuacggcccugaacgccuacgucaguaagcaacuaagcgauaugacacucauuaaaguauccgcugcacaggccaucgagaaggugaaugagugcguuaaaucucagucgcccaggauuaacuuuuguggcaaugggaaccacauccugagcuuggugcagaaugcgccauauggacuguacuucuuacauuuuucauaugucccuaccuccuucacuaccgcuaacgugagucccggccucugcauaucuggggaccgcggacuggccccaaaggcaggcuacuucguacaagaugacggugaauggaaauuuacagggagcaauuauuacuauccggagccuaucacugacaagaacuccguggucaugucaucuugugccguuaauuacaccaaggcucccgaaguguuccuuaacacaagcauuaguaaucugccagauuuuaaagaggaguuggacaagugguucaaaaaccagacguccguggcacccgaucucagccuggacuuugaaaagcuaaaugucaccuuccuggaucuuucugacgagaugaaccgaauccaggaagccauuaaaaagcucaaugagucauacaucaaccugaaagaaauaggaacuuaugagaugggcgguuacauuccugaggcgccacgggauggccaggcuuaugugcguaaggacggggaauggguuuugcuguccacauuuugaggacuagucccuguucccagagcccacuuuuuuuucuuuuuuugaaauaaaauagccugucuuucagaucucaaaggcucuuuucagagccaccaaaaaaaaaaaaaaaaaaaaaaaaaaaaaaaaaaaaaaaaaaaaaaaaaaaaaaaaaaaaaaaaaaaaaaaaaaaaaaaaaaaaaaaaaaaaaaaaaaaaa

SEQ ID NO: 15131 - RNA, 3985 nt, Artificial Sequence
  SARS-CoV__P59594.1 spike protein mRNA gc (1-1255)
aggagaaagcuuaccauguucaucuuccugcuguuccugacccugaccagcggcuccgaccucgaccgcugcacgaccuucgacgacgugcaggcccccaacuacacccagcacaccagcuccaugcgcggggucuacuacccggacgagaucuuccggagcgacacgcuguaccugacccaggaccucuuccugcccuucuacuccaacgugaccggcuuccacaccaucaaccacacguucgggaaccccgugauccccuucaaggacggcaucuacuucgccgcgaccgagaaguccaacgucgugcggggguggguguucggcagcaccaugaacaacaagagccaguccgucaucaucaucaacaacagcaccaacguggugauccgcgccugcaacuucgagcugugcgacaacccguucuucgccgucuccaagcccaugggcacgcagacccacaccaugaucuucgacaacgccuucaacugcaccuucgaguacaucagcgacgccuucucccucgacgugagcgagaaguccgggaacuucaagcaccuccgggaguucguguucaagaacaaggacggcuuccuguacgucuacaagggguaccagcccaucgacguggugcgcgaccuccccagcggcuucaacacgcugaagccgaucuucaagcugccccucgggaucaacaucaccaacuuccgggcgauccugaccgccuucucccccgcccaggacaucuggggcaccagcgccgcggccuacuucgucggcuaccugaagcccacgaccuucaugcucaaguacgacgagaacgggaccaucaccgacgccguggacugcucccagaacccgcuggccgagcugaagugcagcgucaagagcuucgagaucgacaagggcaucuaccagacguccaacuuccgcguggugcccagcggggacgugguccgguuccccaacaucaccaaccucugccccuucggcgagguguucaacgccaccaaguucccguccguguacgcgugggagcgcaagaagaucagcaacugcgucgccgacuacuccgugcuguacaacagcaccuucuucuccacguucaagugcuacggcgucagcgccaccaagcugaacgaccucugcuucuccaacguguacgccgacagcuucguggucaagggggacgacgugcggcagaucgcccccggccagaccggggugaucgcggacuacaacuacaagcugcccgacgacuucaugggcugcguccuggccuggaacacccgcaacaucgacgccacguccaccgggaacuacaacuacaaguaccgguaccuccgccacggcaagcugcggcccuucgagcgcgacaucagcaacgugccguucucccccgacggcaagcccugcacgcccccggcccugaacugcuacuggccccucaacgacuacggguucuacaccaccaccggcaucggguaccagcccuaccggguggucgugcugagcuucgagcugcucaacgcccccgcgaccgugugcggcccgaagcuguccaccgaccugaucaagaaccagugcgucaacuucaacuucaacgggcucaccggcacgggcgugcugacccccagcuccaagcgcuuccagcccuuccagcaguucgggcgggacgugagcgacuucaccgacuccguccgcgacccgaagaccagcgagauccuggacaucagccccugcuccuucggcggggugagcgugaucacgcccggcaccaacgccuccagcgaggucgccgugcucuaccaggacgugaacugcaccgacgucuccaccgccauccacgccgaccagcugacgcccgcguggcggaucuacagcaccgggaacaacguguuccagacccaggccggcugccugaucggcgccgagcacguggacaccuccuacgagugcgacaucccgaucggggccggcaucugcgcgagcuaccacacggucucccuccugcgcagcaccucccagaaguccaucguggccuacaccaugagccugggggccgacagcuccaucgccuacagcaacaacaccaucgccauccccacgaacuucuccaucagcaucaccaccgaggugaugcccgucagcauggcgaagaccuccguggacugcaacauguacaucugcggcgacagcacggagugcgccaaccuccugcugcaguacggcuccuucugcacccagcugaaccgcgcccucagcgggaucgccgccgagcaggaccggaacacccgcgagguguucgcgcaggucaagcagauguacaagacccccacgcugaaguacuucggcggguucaacuucucccagauccugccggacccccucaagcccaccaagcggagcuucaucgaggaccugcuguucaacaaggugacccucgccgacgccggcuucaugaagcaguacggggagugccugggcgacaucaacgcccgcgaccugaucugcgcccagaaguucaacggccucaccgugcugcccccgcugcucacggacgacaugaucgcggccuacaccgccgcccuggucuccgggaccgcgaccgccggcuggacguucggggccggcgccgcccugcagauccccuucgcgaugcagauggccuaccgguucaacgggaucggcgugacccagaacgugcucuacgagaaccagaagcagaucgccaaccaguucaacaaggccaucagccagauccaggagucccugaccaccacgagcaccgcccugggcaagcuccaggacgucgugaaccagaacgcgcaggcccugaacacccuggugaagcagcucuccagcaacuucggggccaucuccagcguccugaacgacauccugucccgccucgacaagguggaggccgaggugcagaucgaccggcugaucaccggccgccugcagagccuccagaccuacgucacgcagcagcugauccgggccgcggagauccgcgccuccgccaaccuggccgcgaccaagaugagcgagugcgugcucgggcaguccaagcggguggacuucugcggcaagggguaccaccugaugagcuucccccaggccgcgccccacggcgucguguuccugcacgugaccuacgucccgagccaggagcgcaacuucaccacggcccccgccaucugccacgagggcaaggccuacuucccccgggaggggguguucguguucaacggcaccuccugguucaucacccagcgcaacuucuucagcccccagaucaucaccacggacaacaccuucgucuccgggaacugcgacguggucaucggcaucaucaacaacaccguguacgacccgcuccagcccgagcuggacagcuucaaggaggagcuggacaaguacuucaagaaccacaccucccccgacguggaccucggggacaucagcggcaucaacgccuccgucgugaacauccagaaggagaucgaccggcugaacgagguggccaagaaccugaacgagagccucaucgaccugcaggagcugggcaaguacgagcaguacaucaaguggcccugguacgucuggcucggguucaucgccggccugaucgccaucgugauggugacgauccugcucugcugcaugaccuccugcugcagcugccugaagggggcgugcuccugcggcagcugcugcaaguucgacgaggacgacuccgagccgguccugaagggcgugaagcuccacuacaccugaggacuaguuauaagacugacuagcccgaugggccucccaacgggcccuccuccccuccuugcaccgagauuaauaaaaaaaaaaaaaaaaaaaaaaaaaaaaaaaaaaaaaaaaaaaaaaaaaaaaaaaaaaaaaaaaugcaucccccccccccccccccccccccccccccccaaaggcucuuuucagagccaccagaauu

SEQ ID NO: 15132 - RNA, 3985 nt, Artificial Sequence
  SARS-CoV__P59594.1 spike protein mRNA gc (1-1255)(K968P_V969P)
aggagaaagcuuaccauguucaucuuccugcuguuccugacccugaccagcggcuccgaccucgaccgcugcacgaccuucgacgacgugcaggcccccaacuacacccagcacaccagcuccaugcgcggggucuacuacccggacgagaucuuccggagcgacacgcuguaccugacccaggaccucuuccugcccuucuacuccaacgugaccggcuuccacaccaucaaccacacguucgggaaccccgugauccccuucaaggacggcaucuacuucgccgcgaccgagaaguccaacgucgugcggggguggguguucggcagcaccaugaacaacaagagccaguccgucaucaucaucaacaacagcaccaacguggugauccgcgccugcaacuucgagcugugcgacaacccguucuucgccgucuccaagcccaugggcacgcagacccacaccaugaucuucgacaacgccuucaacugcaccuucgaguacaucagcgacgccuucucccucgacgugagcgagaaguccgggaacuucaagcaccuccgggaguucguguucaagaacaaggacggcuuccuguacgucuacaagggguaccagcccaucgacguggugcgcgaccuccccagcggcuucaacacgcugaagccgaucuucaagcugccccucgggaucaacaucaccaacuuccgggcgauccugaccgccuucucccccgcccaggacaucuggggcaccagcgccgcggccuacuucgucggcuaccugaagcccacgaccuucaugcucaaguacgacgagaacgggaccaucaccgacgccguggacugcucccagaacccgcuggccgagcugaagugcagcgucaagagcuucgagaucgacaagggcaucuaccagacguccaacuuccgcguggugcccagcggggacgugguccgguuccccaacaucaccaaccucugccccuucggcgagguguucaacgccaccaaguucccguccguguacgcgugggagcgcaagaagaucagcaacugcgucgccgacuacuccgugcuguacaacagcaccuucuucuccacguucaagugcuacggcgucagcgccaccaagcugaacgaccucugcuucuccaacguguacgccgacagcuucguggucaagggggacgacgugcggcagaucgcccccggccagaccggggugaucgcggacuacaacuacaagcugcccgacgacuucaugggcugcguccuggccuggaacacccgcaacaucgacgccacguccaccgggaacuacaacuacaaguaccgguaccuccgccacggcaagcugcggcccuucgagcgcgacaucagcaacgugccguucucccccgacggcaagcccugcacgcccccggcccugaacugcuacuggccccucaacgacuacggguucuacaccaccaccggcaucggguaccagcccuaccggguggucgugcugagcuucgagcugcucaacgcccccgcgaccgugugcggcccgaagcuguccaccgaccugaucaagaaccagugcgucaacuucaacuucaacgggcucaccggcacgggcgugcugacccccagcuccaagcgcuuccagcccuuccagcaguucgggcgggacgugagcgacuucaccgacuccguccgcgacccgaagaccagcgagauccuggacaucagccccugcuccuucggcggggugagcgugaucacgcccggcaccaacgccuccagcgaggucgccgugcucuaccaggacgugaacugcaccgacgucuccaccgccauccacgccgaccagcugacgcccgcguggcggaucuacagcaccgggaacaacguguuccagacccaggccggcugccugaucggcgccgagcacguggacaccuccuacgagugcgacaucccgaucggggccggcaucugcgcgagcuaccacacggucucccuccugcgcagcaccucccagaaguccaucguggccuacaccaugagccugggggccgacagcuccaucgccuacagcaacaacaccaucgccauccccacgaacuucuccaucagcaucaccaccgaggugaugcccgucagcauggcgaagaccuccguggacugcaacauguacaucugcggcgacagcacggagugcgccaaccuccugcugcaguacggcuccuucugcacccagcugaaccgcgcccucagcgggaucgccgccgagcaggaccggaacacccgcgagguguucgcgcaggucaagcagauguacaagacccccacgcugaaguacuucggcggguucaacuucucccagauccugccggacccccucaagcccaccaagcggagcuucaucgaggaccugcuguucaacaaggugacccucgccgacgccggcuucaugaagcaguacggggagugccugggcgacaucaacgcccgcgaccugaucugcgcccagaaguucaacggccucaccgugcugcccccgcugcucacggacgacaugaucgcggccuacaccgccgcccuggucuccgggaccgcgaccgccggcuggacguucggggccggcgccgcccugcagauccccuucgcgaugcagauggccuaccgguucaacgggaucggcgugacccagaacgugcucuacgagaaccagaagcagaucgccaaccaguucaacaaggccaucagccagauccaggagucccugaccaccacgagcaccgcccugggcaagcuccaggacgucgugaaccagaacgcgcaggcccugaacacccuggugaagcagcucuccagcaacuucggggccaucuccagcguccugaacgacauccugucccgccucgacccgcccgaggccgaggugcagaucgaccggcugaucaccggccgccugcagagccuccagaccuacgugacgcagcagcugauccgggccgcggagauccgcgccuccgccaaccuggccgcgaccaagaugagcgagugcguccucgggcaguccaagcggguggacuucugcggcaagggguaccaccugaugagcuucccccaggccgcgccccacggcguggucuuccugcacgugaccuacgugcccagccaggagcgcaacuucaccacggcccccgccaucugccacgagggcaaggccuacuucccgcgggagggggucuucguguucaacggcaccuccugguucaucacccagcgcaacuucuucagcccccagaucaucaccacggacaacaccuucguguccgggaacugcgacgucgugaucggcaucaucaacaacaccgucuacgacccccuccagcccgagcuggacagcuucaaggaggagcuggacaaguacuucaagaaccacaccuccccggacguggaccucggggacaucagcggcaucaacgccuccguggucaacauccagaaggagaucgaccggcugaacgagguggccaagaaccugaacgagagccucaucgaccugcaggagcugggcaaguacgagcaguacaucaaguggcccugguacguguggcucggguucaucgccggccugaucgccaucgucauggugacgauccugcucugcugcaugaccuccugcugcagcugccugaagggggcgugcuccugcggcagcugcugcaaguucgacgaggacgacuccgagcccgugcugaagggcgucaagcuccacuacaccugaggacuaguuauaagacugacuagcccgaugggccucccaacgggcccuccuccccuccuugcaccgagauuaauaaaaaaaaaaaaaaaaaaaaaaaaaaaaaaaaaaaaaaaaaaaaaaaaaaaaaaaaaaaaaaaaugcaucccccccccccccccccccccccccccccccaaaggcucuuuucagagccaccagaauu

SEQ ID NO: 15133 - RNA, 1798 nt, Artificial Sequence
  SARS-CoV__P59594.1 spike protein mRNA gc (1-17_747-1255)
aggagaaagcuuaccauguucaucuuccugcuguuccugacccugaccagcggcuccgaccucgaccgcgcccugagcgggaucgccgcggagcaggaccggaacacgcgcgagguguucgcccaggucaagcagauguacaagacccccacccugaaguacuucggcggguucaacuucucccagauccucccggacccccugaagcccaccaagcggagcuucaucgaggaccuccucuucaacaaggugacgcuggccgacgccggcuucaugaagcaguacggggagugccugggcgacaucaacgcccgcgaccucaucugcgcgcagaaguucaacggccugaccgugcugcccccgcuccugaccgacgacaugaucgccgccuacaccgccgcgcuggucuccgggacggccaccgccggcuggaccuucggggccggcgccgcgcuccagauccccuucgccaugcagauggccuaccgguucaacgggaucggcgugacccagaacgugcuguacgagaaccagaagcagaucgccaaccaguucaacaaggccaucagccagauccaggagucccugacgaccaccagcaccgcgcucggcaagcugcaggacgucgugaaccagaacgcccaggcccugaacacgcucgugaagcagcuguccagcaacuucggggccaucuccagcguccugaacgacauccucucccgccuggacaagguggaggccgaggugcagaucgaccggcugaucaccggccgccuccagagccugcagaccuacgucacccagcagcugauccgggcggccgagauccgcgccuccgccaaccucgccgcgacgaagaugagcgagugcgugcuggggcaguccaagcggguggacuucugcggcaagggcuaccaccugaugagcuucccccaggccgcgccccacggggucguguuccuccacgugaccuacgucccgucccaggagcgcaacuucaccaccgcccccgccaucugccacgagggcaaggccuacuucccccgggaggggguguucguguucaacggcacgagcugguucaucacccagcgcaacuucuucagcccccagaucaucaccaccgacaacacguucgucuccgggaacugcgacguggugaucggcaucaucaacaacaccgucuacgacccgcugcagcccgagcuggacagcuucaaggaggagcucgacaaguacuucaagaaccacaccucccccgacguggaccugggcgacaucagcgggaucaacgccuccgucgugaacauccagaaggagaucgaccggcugaacgagguggccaagaaccucaacgagagccugaucgaccugcaggagcucggcaaguacgagcaguacaucaaguggcccugguacgucuggcugggguucaucgccggccugaucgcgaucgugauggugaccauccugcucugcugcaugacguccugcugcagcugccugaagggggccugcuccugcggcagcugcugcaaguucgacgaggacgacuccgagccgguccugaagggcgugaagcuccacuacaccugaggacuaguuauaagacugacuagcccgaugggccucccaacgggcccuccuccccuccuugcaccgagauuaauaaaaaaaaaaaaaaaaaaaaaaaaaaaaaaaaaaaaaaaaaaaaaaaaaaaaaaaaaaaaaaaaugcaucccccccccccccccccccccccccccccccaaaggcucuuuucagagccaccagaauu

SEQ ID NO: 15134 - RNA, 3985 nt, Artificial Sequence
  SARS-CoV/Tor2__NP_828851.1 spike protein mRNA gc (1-1255)
aggagaaagcuuaccauguucaucuuccugcuguuccugacccugaccagcggcuccgaccucgaccgcugcacgaccuucgacgacgugcaggcccccaacuacacccagcacaccagcuccaugcgcggggucuacuacccggacgagaucuuccggagcgacacgcuguaccugacccaggaccucuuccugcccuucuacuccaacgugaccggcuuccacaccaucaaccacacguucgggaaccccgugauccccuucaaggacggcaucuacuucgccgcgaccgagaaguccaacgucgugcggggguggguguucggcuccaccaugaacaacaagagccaguccgucaucaucaucaacaacagcaccaacguggugauccgcgccugcaacuucgagcugugcgacaacccguucuucgccgucuccaagcccaugggcacgcagacccacaccaugaucuucgacaacgccuucaacugcaccuucgaguacaucagcgacgccuucucccucgacgugagcgagaaguccgggaacuucaagcaccuccgggaguucguguucaagaacaaggacggcuuccuguacgucuacaagggguaccagcccaucgacguggugcgcgaccuccccagcggcuucaacacgcugaagccgaucuucaagcugccccucgggaucaacaucaccaacuuccgggcgauccugaccgccuucucccccgcccaggacaucuggggcaccagcgccgcggccuacuucgucggcuaccugaagcccacgaccuucaugcucaaguacgacgagaacgggaccaucaccgacgccguggacugcucccagaacccgcuggccgagcugaagugcagcgucaagagcuucgagaucgacaagggcaucuaccagacguccaacuuccgcguggugcccagcggggacgugguccgguuccccaacaucaccaaccucugccccuucggcgagguguucaacgccaccaaguucccguccguguacgcgugggagcgcaagaagaucagcaacugcgucgccgacuacuccgugcuguacaacagcaccuucuucuccacguucaagugcuacggcgucagcgccaccaagcugaacgaccucugcuucuccaacguguacgccgacagcuucguggucaagggggacgacgugcggcagaucgcccccggccagaccggggugaucgcggacuacaacuacaagcugcccgacgacuucaugggcugcguccuggccuggaacacccgcaacaucgacgccacguccaccgggaacuacaacuacaaguaccgguaccuccgccacggcaagcugcggcccuucgagcgcgacaucagcaacgugccguucucccccgacggcaagcccugcacgcccccggcccugaacugcuacuggccccucaacgacuacggguucuacaccaccaccggcaucggguaccagcccuaccggguggucgugcugagcuucgagcugcucaacgcccccgcgaccgugugcggcccgaagcuguccaccgaccugaucaagaaccagugcgucaacuucaacuucaacgggcucaccggcacgggcgugcugacccccagcuccaagcgcuuccagcccuuccagcaguucgggcgggacgugagcgacuucaccgacuccguccgcgacccgaagaccagcgagauccuggacaucagccccugcgccuucggcgggguguccgugaucacgcccggcaccaacgccagcuccgaggucgccgugcucuaccaggacgugaacugcaccgacgucagcaccgccauccacgcggaccagcugacgcccgccuggcggaucuacuccaccgggaacaacguguuccagacccaggccggcugccugaucggcgccgagcacguggacaccagcuacgagugcgacaucccgaucggggcgggcaucugcgccuccuaccacacggucagccuccugcgcuccaccagccagaaguccaucguggccuacaccaugagccugggggccgacuccagcaucgccuacuccaacaacaccaucgcgauccccacgaacuucagcaucuccaucaccaccgaggugaugcccgucagcauggccaagaccagcguggacugcaacauguacaucugcggcgacuccacggagugcgccaaccuccugcugcaguacggcagcuucugcacccagcugaaccgcgcccucuccgggaucgccgcggagcaggaccggaacacccgcgagguguucgcccaggucaagcagauguacaagacccccacgcugaaguacuucggcggguucaacuucagccagauccugccggacccccucaagcccaccaagcgguccuucaucgaggaccugcuguucaacaaggugacccucgccgacgccggcuucaugaagcaguacggggagugccugggcgacaucaacgcccgcgaccugaucugcgcgcagaaguucaacggccucaccgugcugcccccgcugcucacggacgacaugaucgccgccuacaccgccgcgcuggucagcgggaccgccaccgccggcuggacguucggggccggcgccgcgcugcagauccccuucgccaugcagauggccuaccgguucaacgggaucggcgugacccagaacgugcucuacgagaaccagaagcagaucgccaaccaguucaacaaggccaucucccagauccaggagagccugaccaccacguccaccgcgcugggcaagcuccaggacgucgugaaccagaacgcccaggcccugaacacccuggugaagcagcucagcuccaacuucggggccaucagcuccguccugaacgacauccugagccgccucgacaagguggaggccgaggugcagaucgaccggcugaucaccggccgccugcagucccuccagaccuacgucacgcagcagcugauccgggcggccgagauccgcgccagcgccaaccuggcggccaccaagauguccgagugcgugcucgggcagagcaagcggguggacuucugcggcaagggguaccaccugauguccuucccccaggccgcgccccacggcgucguguuccugcacgugaccuacgucccgagccaggagcgcaacuucaccacggcccccgccaucugccacgagggcaaggccuacuucccccgggaggggguguucguguucaacggcaccagcugguucaucacccagcgcaacuucuucagcccccagaucaucaccacggacaacaccuucgucagcgggaacugcgacguggucaucggcaucaucaacaacaccguguacgacccgcuccagcccgagcuggacuccuucaaggaggagcuggacaaguacuucaagaaccacaccagccccgacguggaccucggggacaucuccggcaucaacgccagcgucgugaacauccagaaggagaucgaccggcugaacgagguggccaagaaccugaacgagucccucaucgaccugcaggagcugggcaaguacgagcaguacaucaaguggcccugguacgucuggcucggguucaucgccggccugaucgcgaucgugauggugacgauccugcucugcugcaugaccagcugcugcuccugccugaagggggccugcagcugcggcuccugcugcaaguucgacgaggacgacagcgagccgguccugaagggcgugaagcuccacuacaccugaggacuaguuauaagacugacuagcccgaugggccucccaacgggcccuccuccccuccuugcaccgagauuaauaaaaaaaaaaaaaaaaaaaaaaaaaaaaaaaaaaaaaaaaaaaaaaaaaaaaaaaaaaaaaaaaugcaucccccccccccccccccccccccccccccccaaaggcucuuuucagagccaccagaauu

SEQ ID NO: 15135 - RNA, 3985 nt, Artificial Sequence
  SARS-CoV/Tor2__NP_828851.1 spike protein mRNA gc (1-1255)(K968P_V969P)
aggagaaagcuuaccauguucaucuuccugcuguuccugacccugaccagcggcuccgaccucgaccgcugcacgaccuucgacgacgugcaggcccccaacuacacccagcacaccagcuccaugcgcggggucuacuacccggacgagaucuuccggagcgacacgcuguaccugacccaggaccucuuccugcccuucuacuccaacgugaccggcuuccacaccaucaaccacacguucgggaaccccgugauccccuucaaggacggcaucuacuucgccgcgaccgagaaguccaacgucgugcggggguggguguucggcuccaccaugaacaacaagagccaguccgucaucaucaucaacaacagcaccaacguggugauccgcgccugcaacuucgagcugugcgacaacccguucuucgccgucuccaagcccaugggcacgcagacccacaccaugaucuucgacaacgccuucaacugcaccuucgaguacaucagcgacgccuucucccucgacgugagcgagaaguccgggaacuucaagcaccuccgggaguucguguucaagaacaaggacggcuuccuguacgucuacaagggguaccagcccaucgacguggugcgcgaccuccccagcggcuucaacacgcugaagccgaucuucaagcugccccucgggaucaacaucaccaacuuccgggcgauccugaccgccuucucccccgcccaggacaucuggggcaccagcgccgcggccuacuucgucggcuaccugaagcccacgaccuucaugcucaaguacgacgagaacgggaccaucaccgacgccguggacugcucccagaacccgcuggccgagcugaagugcagcgucaagagcuucgagaucgacaagggcaucuaccagacguccaacuuccgcguggugcccagcggggacgugguccgguuccccaacaucaccaaccucugccccuucggcgagguguucaacgccaccaaguucccguccguguacgcgugggagcgcaagaagaucagcaacugcgucgccgacuacuccgugcuguacaacagcaccuucuucuccacguucaagugcuacggcgucagcgccaccaagcugaacgaccucugcuucuccaacguguacgccgacagcuucguggucaagggggacgacgugcggcagaucgcccccggccagaccggggugaucgcggacuacaacuacaagcugcccgacgacuucaugggcugcguccuggccuggaacacccgcaacaucgacgccacguccaccgggaacuacaacuacaaguaccgguaccuccgccacggcaagcugcggcccuucgagcgcgacaucagcaacgugccguucucccccgacggcaagcccugcacgcccccggcccugaacugcuacuggccccucaacgacuacggguucuacaccaccaccggcaucggguaccagcccuaccggguggucgugcugagcuucgagcugcucaacgcccccgcgaccgugugcggcccgaagcuguccaccgaccugaucaagaaccagugcgucaacuucaacuucaacgggcucaccggcacgggcgugcugacccccagcuccaagcgcuuccagcccuuccagcaguucgggcgggacgugagcgacuucaccgacuccguccgcgacccgaagaccagcgagauccuggacaucagccccugcgccuucggcgggguguccgugaucacgcccggcaccaacgccagcuccgaggucgccgugcucuaccaggacgugaacugcaccgacgucagcaccgccauccacgcggaccagcugacgcccgccuggcggaucuacuccaccgggaacaacguguuccagacccaggccggcugccugaucggcgccgagcacguggacaccagcuacgagugcgacaucccgaucggggcgggcaucugcgccuccuaccacacggucagccuccugcgcuccaccagccagaaguccaucguggccuacaccaugagccugggggccgacuccagcaucgccuacuccaacaacaccaucgcgauccccacgaacuucagcaucuccaucaccaccgaggugaugcccgucagcauggccaagaccagcguggacugcaacauguacaucugcggcgacuccacggagugcgccaaccuccugcugcaguacggcagcuucugcacccagcugaaccgcgcccucuccgggaucgccgcggagcaggaccggaacacccgcgagguguucgcccaggucaagcagauguacaagacccccacgcugaaguacuucggcggguucaacuucagccagauccugccggacccccucaagcccaccaagcgguccuucaucgaggaccugcuguucaacaaggugacccucgccgacgccggcuucaugaagcaguacggggagugccugggcgacaucaacgcccgcgaccugaucugcgcgcagaaguucaacggccucaccgugcugcccccgcugcucacggacgacaugaucgccgccuacaccgccgcgcuggucagcgggaccgccaccgccggcuggacguucggggccggcgccgcgcugcagauccccuucgccaugcagauggccuaccgguucaacgggaucggcgugacccagaacgugcucuacgagaaccagaagcagaucgccaaccaguucaacaaggccaucucccagauccaggagagccugaccaccacguccaccgcgcugggcaagcuccaggacgucgugaaccagaacgcccaggcccugaacacccuggugaagcagcucagcuccaacuucggggccaucagcuccguccugaacgacauccugagccgccucgacccgcccgaggccgaggugcagaucgaccggcugaucaccggccgccugcagucccuccagaccuacgugacgcagcagcugauccgggcggccgagauccgcgccagcgccaaccuggcggccaccaagauguccgagugcguccucgggcagagcaagcggguggacuucugcggcaagggguaccaccugauguccuucccccaggccgcgccccacggcguggucuuccugcacgugaccuacgugcccagccaggagcgcaacuucaccacggcccccgccaucugccacgagggcaaggccuacuucccgcgggagggggucuucguguucaacggcaccagcugguucaucacccagcgcaacuucuucagcccccagaucaucaccacggacaacaccuucgugagcgggaacugcgacgucgugaucggcaucaucaacaacaccgucuacgacccccuccagcccgagcuggacuccuucaaggaggagcuggacaaguacuucaagaaccacaccagcccggacguggaccucggggacaucuccggcaucaacgccagcguggucaacauccagaaggagaucgaccggcugaacgagguggccaagaaccugaacgagucccucaucgaccugcaggagcugggcaaguacgagcaguacaucaaguggcccugguacguguggcucggguucaucgccggccugaucgcgaucgucauggugacgauccugcucugcugcaugaccagcugcugcuccugccugaagggggccugcagcugcggcuccugcugcaaguucgacgaggacgacagcgagcccgugcugaagggcgucaagcuccacuacaccugaggacuaguuauaagacugacuagcccgaugggccucccaacgggcccuccuccccuccuugcaccgagauuaauaaaaaaaaaaaaaaaaaaaaaaaaaaaaaaaaaaaaaaaaaaaaaaaaaaaaaaaaaaaaaaaaugcaucccccccccccccccccccccccccccccccaaaggcucuuuucagagccaccagaauu

SEQ ID NO: 15136 - RNA, 3790 nt, Artificial Sequence
  SARS-CoV/Tor2__NP_828851.1 spike protein mRNA gc (variant)
aggagaaagcuuaccauguucaucuuccugcuguuccugacccugaccagcggcuccgaccucgaccgcugcacgaccuucgacgacgugcaggcccccaacuacacccagcacaccagcuccaugcgcggggucuacuacccggacgagaucuuccggagcgacacgcuguaccugacccaggaccucuuccugcccuucuacuccaacgugaccggcuuccacaccaucaaccacacguucgggaaccccgugauccccuucaaggacggcaucuacuucgccgcgaccgagaaguccaacgucgugcggggguggguguucggcuccaccaugaacaacaagagccaguccgucaucaucaucaacaacagcaccaacguggugauccgcgccugcaacuucgagcugugcgacaacccguucuucgccgucuccaagcccaugggcacgcagacccacaccaugaucuucgacaacgccuucaacugcaccuucgaguacaucagcgacgccuucucccucgacgugagcgagaaguccgggaacuucaagcaccuccgggaguucguguucaagaacaaggacggcuuccuguacgucuacaagggguaccagcccaucgacguggugcgcgaccuccccagcggcuucaacacgcugaagccgaucuucaagcugccccucgggaucaacaucaccaacuuccgggcgauccugaccgccuucucccccgcccaggacaucuggggcaccagcgccgcggccuacuucgucggcuaccugaagcccacgaccuucaugcucaaguacgacgagaacgggaccaucaccgacgccguggacugcucccagaacccgcuggccgagcugaagugcagcgucaagagcuucgagaucgacaagggcaucuaccagacguccaacuuccgcguggugcccagcggggacgugguccgguuccccaacaucaccaaccucugccccuucggcgagguguucaacgccaccaaguucccguccguguacgcgugggagcgcaagaagaucagcaacugcgucgccgacuacuccgugcuguacaacagcaccuucuucuccacguucaagugcuacggcgucagcgccaccaagcugaacgaccucugcuucuccaacguguacgccgacagcuucguggucaagggggacgacgugcggcagaucgcccccggccagaccggggugaucgcggacuacaacuacaagcugcccgacgacuucaugggcugcguccuggccuggaacacccgcaacaucgacgccacguccaccgggaacuacaacuacaaguaccgguaccuccgccacggcaagcugcggcccuucgagcgcgacaucagcaacgugccguucucccccgacggcaagcccugcacgcccccggcccugaacugcuacuggccccucaacgacuacggguucuacaccaccaccggcaucggguaccagcccuaccggguggucgugcugagcuucgagcugcucaacgcccccgcgaccgugugcggcccgaagcuguccaccgaccugaucaagaaccagugcgucaacuucaacuucaacgggcucaccggcacgggcgugcugacccccagcuccaagcgcuuccagcccuuccagcaguucgggcgggacgugagcgacuucaccgacuccguccgcgacccgaagaccagcgagauccuggacaucagccccugcgccuucggcgggguguccgugaucacgcccggcaccaacgccagcuccgaggucgccgugcucuaccaggacgugaacugcaccgacgucagcaccgccauccacgcggaccagcugacgcccgccuggcggaucuacuccaccgggaacaacguguuccagacccaggccggcugccugaucggcgccgagcacguggacaccagcuacgagugcgacaucccgaucggggcgggcaucugcgccuccuaccacacggucagccuccugcgcuccaccagccagaaguccaucguggccuacaccaugagccugggggccgacuccagcaucgccuacuccaacaacaccaucgcgauccccacgaacuucagcaucuccaucaccaccgaggugaugcccgucagcauggccaagaccagcguggacugcaacauguacaucugcggcgacuccacggagugcgccaaccuccugcugcaguacggcagcuucugcacccagcugaaccgcgcccucuccgggaucgccgcggagcaggaccggaacacccgcgagguguucgcccaggucaagcagauguacaagacccccacgcugaaguacuucggcggguucaacuucagccagauccugccggacccccucaagcccaccaagcgguccuucaucgaggaccugcuguucaacaaggugacccucgccgacgccggcuucaugaagcaguacggggagugccugggcgacaucaacgcccgcgaccugaucugcgcgcagaaguucaacggccucaccgugcugcccccgcugcucacggacgacaugaucgccgccuacaccgccgcgcuggucagcgggaccgccaccgccggcuggacguucggggccggcgccgcgcugcagauccccuucgccaugcagauggccuaccgguucaacgggaucggcgugacccagaacgugcucuacgagaaccagaagcagaucgccaaccaguucaacaaggccaucucccagauccaggagagccugaccaccacguccaccgcgcugggcaagcuccaggacgucgugaaccagaacgcccaggcccugaacacccuggugaagcagcucagcuccaacuucggggccaucagcuccguccugaacgacauccugagccgccucgacccgcccgaggccgaggugcagaucgaccggcugaucaccggccgccugcagucccuccagaccuacgugacgcagcagcugauccgggcggccgagauccgcgccagcgccaaccuggcggccaccaagauguccgagugcguccucgggcagagcaagcggguggacuucugcggcaagggguaccaccugauguccuucccccaggccgcgccccacggcguggucuuccugcacgugaccuacgugcccagccaggagcgcaacuucaccacggcccccgccaucugccacgagggcaaggccuacuucccgcgggagggggucuucguguucaacggcaccagcugguucaucacccagcgcaacuucuucagcccccagaucaucaccacggacaacaccuucgugagcgggaacugcgacgucgugaucggcaucaucaacaacaccgucuacgacccccuccagcccgagcuggacuccuucaaggaggagcuggacaaguacuucaagaaccacaccagcccggacguggaccucggggacaucuccggcaucaacgccagcguggucaacauccagaaggagaucgaccggcugaacgagguggccaagaaccugaacgagucccucaucgaccugcaggagcugggcaaguacgagcagugaggacuaguuauaagacugacuagcccgaugggccucccaacgggcccuccuccccuccuugcaccgagauuaauaaaaaaaaaaaaaaaaaaaaaaaaaaaaaaaaaaaaaaaaaaaaaaaaaaaaaaaaaaaaaaaaugcaucccccccccccccccccccccccccccccccaaaggcucuuuucagagccaccagaauu

SEQ ID NO: 15137 - RNA, 3871 nt, Artificial Sequence
  SARS-CoV/Tor2__NP_828851.1 spike protein mRNA gc (variant)
aggagaaagcuuaccauguucaucuuccugcuguuccugacccugaccagcggcuccgaccucgaccgcugcacgaccuucgacgacgugcaggcccccaacuacacccagcacaccagcuccaugcgcggggucuacuacccggacgagaucuuccggagcgacacgcuguaccugacccaggaccucuuccugcccuucuacuccaacgugaccggcuuccacaccaucaaccacacguucgggaaccccgugauccccuucaaggacggcaucuacuucgccgcgaccgagaaguccaacgucgugcggggguggguguucggcuccaccaugaacaacaagagccaguccgucaucaucaucaacaacagcaccaacguggugauccgcgccugcaacuucgagcugugcgacaacccguucuucgccgucuccaagcccaugggcacgcagacccacaccaugaucuucgacaacgccuucaacugcaccuucgaguacaucagcgacgccuucucccucgacgugagcgagaaguccgggaacuucaagcaccuccgggaguucguguucaagaacaaggacggcuuccuguacgucuacaagggguaccagcccaucgacguggugcgcgaccuccccagcggcuucaacacgcugaagccgaucuucaagcugccccucgggaucaacaucaccaacuuccgggcgauccugaccgccuucucccccgcccaggacaucuggggcaccagcgccgcggccuacuucgucggcuaccugaagcccacgaccuucaugcucaaguacgacgagaacgggaccaucaccgacgccguggacugcucccagaacccgcuggccgagcugaagugcagcgucaagagcuucgagaucgacaagggcaucuaccagacguccaacuuccgcguggugcccagcggggacgugguccgguuccccaacaucaccaaccucugccccuucggcgagguguucaacgccaccaaguucccguccguguacgcgugggagcgcaagaagaucagcaacugcgucgccgacuacuccgugcuguacaacagcaccuucuucuccacguucaagugcuacggcgucagcgccaccaagcugaacgaccucugcuucuccaacguguacgccgacagcuucguggucaagggggacgacgugcggcagaucgcccccggccagaccggggugaucgcggacuacaacuacaagcugcccgacgacuucaugggcugcguccuggccuggaacacccgcaacaucgacgccacguccaccgggaacuacaacuacaaguaccgguaccuccgccacggcaagcugcggcccuucgagcgcgacaucagcaacgugccguucucccccgacggcaagcccugcacgcccccggcccugaacugcuacuggccccucaacgacuacggguucuacaccaccaccggcaucggguaccagcccuaccggguggucgugcugagcuucgagcugcucaacgcccccgcgaccgugugcggcccgaagcuguccaccgaccugaucaagaaccagugcgucaacuucaacuucaacgggcucaccggcacgggcgugcugacccccagcuccaagcgcuuccagcccuuccagcaguucgggcgggacgugagcgacuucaccgacuccguccgcgacccgaagaccagcgagauccuggacaucagccccugcgccuucggcgggguguccgugaucacgcccggcaccaacgccagcuccgaggucgccgugcucuaccaggacgugaacugcaccgacgucagcaccgccauccacgcggaccagcugacgcccgccuggcggaucuacuccaccgggaacaacguguuccagacccaggccggcugccugaucggcgccgagcacguggacaccagcuacgagugcgacaucccgaucggggcgggcaucugcgccuccuaccacacggucagccuccugcgcuccaccagccagaaguccaucguggccuacaccaugagccugggggccgacuccagcaucgccuacuccaacaacaccaucgcgauccccacgaacuucagcaucuccaucaccaccgaggugaugcccgucagcauggccaagaccagcguggacugcaacauguacaucugcggcgacuccacggagugcgccaaccuccugcugcaguacggcagcuucugcacccagcugaaccgcgcccucuccgggaucgccgcggagcaggaccggaacacccgcgagguguucgcccaggucaagcagauguacaagacccccacgcugaaguacuucggcggguucaacuucagccagauccugccggacccccucaagcccaccaagcgguccuucaucgaggaccugcuguucaacaaggugacccucgccgacgccggcuucaugaagcaguacggggagugccugggcgacaucaacgcccgcgaccugaucugcgcgcagaaguucaacggccucaccgugcugcccccgcugcucacggacgacaugaucgccgccuacaccgccgcgcuggucagcgggaccgccaccgccggcuggacguucggggccggcgccgcgcugcagauccccuucgccaugcagauggccuaccgguucaacgggaucggcgugacccagaacgugcucuacgagaaccagaagcagaucgccaaccaguucaacaaggccaucucccagauccaggagagccugaccaccacguccaccgcgcugggcaagcuccaggacgucgugaaccagaacgcccaggcccugaacacccuggugaagcagcucagcuccaacuucggggccaucagcuccguccugaacgacauccugagccgccucgacccgcccgaggccgaggugcagaucgaccggcugaucaccggccgccugcagucccuccagaccuacgugacgcagcagcugauccgggcggccgagauccgcgccagcgccaaccuggcggccaccaagauguccgagugcguccucgggcagagcaagcggguggacuucugcggcaagggguaccaccugauguccuucccccaggccgcgccccacggcguggucuuccugcacgugaccuacgugcccagccaggagcgcaacuucaccacggcccccgccaucugccacgagggcaaggccuacuucccgcgggagggggucuucguguucaacggcaccagcugguucaucacccagcgcaacuucuucagcccccagaucaucaccacggacaacaccuucgugagcgggaacugcgacgucgugaucggcaucaucaacaacaccgucuacgacccccuccagcccgagcuggacuccuucaaggaggagcuggacaaguacuucaagaaccacaccagcccggacguggaccucggggacaucuccggcaucaacgccagcguggucaacauccagaaggagaucgaccggcugaacgagguggccaagaaccugaacgagucccucaucgaccugcaggagcugggcaaguacgagcagggcggguacauccccgaggcgccccgcgacgggcaggccuacgugcggaaggacggcgaguggguccuccugagcacguucugaggacuaguuauaagacugacuagcccgaugggccucccaacgggcccuccuccccuccuugcaccgagauuaauaaaaaaaaaaaaaaaaaaaaaaaaaaaaaaaaaaaaaaaaaaaaaaaaaaaaaaaaaaaaaaaaugcaucccccccccccccccccccccccccccccccaaaggcucuuuucagagccaccagaauu

SEQ ID NO: 15138 - RNA, 4279 nt, Artificial Sequence
  HCoV/OC43__P36334.1 spike protein mRNA gc (1-1353)
aggagaaagcuuaccauguuccugauccuccugaucagccugcccaccgccuucgccgugaucggcgaccucaagugcaccuccgacaacaucaacgacaaggacacggggccgccgcccaucagcaccgacaccgucgacgugaccaacggccuggggacguacuacgugcuggaccgcgucuaccucaacaccacccuguuccugaacggcuacuaccccaccuccgggagcacguaccggaacauggcgcucaagggcuccgugcugcugagccgccucugguucaagccgcccuuccuguccgacuucaucaacggcaucuucgccaaggugaagaacaccaaggucaucaaggaccgggugauguacagcgaguuccccgccaucaccaucggguccaccuucgugaacacgagcuacuccgucguggugcagccccgcaccaucaacagcacccaggacggcgacaacaagcugcaggggcuccuggaggucuccgugugccaguacaacaugugcgaguacccccagaccaucugccaccccaaccugggcaaccaccggaaggagcucuggcaccuggacacggggguggucagcugccuguacaagcgcaacuucaccuacgacgugaacgccgacuaccucuacuuccacuucuaccaggagggcggcaccuucuacgccuacuucaccgacacggggguggucaccaaguuccuguucaacguguaccugggcauggcgcucucccacuacuacgugaugccccugaccugcaacagcaagcugacccucgaguacugggucacgccccugaccucccggcaguaccugcucgccuucaaccaggacgggaucaucuucaacgccgaggacugcaugagcgacuucauguccgagaucaagugcaagacccagagcaucgccccgcccaccggcguguacgagcugaacggcuacacggugcagcccaucgcggacgucuaccgccggaagcccaaccugccgaacugcaacaucgaggccuggcucaacgacaagagcgugcccagcccccugaacugggagcgcaagaccuucuccaacugcaacuucaacauguccagccugauguccuucauccaggccgacagcuucacgugcaacaacaucgacgccgccaagaucuacgggaugugcuucuccagcaucaccaucgacaaguucgcgauccccaacggccggaaggucgaccuccagcuggggaaccugggcuaccuccaguccuucaacuaccgcaucgacaccaccgccaccagcugccagcuguacuacaaccugccggccgccaacguguccgugagccgguucaaccccuccaccuggaacaagcgcuucggguucaucgaggacagcgucuucaagccccggcccgccggcgugcucacgaaccacgacguggucuacgcgcagcacugcuucaaggccccgaagaacuucugccccugcaagcugaacggcuccugcguggggagcggccccgggaagaacaacggcaucgggaccugccccgccggcaccaacuaccugaccugcgacaaccucugcaccccggaccccaucacguucaccggcaccuacaagugcccccagaccaagucccugguggggaucggcgagcacugcagcgggcuggccgucaaguccgacuacugcggcgggaacagcugcacgugccgcccgcaggccuuccugggcuggagcgcggacuccugccuccagggcgacaagugcaacaucuucgccaacuucauccugcacgacgugaacagcgggcugaccugcuccaccgaccuccagaaggccaacaccgacaucauccugggcgugugcgucaacuacgaccuguacgggauccucggccagggcaucuucguggaggugaacgccacguacuacaacagcuggcagaaccugcuguacgacuccaacgggaaccucuacggcuuccgggacuacaucaucaaccgcaccuucaugauccggagcugcuacuccgggcgcgucagcgccgcguuccacgccaacuccagcgagcccgcccugcuguuccggaacaucaagugcaacuacguguucaacaacucccucacccgccagcugcagcccaucaacuacuucgacagcuaccugggcugcguggucaacgccuacaacuccaccgcgaucagcgugcagacgugcgaccucaccgugggguccggcuacugcgucgacuacagcaagaaccgccggucccgcggcgccaucaccaccggguaccgguucacgaacuucgagcccuucaccgugaacagcgugaacgacagccuggagccggucggcgggcuguacgagauccagauccccuccgaguucaccaucggcaacaugguggaguucauccagaccagcucccccaaggugacgaucgacugcgccgccuucgucugcggggacuacgccgcgugcaagagccagcucguggaguacggcuccuucugcgacaacaucaacgccauccugaccgaggugaacgagcugcucgacaccacccagcugcaggucgccaacagccugaugaacggcgugacgcucuccaccaagcugaaggacggggugaacuucaacgucgacgacaucaacuucagccccgugcugggcugccucggguccgagugcagcaaggccuccagccgcuccgccaucgaggaccugcuguucgacaaggugaagcucagcgacgucggcuucguggaggcguacaacaacugcaccgggggcgccgagauccgggaccugaucugcgugcaguccuacaagggcaucaagguccugccgccccuccugagcgagaaccagaucuccggguacacccuggccgccacgagcgccucccucuucccgcccuggaccgcggccgccggcgugcccuucuaccugaacgugcaguaccgcaucaacgggcugggcgucaccauggacgugcucagccagaaccagaagcugaucgccaacgcguucaacaacgcccuguacgccauccaggagggguucgacgccaccaacagcgcccucgugaagauccaggcggucgugaacgccaacgccgaggcccugaacaaccugcuccagcagcuguccaaccgguucggcgccaucagcgcgucccugcaggagauccucagccgccuggacgcccuggaggccgaggcccagaucgaccggcucaucaacggccgccugacggcccugaacgcguacgugucccagcagcucagcgacuccacccuggucaaguucagcgccgcccaggccauggagaaggugaacgagugcgugaagucccagagcucccggaucaacuucugcgggaacggcaaccacaucaucagccugguccagaacgcgcccuacgggcucuacuucauccacuucuccuacgugcccaccaaguacgucaccgcccgcgugagccccggccugugcaucgccggcgaccgggggaucgccccgaaguccggcuacuucgugaacgucaacaacacguggauguacaccgggagcggcuacuacuaccccgagcccaucaccgagaacaacgugguggucauguccacgugcgccgugaacuacaccaaggcgcccuacgugaugcugaacaccagcaucccgaaccuccccgacuucaaggaggagcuggaccagugguucaagaaccagaccuccgucgcccccgaccugagccucgacuacaucaacgugaccuuccuggaccuccagguggagaugaaccgccugcaggaggccaucaagguccugaaccagagcuacaucaaccugaaggacaucgggaccuacgaguacuacgugaaguggcccugguacguguggcuccugaucugccuggccggcgucgccaugcucgugcugcuguucuucaucugcugcugcacgggcugcgggaccuccugcuucaagaagugcggcgggugcugcgacgacuacaccggcuaccaggagcucgugaucaagaccagccacgacgacugaggacuaguuauaagacugacuagcccgaugggccucccaacgggcccuccuccccuccuugcaccgagauuaauaaaaaaaaaaaaaaaaaaaaaaaaaaaaaaaaaaaaaaaaaaaaaaaaaaaaaaaaaaaaaaaaugcaucccccccccccccccccccccccccccccccaaaggcucuuuucagagccaccagaauu

SEQ ID NO: 15139 - RNA, 4279 nt, Artificial Sequence
  HCoV/OC43__P36334.1 spike protein mRNA gc (1-1353)(A1070P_L1071P)
aggagaaagcuuaccauguuccugauccuccugaucagccugcccaccgccuucgccgugaucggcgaccucaagugcaccuccgacaacaucaacgacaaggacacggggccgccgcccaucagcaccgacaccgucgacgugaccaacggccuggggacguacuacgugcuggaccgcgucuaccucaacaccacccuguuccugaacggcuacuaccccaccuccgggagcacguaccggaacauggcgcucaagggcuccgugcugcugagccgccucugguucaagccgcccuuccuguccgacuucaucaacggcaucuucgccaaggugaagaacaccaaggucaucaaggaccgggugauguacagcgaguuccccgccaucaccaucggguccaccuucgugaacacgagcuacuccgucguggugcagccccgcaccaucaacagcacccaggacggcgacaacaagcugcaggggcuccuggaggucuccgugugccaguacaacaugugcgaguacccccagaccaucugccaccccaaccugggcaaccaccggaaggagcucuggcaccuggacacggggguggucagcugccuguacaagcgcaacuucaccuacgacgugaacgccgacuaccucuacuuccacuucuaccaggagggcggcaccuucuacgccuacuucaccgacacggggguggucaccaaguuccuguucaacguguaccugggcauggcgcucucccacuacuacgugaugccccugaccugcaacagcaagcugacccucgaguacugggucacgccccugaccucccggcaguaccugcucgccuucaaccaggacgggaucaucuucaacgccgaggacugcaugagcgacuucauguccgagaucaagugcaagacccagagcaucgccccgcccaccggcguguacgagcugaacggcuacacggugcagcccaucgcggacgucuaccgccggaagcccaaccugccgaacugcaacaucgaggccuggcucaacgacaagagcgugcccagcccccugaacugggagcgcaagaccuucuccaacugcaacuucaacauguccagccugauguccuucauccaggccgacagcuucacgugcaacaacaucgacgccgccaagaucuacgggaugugcuucuccagcaucaccaucgacaaguucgcgauccccaacggccggaaggucgaccuccagcuggggaaccugggcuaccuccaguccuucaacuaccgcaucgacaccaccgccaccagcugccagcuguacuacaaccugccggccgccaacguguccgugagccgguucaaccccuccaccuggaacaagcgcuucggguucaucgaggacagcgucuucaagccccggcccgccggcgugcucacgaaccacgacguggucuacgcgcagcacugcuucaaggccccgaagaacuucugccccugcaagcugaacggcuccugcguggggagcggccccgggaagaacaacggcaucgggaccugccccgccggcaccaacuaccugaccugcgacaaccucugcaccccggaccccaucacguucaccggcaccuacaagugcccccagaccaagucccugguggggaucggcgagcacugcagcgggcuggccgucaaguccgacuacugcggcgggaacagcugcacgugccgcccgcaggccuuccugggcuggagcgcggacuccugccuccagggcgacaagugcaacaucuucgccaacuucauccugcacgacgugaacagcgggcugaccugcuccaccgaccuccagaaggccaacaccgacaucauccugggcgugugcgucaacuacgaccuguacgggauccucggccagggcaucuucguggaggugaacgccacguacuacaacagcuggcagaaccugcuguacgacuccaacgggaaccucuacggcuuccgggacuacaucaucaaccgcaccuucaugauccggagcugcuacuccgggcgcgucagcgccgcguuccacgccaacuccagcgagcccgcccugcuguuccggaacaucaagugcaacuacguguucaacaacucccucacccgccagcugcagcccaucaacuacuucgacagcuaccugggcugcguggucaacgccuacaacuccaccgcgaucagcgugcagacgugcgaccucaccgugggguccggcuacugcgucgacuacagcaagaaccgccggucccgcggcgccaucaccaccggguaccgguucacgaacuucgagcccuucaccgugaacagcgugaacgacagccuggagccggucggcgggcuguacgagauccagauccccuccgaguucaccaucggcaacaugguggaguucauccagaccagcucccccaaggugacgaucgacugcgccgccuucgucugcggggacuacgccgcgugcaagagccagcucguggaguacggcuccuucugcgacaacaucaacgccauccugaccgaggugaacgagcugcucgacaccacccagcugcaggucgccaacagccugaugaacggcgugacgcucuccaccaagcugaaggacggggugaacuucaacgucgacgacaucaacuucagccccgugcugggcugccucggguccgagugcagcaaggccuccagccgcuccgccaucgaggaccugcuguucgacaaggugaagcucagcgacgucggcuucguggaggcguacaacaacugcaccgggggcgccgagauccgggaccugaucugcgugcaguccuacaagggcaucaagguccugccgccccuccugagcgagaaccagaucuccggguacacccuggccgccacgagcgccucccucuucccgcccuggaccgcggccgccggcgugcccuucuaccugaacgugcaguaccgcaucaacgggcugggcgucaccauggacgugcucagccagaaccagaagcugaucgccaacgcguucaacaacgcccuguacgccauccaggagggguucgacgccaccaacagcgcccucgugaagauccaggcggucgugaacgccaacgccgaggcccugaacaaccugcuccagcagcuguccaaccgguucggcgccaucagcgcgucccugcaggagauccucagccgccuggacccgcccgaggccgaggcccagaucgaccggcugaucaacggccgccucacggcccugaacgccuacgugucccagcagcugagcgacuccacccucgucaaguucagcgcggcccaggccauggagaaggugaacgagugcgugaagucccagagcucccggaucaacuucugcgggaacggcaaccacaucaucagccugguccagaacgcccccuacgggcuguacuucauccacuucuccuacgugcccaccaaguacgucaccgcgcgcgugagccccggccucugcaucgccggcgaccgggggaucgcccccaaguccggcuacuucgugaacgucaacaacacguggauguacaccgggagcggcuacuacuaccccgagccgaucaccgagaacaacgugguggucauguccacgugcgccgugaacuacaccaaggcccccuacgugaugcugaacaccagcauccccaaccugcccgacuucaaggaggagcucgaccagugguucaagaaccagaccuccgucgcgccggaccugagccuggacuacaucaacgugaccuuccucgaccuccagguggagaugaaccgccugcaggaggccaucaagguccugaaccagagcuacaucaaccugaaggacaucgggaccuacgaguacuacgugaaguggcccugguacguguggcugcucaucugccuggccggcgucgccaugcuggugcuccuguucuucaucugcugcugcacgggcugcgggaccuccugcuucaagaagugcggcgggugcugcgacgacuacaccggcuaccaggagcuggugaucaagaccagccacgacgacugaggacuaguuauaagacugacuagcccgaugggccucccaacgggcccuccuccccuccuugcaccgagauuaauaaaaaaaaaaaaaaaaaaaaaaaaaaaaaaaaaaaaaaaaaaaaaaaaaaaaaaaaaaaaaaaaugcaucccccccccccccccccccccccccccccccaaaggcucuuuucagagccaccagaauu

SEQ ID NO: 15140 - RNA, 4306 nt, Artificial Sequence
  HCoV/OC43/1783A_10__AIL49484.1 spike protein mRNA gc (1-1362)
aggagaaagcuuaccauguuccugauccuccugaucagccugcccaccgccuucgccgugaucggcgaccucaagugcccgcuggacucccgcaccgggagccugaacaacaucgacacgggcccgcccuccaucagcaccgcgaccgucgacgugaccaacgggcucggcacguacuacgugcuggaccgggucuaccugaacaccacccucuuccugaacggguacuaccccaccuccggcagcacguaccgcaacauggcccugaagggcaccgacaagcucuccacccugugguucaagccgcccuuccugagcgacuucaucaacgggaucuucgccaaggugaagaacaccaagguguucaaggacggcgucauguacuccgaguuccccgccaucacgaucgggagcaccuucgugaacaccuccuacagcguggucgugcagccccggaccaucaacuccacgcaggacggcgugaacaagcuccaggggcugcuggaggucagcgugugccaguacaacaugugcgaguacccccacaccaucugccaccccaagcucggcaaccacuucaaggagcuguggcacauggacaccggcguggucuccugccuguacaagcgcaacuucaccuacgacgugaacgccacguaccucuacuuccacuucuaccaggagggcggcaccuucuacgcguacuucaccgacaccgggguggucacgaaguuccuguucaacguguaccugggcauggcccucagccacuacuacgugaugccccugaccugcaucucccggcgcgacaucggcuucacccuggaguacugggucacgccccucaccagccggcaguaccugcuggccuucaaccaggacgggaucaucuucaacgccguggacugcauguccgacuucaugagcgagaucaagugcaagacccagagcaucgcgccgcccaccggcguguacgagcucaacggguacaccguccagcccaucgccgacguguaccgccggaagcccgaccugccgaacugcaacaucgaggccuggcugaacgacaaguccguccccagcccccucaacugggagcgcaagacguucuccaacugcaacuucaacaugagcucccugaugagcuucauccaggccgacuccuucacgugcaacaacaucgacgccgcgaagaucuacggcaugugcuucagcuccaucaccaucgacaaguucgccauccccaacgggcggaagguggaccugcagcucggcaaccugggcuaccugcagagcuucaacuaccgcaucgacaccaccgccaccuccugccagcucuacuacaaccugccggccgccaacgugagcgucucccgguucaaccccagcaccuggaacaagcgcuucggguucaucgagaacuccguguucaagccccagcccgcgggcgugcugaccaaccacgacgucguguacgcccagcacugcuucaaggccccgaagaacuucugccccugcaagcucaacagcucccugugcguggggagcggccccgggaagaacaacggcaucgggaccugccccgccgggacgaacuaccugaccugccacaaccucugcaacccggaccccaucaccuucaccggccccuacaagugcccgcagacgaagucccuggucgggaucggcgagcacugcagcgggcuggccgucaagagcgacuacugcggcggcaaccccugcacgugccagccccaggcguuccuggggugguccgccgacagcugccuccagggcgacaagugcaacaucuucgccaaccugauccugcacgacgugaacuccgggcugaccugcagcaccgaccugcagaaggccaacaccgacaucaagcugggcgugugcgugaacuacgaccucuacggcaucuccgggcagggcaucuucguggaggucaacgccaccuacuacaacagcuggcagaaccugcuguacgacuccaacgggaaccucuacggcuuccgggacuacaucaccaaccgcaccuucaugauccggagcugcuacuccgggcgcgugagcgcggccuuccacgccaacuccagcgagcccgcccugcuguuccggaacaucaagugcaacuacguguucaacaacucccucauccgccagcugcagccgaucaacuacuucgacagcuaccugggcugcgucgugaacgcguacaacuccacggccaucagcgugcagaccugcgaccucaccgucggcuccggguacugcguggacuacagcaagaaccggcgcagccgccgggccaucaccacgggcuaccgcuucaccaacuucgagcccuucaccgugaacuccgucaacgacagccuggagcccgucgggggccuguacgagauccagauccccuccgaguucaccaucgggaacauggaggaguucauccagacgagcuccccgaaggugaccaucgacugcgccgccuucgugugcggcgacuacgcggccugcaagagccagcucguggaguacggcuccuucugcgacaacaucaacgccauccugaccgaggugaacgagcugcucgacaccacgcagcugcaggucgccaacagccugaugaacggggugacccucuccaccaagcugaaggacggcgugaacuucaacgucgacgacaucaacuucagcuccgugcuggggugccucggcagcgagugcuccaaggccagcucccggagcgcgaucgaggaccugcuguucgacaaggugaagcucuccgacgucggguucguggccgccuacaacaacugcaccggcggcgccgagauccgcgaccugaucugcgugcagagcuacaaggggaucaagguccugccgccccuccuguccgagaaccagaucagcggcuacacgcuggccgcgaccagcgccucccucuucccgcccuggaccgccgccgcgggggugcccuucuaccugaacgugcaguaccggaucaacggccugggggucaccauggacgugcucagccagaaccagaagcugaucgccaacgccuucaacaacgcccuggacgccauccaggagggcuucgacgcgacgaacuccgcccucgugaagauccaggccgucgugaacgccaacgccgaggcgcugaacaaccugcuccagcagcugagcaaccgcuucggcgccaucuccagcucccugcaggagauccucagccggcuggacgcccuggaggccgaggcccagaucgaccgccucaucaacgggcggcugaccgcgcugaacgccuacgugucccagcagcucagcgacuccacccuggucaaguucagcgccgcccaggcgauggagaaggugaacgagugcgugaagucccagagcucccgcaucaacuucugcggcaacgggaaccacaucaucagccugguccagaacgcccccuacggccucuacuucauccacuucuccuacgugcccaccaaguacgucacggccaaggugagccccggccugugcaucgccggggaccggggcaucgcccccaaguccggguacuucgugaacgucaacaacaccuggauguacaccggcagcggguacuacuaccccgagcccaucaccgagaacaacgugguggucaugagcacgugcgcggugaacuacaccaaggccccguacgugaugcugaacaccuccacccccaaccuccccgacuuccgcgaggagcuggaccagugguucaagaaccagaccagcgucgcccccgaccugucccucgacuacaucaacgugacguuccuggaccuccagguggagaugaaccggcuccaggaggccaucaagguccugaaccagagcuacaucaaccugaaggacaucggcaccuacgaguacuacgugaaguggccgugguacguguggcuccugaucggccuggccggggucgcgaugcucgugcugcuguucuucaucugcugcugcaccggcugcgggaccuccugcuucaagaagugcggcgggugcugcgacgacuacacgggcuaccaggagcucgugaucaagaccagccacgacgacugaggacuaguuauaagacugacuagcccgaugggccucccaacgggcccuccuccccuccuugcaccgagauuaauaaaaaaaaaaaaaaaaaaaaaaaaaaaaaaaaaaaaaaaaaaaaaaaaaaaaaaaaaaaaaaaaugcaucccccccccccccccccccccccccccccccaaaggcucuuuucagagccaccagaauu

SEQ ID NO: 15141 - RNA, 4306 nt, Artificial Sequence
  HCoV/OC43/1783A_10__AIL49484.1 spike protein mRNA gc (1-1362)(A1079P_L1080P)
aggagaaagcuuaccauguuccugauccuccugaucagccugcccaccgccuucgccgugaucggcgaccucaagugcccgcuggacucccgcaccgggagccugaacaacaucgacacgggcccgcccuccaucagcaccgcgaccgucgacgugaccaacgggcucggcacguacuacgugcuggaccgggucuaccugaacaccacccucuuccugaacggguacuaccccaccuccggcagcacguaccgcaacauggcccugaagggcaccgacaagcucuccacccugugguucaagccgcccuuccugagcgacuucaucaacgggaucuucgccaaggugaagaacaccaagguguucaaggacggcgucauguacuccgaguuccccgccaucacgaucgggagcaccuucgugaacaccuccuacagcguggucgugcagccccggaccaucaacuccacgcaggacggcgugaacaagcuccaggggcugcuggaggucagcgugugccaguacaacaugugcgaguacccccacaccaucugccaccccaagcucggcaaccacuucaaggagcuguggcacauggacaccggcguggucuccugccuguacaagcgcaacuucaccuacgacgugaacgccacguaccucuacuuccacuucuaccaggagggcggcaccuucuacgcguacuucaccgacaccgggguggucacgaaguuccuguucaacguguaccugggcauggcccucagccacuacuacgugaugccccugaccugcaucucccggcgcgacaucggcuucacccuggaguacugggucacgccccucaccagccggcaguaccugcuggccuucaaccaggacgggaucaucuucaacgccguggacugcauguccgacuucaugagcgagaucaagugcaagacccagagcaucgcgccgcccaccggcguguacgagcucaacggguacaccguccagcccaucgccgacguguaccgccggaagcccgaccugccgaacugcaacaucgaggccuggcugaacgacaaguccguccccagcccccucaacugggagcgcaagacguucuccaacugcaacuucaacaugagcucccugaugagcuucauccaggccgacuccuucacgugcaacaacaucgacgccgcgaagaucuacggcaugugcuucagcuccaucaccaucgacaaguucgccauccccaacgggcggaagguggaccugcagcucggcaaccugggcuaccugcagagcuucaacuaccgcaucgacaccaccgccaccuccugccagcucuacuacaaccugccggccgccaacgugagcgucucccgguucaaccccagcaccuggaacaagcgcuucggguucaucgagaacuccguguucaagccccagcccgcgggcgugcugaccaaccacgacgucguguacgcccagcacugcuucaaggccccgaagaacuucugccccugcaagcucaacagcucccugugcguggggagcggccccgggaagaacaacggcaucgggaccugccccgccgggacgaacuaccugaccugccacaaccucugcaacccggaccccaucaccuucaccggccccuacaagugcccgcagacgaagucccuggucgggaucggcgagcacugcagcgggcuggccgucaagagcgacuacugcggcggcaaccccugcacgugccagccccaggcguuccuggggugguccgccgacagcugccuccagggcgacaagugcaacaucuucgccaaccugauccugcacgacgugaacuccgggcugaccugcagcaccgaccugcagaaggccaacaccgacaucaagcugggcgugugcgugaacuacgaccucuacggcaucuccgggcagggcaucuucguggaggucaacgccaccuacuacaacagcuggcagaaccugcuguacgacuccaacgggaaccucuacggcuuccgggacuacaucaccaaccgcaccuucaugauccggagcugcuacuccgggcgcgugagcgcggccuuccacgccaacuccagcgagcccgcccugcuguuccggaacaucaagugcaacuacguguucaacaacucccucauccgccagcugcagccgaucaacuacuucgacagcuaccugggcugcgucgugaacgcguacaacuccacggccaucagcgugcagaccugcgaccucaccgucggcuccggguacugcguggacuacagcaagaaccggcgcagccgccgggccaucaccacgggcuaccgcuucaccaacuucgagcccuucaccgugaacuccgucaacgacagccuggagcccgucgggggccuguacgagauccagauccccuccgaguucaccaucgggaacauggaggaguucauccagacgagcuccccgaaggugaccaucgacugcgccgccuucgugugcggcgacuacgcggccugcaagagccagcucguggaguacggcuccuucugcgacaacaucaacgccauccugaccgaggugaacgagcugcucgacaccacgcagcugcaggucgccaacagccugaugaacggggugacccucuccaccaagcugaaggacggcgugaacuucaacgucgacgacaucaacuucagcuccgugcuggggugccucggcagcgagugcuccaaggccagcucccggagcgcgaucgaggaccugcuguucgacaaggugaagcucuccgacgucggguucguggccgccuacaacaacugcaccggcggcgccgagauccgcgaccugaucugcgugcagagcuacaaggggaucaagguccugccgccccuccuguccgagaaccagaucagcggcuacacgcuggccgcgaccagcgccucccucuucccgcccuggaccgccgccgcgggggugcccuucuaccugaacgugcaguaccggaucaacggccugggggucaccauggacgugcucagccagaaccagaagcugaucgccaacgccuucaacaacgcccuggacgccauccaggagggcuucgacgcgacgaacuccgcccucgugaagauccaggccgucgugaacgccaacgccgaggcgcugaacaaccugcuccagcagcugagcaaccgcuucggcgccaucuccagcucccugcaggagauccucagccggcuggacccgcccgaggccgaggcccagaucgaccgccugaucaacgggcggcucaccgcccugaacgcguacgugucccagcagcugagcgacuccacccucgucaaguucagcgccgcccaggccauggagaaggugaacgagugcgugaagucccagagcucccgcaucaacuucugcggcaacgggaaccacaucaucagccugguccagaacgcgcccuacggccuguacuucauccacuucuccuacgugcccaccaaguacgucacggccaaggugagccccggccucugcaucgccggggaccggggcaucgcccccaaguccggguacuucgugaacgucaacaacaccuggauguacaccggcagcggguacuacuaccccgagcccaucaccgagaacaacgugguggucauguccacgugcgccgugaacuacaccaaggcgcccuacgugaugcugaacaccagcacccccaaccugccggacuuccgcgaggagcucgaccagugguucaagaaccagaccagcgucgcccccgaccugucccuggacuacaucaacgugacguuccucgaccuccagguggagaugaaccggcugcaggaggccaucaagguccucaaccagagcuacaucaaccugaaggacaucggcaccuacgaguacuacgugaaguggcccugguacguguggcugcucaucggccuggccggggucgccaugcuggugcuccuguucuucaucugcugcugcaccggcugcgggaccuccugcuucaagaagugcggcgggugcugcgacgacuacacgggcuaccaggagcuggugaucaagaccagccacgacgacugaggacuaguuauaagacugacuagcccgaugggccucccaacgggcccuccuccccuccuugcaccgagauuaauaaaaaaaaaaaaaaaaaaaaaaaaaaaaaaaaaaaaaaaaaaaaaaaaaaaaaaaaaaaaaaaaugcaucccccccccccccccccccccccccccccccaaaggcucuuuucagagccaccagaauu

SEQ ID NO: 15142 - RNA, 4081 nt, Artificial Sequence
  HCoV/OC43/1783A_10__AIL49484.1 spike protein mRNA gc (variant)
aggagaaagcuuaccauguuccugauccuccugaucagccugcccaccgccuucgccgugaucggcgaccucaagugcccgcuggacucccgcaccgggagccugaacaacaucgacacgggcccgcccuccaucagcaccgcgaccgucgacgugaccaacgggcucggcacguacuacgugcuggaccgggucuaccugaacaccacccucuuccugaacggguacuaccccaccuccggcagcacguaccgcaacauggcccugaagggcaccgacaagcucuccacccugugguucaagccgcccuuccugagcgacuucaucaacgggaucuucgccaaggugaagaacaccaagguguucaaggacggcgucauguacuccgaguuccccgccaucacgaucgggagcaccuucgugaacaccuccuacagcguggucgugcagccccggaccaucaacuccacgcaggacggcgugaacaagcuccaggggcugcuggaggucagcgugugccaguacaacaugugcgaguacccccacaccaucugccaccccaagcucggcaaccacuucaaggagcuguggcacauggacaccggcguggucuccugccuguacaagcgcaacuucaccuacgacgugaacgccacguaccucuacuuccacuucuaccaggagggcggcaccuucuacgcguacuucaccgacaccgggguggucacgaaguuccuguucaacguguaccugggcauggcccucagccacuacuacgugaugccccugaccugcaucucccggcgcgacaucggcuucacccuggaguacugggucacgccccucaccagccggcaguaccugcuggccuucaaccaggacgggaucaucuucaacgccguggacugcauguccgacuucaugagcgagaucaagugcaagacccagagcaucgcgccgcccaccggcguguacgagcucaacggguacaccguccagcccaucgccgacguguaccgccggaagcccgaccugccgaacugcaacaucgaggccuggcugaacgacaaguccguccccagcccccucaacugggagcgcaagacguucuccaacugcaacuucaacaugagcucccugaugagcuucauccaggccgacuccuucacgugcaacaacaucgacgccgcgaagaucuacggcaugugcuucagcuccaucaccaucgacaaguucgccauccccaacgggcggaagguggaccugcagcucggcaaccugggcuaccugcagagcuucaacuaccgcaucgacaccaccgccaccuccugccagcucuacuacaaccugccggccgccaacgugagcgucucccgguucaaccccagcaccuggaacaagcgcuucggguucaucgagaacuccguguucaagccccagcccgcgggcgugcugaccaaccacgacgucguguacgcccagcacugcuucaaggccccgaagaacuucugccccugcaagcucaacagcucccugugcguggggagcggccccgggaagaacaacggcaucgggaccugccccgccgggacgaacuaccugaccugccacaaccucugcaacccggaccccaucaccuucaccggccccuacaagugcccgcagacgaagucccuggucgggaucggcgagcacugcagcgggcuggccgucaagagcgacuacugcggcggcaaccccugcacgugccagccccaggcguuccuggggugguccgccgacagcugccuccagggcgacaagugcaacaucuucgccaaccugauccugcacgacgugaacuccgggcugaccugcagcaccgaccugcagaaggccaacaccgacaucaagcugggcgugugcgugaacuacgaccucuacggcaucuccgggcagggcaucuucguggaggucaacgccaccuacuacaacagcuggcagaaccugcuguacgacuccaacgggaaccucuacggcuuccgggacuacaucaccaaccgcaccuucaugauccggagcugcuacuccgggcgcgugagcgcggccuuccacgccaacuccagcgagcccgcccugcuguuccggaacaucaagugcaacuacguguucaacaacucccucauccgccagcugcagccgaucaacuacuucgacagcuaccugggcugcgucgugaacgcguacaacuccacggccaucagcgugcagaccugcgaccucaccgucggcuccggguacugcguggacuacagcaagaacggcgggagcggcuccgccaucaccacgggguaccgguucaccaacuucgagcccuucaccgugaacagcgucaacgacucccuggagcccgugggcggccuguacgagauccagauccccagcgaguucaccaucgggaacauggaggaguucauccagacguccagcccgaaggugaccaucgacugcgccgccuucgucugcggcgacuacgcggccugcaagucccagcucguggaguacgggagcuucugcgacaacaucaacgccauccugaccgaggugaacgagcugcucgacaccacgcagcugcaggucgccaacucccugaugaacggcgugacccucagcaccaagcugaaggacggggugaacuucaacgucgacgacaucaacuucuccagcgugcugggcugccucggcuccgagugcagcaaggccuccagccgcuccgcgaucgaggaccugcuguucgacaaggugaagcucagcgacgucggguucguggccgccuacaacaacugcaccggcggggccgagauccgcgaccugaucugcgugcaguccuacaagggcaucaagguccugccgccccuccugagcgagaaccagaucagcggguacacgcuggccgcgaccuccgccagccucuucccgcccuggaccgccgccgcgggcgugcccuucuaccugaacgugcaguaccggaucaacggccugggggucaccauggacgugcucucccagaaccagaagcugaucgccaacgccuucaacaacgcccuggacgccauccaggagggcuucgacgcgacgaacagcgcccucgugaagauccaggccgucgugaacgccaacgccgaggcgcugaacaaccugcuccagcagcuguccaaccgcuucggggccaucagcuccagccugcaggagauccucucccggcuggacccgcccgaggccgaggcccagaucgaccgccugaucaacggccggcucaccgcccugaacgcguacgugagccagcagcuguccgacagcacccucgucaaguucuccgccgcccaggccauggagaaggugaacgagugcgucaagagccaguccagccgcaucaacuucugcggcaacgggaaccacaucaucucccuggugcagaacgcgcccuacggccuguacuucauccacuucagcuacgugcccaccaaguacgucacggccaaggugucccccgggcucugcaucgccggcgaccgggggaucgcccccaagagcggcuacuucgugaacgucaacaacaccuggauguacaccggcagcggguacuacuaccccgagcccaucaccgagaacaacgugguggucaugagcacgugcgccgugaacuacaccaaggcgcccuacgugaugcugaacaccuccacccccaaccugccggacuuccgcgaggagcucgaccagugguucaagaaccagaccuccgucgcccccgaccugagccuggacuacaucaacgugacguuccucgaccuccagguggagaugaaccggcugcaggaggccaucaagguccucaacugaggacuaguuauaagacugacuagcccgaugggccucccaacgggcccuccuccccuccuugcaccgagauuaauaaaaaaaaaaaaaaaaaaaaaaaaaaaaaaaaaaaaaaaaaaaaaaaaaaaaaaaaaaaaaaaaugcaucccccccccccccccccccccccccccccccaaaggcucuuuucagagccaccagaauu

SEQ ID NO: 15143 - RNA, 4162 nt, Artificial Sequence
  HCoV/OC43/1783A_10__AIL49484.1 spike protein mRNA gc (variant)
aggagaaagcuuaccauguuccugauccuccugaucagccugcccaccgccuucgccgugaucggcgaccucaagugcccgcuggacucccgcaccgggagccugaacaacaucgacacgggcccgcccuccaucagcaccgcgaccgucgacgugaccaacgggcucggcacguacuacgugcuggaccgggucuaccugaacaccacccucuuccugaacggguacuaccccaccuccggcagcacguaccgcaacauggcccugaagggcaccgacaagcucuccacccugugguucaagccgcccuuccugagcgacuucaucaacgggaucuucgccaaggugaagaacaccaagguguucaaggacggcgucauguacuccgaguuccccgccaucacgaucgggagcaccuucgugaacaccuccuacagcguggucgugcagccccggaccaucaacuccacgcaggacggcgugaacaagcuccaggggcugcuggaggucagcgugugccaguacaacaugugcgaguacccccacaccaucugccaccccaagcucggcaaccacuucaaggagcuguggcacauggacaccggcguggucuccugccuguacaagcgcaacuucaccuacgacgugaacgccacguaccucuacuuccacuucuaccaggagggcggcaccuucuacgcguacuucaccgacaccgggguggucacgaaguuccuguucaacguguaccugggcauggcccucagccacuacuacgugaugccccugaccugcaucucccggcgcgacaucggcuucacccuggaguacugggucacgccccucaccagccggcaguaccugcuggccuucaaccaggacgggaucaucuucaacgccguggacugcauguccgacuucaugagcgagaucaagugcaagacccagagcaucgcgccgcccaccggcguguacgagcucaacggguacaccguccagcccaucgccgacguguaccgccggaagcccgaccugccgaacugcaacaucgaggccuggcugaacgacaaguccguccccagcccccucaacugggagcgcaagacguucuccaacugcaacuucaacaugagcucccugaugagcuucauccaggccgacuccuucacgugcaacaacaucgacgccgcgaagaucuacggcaugugcuucagcuccaucaccaucgacaaguucgccauccccaacgggcggaagguggaccugcagcucggcaaccugggcuaccugcagagcuucaacuaccgcaucgacaccaccgccaccuccugccagcucuacuacaaccugccggccgccaacgugagcgucucccgguucaaccccagcaccuggaacaagcgcuucggguucaucgagaacuccguguucaagccccagcccgcgggcgugcugaccaaccacgacgucguguacgcccagcacugcuucaaggccccgaagaacuucugccccugcaagcucaacagcucccugugcguggggagcggccccgggaagaacaacggcaucgggaccugccccgccgggacgaacuaccugaccugccacaaccucugcaacccggaccccaucaccuucaccggccccuacaagugcccgcagacgaagucccuggucgggaucggcgagcacugcagcgggcuggccgucaagagcgacuacugcggcggcaaccccugcacgugccagccccaggcguuccuggggugguccgccgacagcugccuccagggcgacaagugcaacaucuucgccaaccugauccugcacgacgugaacuccgggcugaccugcagcaccgaccugcagaaggccaacaccgacaucaagcugggcgugugcgugaacuacgaccucuacggcaucuccgggcagggcaucuucguggaggucaacgccaccuacuacaacagcuggcagaaccugcuguacgacuccaacgggaaccucuacggcuuccgggacuacaucaccaaccgcaccuucaugauccggagcugcuacuccgggcgcgugagcgcggccuuccacgccaacuccagcgagcccgcccugcuguuccggaacaucaagugcaacuacguguucaacaacucccucauccgccagcugcagccgaucaacuacuucgacagcuaccugggcugcgucgugaacgcguacaacuccacggccaucagcgugcagaccugcgaccucaccgucggcuccggguacugcguggacuacagcaagaacggcgggagcggcuccgccaucaccacgggguaccgguucaccaacuucgagcccuucaccgugaacagcgucaacgacucccuggagcccgugggcggccuguacgagauccagauccccagcgaguucaccaucgggaacauggaggaguucauccagacguccagcccgaaggugaccaucgacugcgccgccuucgucugcggcgacuacgcggccugcaagucccagcucguggaguacgggagcuucugcgacaacaucaacgccauccugaccgaggugaacgagcugcucgacaccacgcagcugcaggucgccaacucccugaugaacggcgugacccucagcaccaagcugaaggacggggugaacuucaacgucgacgacaucaacuucuccagcgugcugggcugccucggcuccgagugcagcaaggccuccagccgcuccgcgaucgaggaccugcuguucgacaaggugaagcucagcgacgucggguucguggccgccuacaacaacugcaccggcggggccgagauccgcgaccugaucugcgugcaguccuacaagggcaucaagguccugccgccccuccugagcgagaaccagaucagcggguacacgcuggccgcgaccuccgccagccucuucccgcccuggaccgccgccgcgggcgugcccuucuaccugaacgugcaguaccggaucaacggccugggggucaccauggacgugcucucccagaaccagaagcugaucgccaacgccuucaacaacgcccuggacgccauccaggagggcuucgacgcgacgaacagcgcccucgugaagauccaggccgucgugaacgccaacgccgaggcgcugaacaaccugcuccagcagcuguccaaccgcuucggggccaucagcuccagccugcaggagauccucucccggcuggacccgcccgaggccgaggcccagaucgaccgccugaucaacggccggcucaccgcccugaacgcguacgugagccagcagcuguccgacagcacccucgucaaguucuccgccgcccaggccauggagaaggugaacgagugcgucaagagccaguccagccgcaucaacuucugcggcaacgggaaccacaucaucucccuggugcagaacgcgcccuacggccuguacuucauccacuucagcuacgugcccaccaaguacgucacggccaaggugucccccgggcucugcaucgccggcgaccgggggaucgcccccaagagcggcuacuucgugaacgucaacaacaccuggauguacaccggcagcggguacuacuaccccgagcccaucaccgagaacaacgugguggucaugagcacgugcgccgugaacuacaccaaggcgcccuacgugaugcugaacaccuccacccccaaccugccggacuuccgcgaggagcucgaccagugguucaagaaccagaccuccgucgcccccgaccugagccuggacuacaucaacgugacguuccucgaccuccagguggagaugaaccggcugcaggaggccaucaagguccucaacggcggguacauccccgaggccccgcgcgacggccaggccuacgugcggaaggacggggagugggugcugcuguccaccuucugaggacuaguuauaagacugacuagcccgaugggccucccaacgggcccuccuccccuccuugcaccgagauuaauaaaaaaaaaaaaaaaaaaaaaaaaaaaaaaaaaaaaaaaaaaaaaaaaaaaaaaaaaaaaaaaaugcaucccccccccccccccccccccccccccccccaaaggcucuuuucagagccaccagaauu

SEQ ID NO: 15144 - RNA, 4273 nt, Artificial Sequence
  HCoV/HKU1/N5__Q0ZME7.1 spike protein mRNA gc (1-1351)
aggagaaagcuuaccauguuccugaucaucuucauccuccccaccacccuggccgugaucggcgacuucaacugcacgaacagcuucaucaacgacuacaacaagaccaucccgcgcaucuccgaggacgucguggacgugagccuggggcucggcaccuacuacguccugaaccggguguaccugaacaccacgcuccuguucaccggguacuuccccaaguccggcgccaacuuccgcgaccuggcgcucaaggggagcaucuaccuguccacccugugguacaagccgcccuuccucagcgacuucaacaacggcaucuucuccaaggugaagaacaccaagcuguacgucaacaacacgcuguacagcgaguucuccaccaucgugaucggcagcguguucgucaacaccuccuacaccaucguggugcagccccacaacgggauccucgagaucacggccugccaguacaccaugugcgaguacccccacaccgucugcaagagcaagggcuccauccggaacgagagcuggcacaucgacuccagcgagccccugugccuguucaagaagaacuucaccuacaacguguccgccgacuggcucuacuuccacuucuaccaggagcgcgggguguucuacgccuacuacgccgacgucggcaugcccacgaccuuccuguucagccuguaccucgggaccauccugucccacuacuacgugaugccgcugaccugcaacgcgaucagcagcaacacggacaacgagacccucgaguacugggugacgccccugucccggcgccaguaccugcucaacuucgacgagcacggcgucaucaccaacgccguggacugcagcuccagcuuccuguccgagauccagugcaagacccagagcuucgcccccaacaccggcguguacgaccuguccggguucaccgucaagcccguggccaccguguaccggcgcaucccgaaccuccccgacugcgacaucgacaacuggcugaacaacgucagcgugcccagcccccugaacugggagcggcgcaucuucuccaacugcaacuucaaccucuccacgcugcugcggcucguccacguggacagcuucuccugcaacaaccuggacaagagcaagaucuucggcuccugcuucaacagcaucaccguggacaaguucgcgaucccgaaccgccggcgcgacgaccugcagcucggguccagcggcuuccugcaguccagcaacuacaagaucgacaucagcuccagcuccugccagcuguacuacagccucccccuggucaacgugaccaucaacaacuucaaccccuccagcuggaaccggcgcuacggcuucggguccuucaaccugagcuccuacgacguggucuacagcgaccacugcuucuccgugaacagcgacuucugccccugcgccgacccguccguggucaacagcugcgccaaguccaagccgcccagcgccaucugccccgccggcaccaaguaccggcacugcgaccucgacacgacccuguacgugaagaacuggugccgcugcuccugccugcccgaccccaucagcaccuacagccccaacacgugcccccagaagaagguggucguggggaucggcgagcacugcccggggcugggcaucaacgaggagaagugcggcacccagcucaaccacuccagcugcuucugcucccccgacgcguuccugggguggagcuucgacuccugcaucagcaacaaccggugcaacaucuucuccaacuucaucuucaacggcaucaacagcgggacgaccugcuccaacgaccugcucuacagcaacaccgagaucuccaccggcgugugcgucaacuacgaccuguacgggaucaccggccagggcaucuucaaggaggugagcgccgccuacuacaacaacuggcagaaccugcucuacgacuccaacgggaacaucaucggcuucaaggacuuccugaccaacaagaccuacaccauccugcccugcuacagcgggcgcguguccgccgccuucuaccagaacagcuccagcccggcgcuccuguaccggaaccugaagugcuccuacguccucaacaacaucagcuucaucagccagcccuucuacuucgacuccuaccugggcugcgugcugaacgccgugaaccucacgagcuacuccgucagcuccugcgaccugcgcauggggagcggcuucugcaucgacuacgcccugcccuccagccgccggaagcgccggggcaucuccagccccuaccgcuucgugaccuucgagccguucaacguguccuucgucaacgacagcguggagaccgucgggggccucuucgagauccagauccccaccaacuucacgaucgccgggcacgaggaguucauccagaccuccagccccaaggugaccaucgacugcuccgccuucgugugcagcaacuacgcggccugccacgaccugcuguccgaguacggcaccuucugcgacaacaucaacagcauccucaacgaggugaacgaccugcuggacaucacgcagcuccaggucgccaacgcccugaugcagggcgugacccuguccagcaaccucaacaccaaccugcacagcgacguggacaacaucgacuucaagucccugcucgggugccugggcagccagugcggguccagcucccggagccugcucgaggaccugcuguucaacaaggucaagcucuccgacgugggcuucguggaggccuacaacaacugcaccgggggcagcgagauccgcgaccugcugugcguccaguccuucaacggcaucaaggugcugcccccgauccucagcgagacgcagaucuccggguacaccaccgcggccaccguggccgccauguucccgcccuggagcgcggccgccggcguccccuucucccugaacgugcaguaccggaucaacgggcucggcgugacgauggacguccugaacaagaaccagaagcugaucgccaacgccuucaacaaggcgcuccugagcauccagaacggguucaccgccaccaacuccgcccuggccaagauccagagcguggugaacgccaacgcgcaggcccucaacucccugcugcagcagcuguucaacaaguucggcgccaucagcuccagccuccaggagauccugagccgccucgacaaccuggaggcccagguccagaucgaccggcugaucaacggccgccucaccgcccugaacgcguacgugucccagcagcugagcgacaucacgcucaucaaggccggggccucccgggccaucgagaaggugaacgagugcgucaagagccagagcccccgcaucaacuucugcggcaacgggaaccacauccugucccuggugcagaacgcgcccuacggccuccuguucauccacuucuccuacaagcccaccagcuucaagaccgugcuggucucccccgggcucugccugagcggcgaccggggcaucgccccgaagcagggguacuucaucaagcagaacgacuccuggauguucaccggcagcuccuacuacuaccccgagcccaucagcgacaagaacguggucuucaugaacuccugcagcgugaacuucacgaaggcccccuucaucuaccugaacaacuccaucccgaaccucagcgacuucgaggccgagcugucccugugguucaagaaccacaccagcaucgcccccaaccucaccuucaacagccacaucaacgcgaccuuccuggaccuguacuacgagaugaacgugauccaggaguccaucaagagccucaacuccagcuucaucaaccugaaggagaucgggacguacgagauguacgucaaguggcccugguacaucuggcugcucaucgugauccuguucaucaucuuccugaugauccucuucuucaucugcugcugcaccggcugcggguccgccugcuucagcaagugccacaacugcugcgacgaguacggcggccacaacgacuucgugaucaaggccucccacgacgacugaggacuaguuauaagacugacuagcccgaugggccucccaacgggcccuccuccccuccuugcaccgagauuaauaaaaaaaaaaaaaaaaaaaaaaaaaaaaaaaaaaaaaaaaaaaaaaaaaaaaaaaaaaaaaaaaugcaucccccccccccccccccccccccccccccccaaaggcucuuuucagagccaccagaauu

SEQ ID NO: 15145 - RNA, 4273 nt, Artificial Sequence
  HCoV/HKU1/N5__Q0ZME7.1 spike protein mRNA gc (1-1351)(N1067P_L1068P)
aggagaaagcuuaccauguuccugaucaucuucauccuccccaccacccuggccgugaucggcgacuucaacugcacgaacagcuucaucaacgacuacaacaagaccaucccgcgcaucuccgaggacgucguggacgugagccuggggcucggcaccuacuacguccugaaccggguguaccugaacaccacgcuccuguucaccggguacuuccccaaguccggcgccaacuuccgcgaccuggcgcucaaggggagcaucuaccuguccacccugugguacaagccgcccuuccucagcgacuucaacaacggcaucuucuccaaggugaagaacaccaagcuguacgucaacaacacgcuguacagcgaguucuccaccaucgugaucggcagcguguucgucaacaccuccuacaccaucguggugcagccccacaacgggauccucgagaucacggccugccaguacaccaugugcgaguacccccacaccgucugcaagagcaagggcuccauccggaacgagagcuggcacaucgacuccagcgagccccugugccuguucaagaagaacuucaccuacaacguguccgccgacuggcucuacuuccacuucuaccaggagcgcgggguguucuacgccuacuacgccgacgucggcaugcccacgaccuuccuguucagccuguaccucgggaccauccugucccacuacuacgugaugccgcugaccugcaacgcgaucagcagcaacacggacaacgagacccucgaguacugggugacgccccugucccggcgccaguaccugcucaacuucgacgagcacggcgucaucaccaacgccguggacugcagcuccagcuuccuguccgagauccagugcaagacccagagcuucgcccccaacaccggcguguacgaccuguccggguucaccgucaagcccguggccaccguguaccggcgcaucccgaaccuccccgacugcgacaucgacaacuggcugaacaacgucagcgugcccagcccccugaacugggagcggcgcaucuucuccaacugcaacuucaaccucuccacgcugcugcggcucguccacguggacagcuucuccugcaacaaccuggacaagagcaagaucuucggcuccugcuucaacagcaucaccguggacaaguucgcgaucccgaaccgccggcgcgacgaccugcagcucggguccagcggcuuccugcaguccagcaacuacaagaucgacaucagcuccagcuccugccagcuguacuacagccucccccuggucaacgugaccaucaacaacuucaaccccuccagcuggaaccggcgcuacggcuucggguccuucaaccugagcuccuacgacguggucuacagcgaccacugcuucuccgugaacagcgacuucugccccugcgccgacccguccguggucaacagcugcgccaaguccaagccgcccagcgccaucugccccgccggcaccaaguaccggcacugcgaccucgacacgacccuguacgugaagaacuggugccgcugcuccugccugcccgaccccaucagcaccuacagccccaacacgugcccccagaagaagguggucguggggaucggcgagcacugcccggggcugggcaucaacgaggagaagugcggcacccagcucaaccacuccagcugcuucugcucccccgacgcguuccugggguggagcuucgacuccugcaucagcaacaaccggugcaacaucuucuccaacuucaucuucaacggcaucaacagcgggacgaccugcuccaacgaccugcucuacagcaacaccgagaucuccaccggcgugugcgucaacuacgaccuguacgggaucaccggccagggcaucuucaaggaggugagcgccgccuacuacaacaacuggcagaaccugcucuacgacuccaacgggaacaucaucggcuucaaggacuuccugaccaacaagaccuacaccauccugcccugcuacagcgggcgcguguccgccgccuucuaccagaacagcuccagcccggcgcuccuguaccggaaccugaagugcuccuacguccucaacaacaucagcuucaucagccagcccuucuacuucgacuccuaccugggcugcgugcugaacgccgugaaccucacgagcuacuccgucagcuccugcgaccugcgcauggggagcggcuucugcaucgacuacgcccugcccuccagccgccggaagcgccggggcaucuccagccccuaccgcuucgugaccuucgagccguucaacguguccuucgucaacgacagcguggagaccgucgggggccucuucgagauccagauccccaccaacuucacgaucgccgggcacgaggaguucauccagaccuccagccccaaggugaccaucgacugcuccgccuucgugugcagcaacuacgcggccugccacgaccugcuguccgaguacggcaccuucugcgacaacaucaacagcauccucaacgaggugaacgaccugcuggacaucacgcagcuccaggucgccaacgcccugaugcagggcgugacccuguccagcaaccucaacaccaaccugcacagcgacguggacaacaucgacuucaagucccugcucgggugccugggcagccagugcggguccagcucccggagccugcucgaggaccugcuguucaacaaggucaagcucuccgacgugggcuucguggaggccuacaacaacugcaccgggggcagcgagauccgcgaccugcugugcguccaguccuucaacggcaucaaggugcugcccccgauccugagcgagacgcagaucuccggguacaccaccgcggccaccguggccgccauguucccgcccuggagcgcggccgccggcguccccuucucccugaacgugcaguaccggaucaacgggcucggcgugacgauggacguccugaacaagaaccagaagcugaucgccaacgccuucaacaaggcgcuccugagcauccagaacggguucaccgccaccaacuccgcccuggccaagauccagagcguggugaacgccaacgcgcaggcccucaacucccugcugcagcagcuguucaacaaguucggcgccaucagcuccagccuccaggagauccugagccgccucgacccgcccgaggcccagguccagaucgaccggcugaucaacggccgccugaccgcccucaacgcguacgugucccagcagcugagcgacaucacgcugaucaaggccggggccucccgggccaucgagaaggugaacgagugcgucaagagccagagcccccgcaucaacuucugcggcaacgggaaccacauccucucccuggugcagaacgcgcccuacggccuccucuucauccacuucuccuacaagcccaccagcuucaagaccgugcuggucucccccgggcugugccucagcggcgaccggggcaucgcccccaagcagggguacuucaucaagcagaacgacuccuggauguucaccggcagcuccuacuacuaccccgagccgaucagcgacaagaacguggucuucaugaacuccugcagcgugaacuucacgaaggcccccuucaucuaccugaacaacuccauccccaaccugagcgacuucgaggccgagcucucccugugguucaagaaccacaccagcaucgcccccaaccugaccuucaacagccacaucaacgcgaccuuccucgaccuguacuacgagaugaacgugauccaggaguccaucaagagccugaacuccagcuucaucaaccucaaggagaucgggacguacgagauguacgucaaguggccgugguacaucuggcugcugaucgugauccucuucaucaucuuccugaugauccuguucuucaucugcugcugcaccggcugcggguccgccugcuucagcaagugccacaacugcugcgacgaguacggcggccacaacgacuucgugaucaaggccucccacgacgacugaggacuaguuauaagacugacuagcccgaugggccucccaacgggcccuccuccccuccuugcaccgagauuaauaaaaaaaaaaaaaaaaaaaaaaaaaaaaaaaaaaaaaaaaaaaaaaaaaaaaaaaaaaaaaaaaugcaucccccccccccccccccccccccccccccccaaaggcucuuuucagagccaccagaauu

SEQ ID NO: 15146 - RNA, 4048 nt, Artificial Sequence
  HCoV/HKU1/N5__Q0ZME7.1 spike protein mRNA gc (variant)
aggagaaagcuuaccauguuccugaucaucuucauccuccccaccacccuggccgugaucggcgacuucaacugcacgaacagcuucaucaacgacuacaacaagaccaucccgcgcaucuccgaggacgucguggacgugagccuggggcucggcaccuacuacguccugaaccggguguaccugaacaccacgcuccuguucaccggguacuuccccaaguccggcgccaacuuccgcgaccuggcgcucaaggggagcaucuaccuguccacccugugguacaagccgcccuuccucagcgacuucaacaacggcaucuucuccaaggugaagaacaccaagcuguacgucaacaacacgcuguacagcgaguucuccaccaucgugaucggcagcguguucgucaacaccuccuacaccaucguggugcagccccacaacgggauccucgagaucacggccugccaguacaccaugugcgaguacccccacaccgucugcaagagcaagggcuccauccggaacgagagcuggcacaucgacuccagcgagccccugugccuguucaagaagaacuucaccuacaacguguccgccgacuggcucuacuuccacuucuaccaggagcgcgggguguucuacgccuacuacgccgacgucggcaugcccacgaccuuccuguucagccuguaccucgggaccauccugucccacuacuacgugaugccgcugaccugcaacgcgaucagcagcaacacggacaacgagacccucgaguacugggugacgccccugucccggcgccaguaccugcucaacuucgacgagcacggcgucaucaccaacgccguggacugcagcuccagcuuccuguccgagauccagugcaagacccagagcuucgcccccaacaccggcguguacgaccuguccggguucaccgucaagcccguggccaccguguaccggcgcaucccgaaccuccccgacugcgacaucgacaacuggcugaacaacgucagcgugcccagcccccugaacugggagcggcgcaucuucuccaacugcaacuucaaccucuccacgcugcugcggcucguccacguggacagcuucuccugcaacaaccuggacaagagcaagaucuucggcuccugcuucaacagcaucaccguggacaaguucgcgaucccgaaccgccggcgcgacgaccugcagcucggguccagcggcuuccugcaguccagcaacuacaagaucgacaucagcuccagcuccugccagcuguacuacagccucccccuggucaacgugaccaucaacaacuucaaccccuccagcuggaaccggcgcuacggcuucggguccuucaaccugagcuccuacgacguggucuacagcgaccacugcuucuccgugaacagcgacuucugccccugcgccgacccguccguggucaacagcugcgccaaguccaagccgcccagcgccaucugccccgccggcaccaaguaccggcacugcgaccucgacacgacccuguacgugaagaacuggugccgcugcuccugccugcccgaccccaucagcaccuacagccccaacacgugcccccagaagaagguggucguggggaucggcgagcacugcccggggcugggcaucaacgaggagaagugcggcacccagcucaaccacuccagcugcuucugcucccccgacgcguuccugggguggagcuucgacuccugcaucagcaacaaccggugcaacaucuucuccaacuucaucuucaacggcaucaacagcgggacgaccugcuccaacgaccugcucuacagcaacaccgagaucuccaccggcgugugcgucaacuacgaccuguacgggaucaccggccagggcaucuucaaggaggugagcgccgccuacuacaacaacuggcagaaccugcucuacgacuccaacgggaacaucaucggcuucaaggacuuccugaccaacaagaccuacaccauccugcccugcuacagcgggcgcguguccgccgccuucuaccagaacagcuccagcccggcgcuccuguaccggaaccugaagugcuccuacguccucaacaacaucagcuucaucagccagcccuucuacuucgacuccuaccugggcugcgugcugaacgccgugaaccucacgagcuacuccgucagcuccugcgaccugcgcauggggagcggcuucugcaucgacuacgcccugcccuccagcggcggguccggcagcgggaucuccagccccuaccgcuucgugaccuucgagccguucaacguguccuucgucaacgacagcguggagaccgugggcggccucuucgagauccagauccccaccaacuucacgaucgccgggcacgaggaguucauccagaccuccagccccaaggucaccaucgacugcuccgccuucgugugcagcaacuacgcggccugccacgaccugcuguccgaguacggcaccuucugcgacaacaucaacagcauccucaacgaggugaacgaccugcuggacaucacgcagcuccaggucgccaacgcccugaugcagggggugacccugagcuccaaccucaacaccaaccugcacagcgacguggacaacaucgacuucaagucccugcucggcugccuggggagccagugcggcuccagcucccggagccugcucgaggaccugcuguucaacaaggucaagcucuccgacgugggcuucguggaggccuacaacaacugcaccgggggcagcgagauccgcgaccugcugugcguccaguccuucaacgggaucaaggugcugcccccgauccugagcgagacgcagaucuccggcuacaccaccgcggccaccguggccgccauguucccgcccuggagcgcggccgccgggguccccuucucccugaacgugcaguaccggaucaacggccucggcgugacgauggacguccugaacaagaaccagaagcugaucgccaacgccuucaacaaggcgcuccugagcauccagaacggguucaccgccaccaacuccgcccuggccaagauccagagcguggugaacgccaacgcgcaggcccucaacucccugcugcagcagcuguucaacaaguucggcgccaucagcagcucccuccaggagauccugagccgccucgacccgcccgaggcccagguccagaucgaccggcugaucaacgggcgccugaccgcccucaacgcguacgugucccagcagcugagcgacaucacgcugaucaaggccggcgccucccgggccaucgagaaggugaacgagugcgucaagagccagagcccccgcaucaacuucugcgggaacggcaaccacauccucucccuggugcagaacgcgcccuacggccuccucuucauccacuucuccuacaagcccaccagcuucaagaccgugcuggucucccccgggcugugccucagcggcgaccgggggaucgcccccaagcagggcuacuucaucaagcagaacgacuccuggauguucaccgggagcuccuacuacuaccccgagccgaucagcgacaagaacguggucuucaugaacuccugcagcgugaacuucacgaaggcccccuucaucuaccugaacaacuccauccccaaccugagcgacuucgaggccgagcucagccugugguucaagaaccacaccuccaucgcccccaaccugaccuucaacagccacaucaacgcgaccuuccucgaccuguacuacgagaugaacgugauccaggaguccaucaagagccugaacugaggacuaguuauaagacugacuagcccgaugggccucccaacgggcccuccuccccuccuugcaccgagauuaauaaaaaaaaaaaaaaaaaaaaaaaaaaaaaaaaaaaaaaaaaaaaaaaaaaaaaaaaaaaaaaaaugcaucccccccccccccccccccccccccccccccaaaggcucuuuucagagccaccagaauu

SEQ ID NO: 15147 - RNA, 4129 nt, Artificial Sequence
  HCoV/HKU1/N5__Q0ZME7.1 spike protein mRNA gc (variant)
aggagaaagcuuaccauguuccugaucaucuucauccuccccaccacccuggccgugaucggcgacuucaacugcacgaacagcuucaucaacgacuacaacaagaccaucccgcgcaucuccgaggacgucguggacgugagccuggggcucggcaccuacuacguccugaaccggguguaccugaacaccacgcuccuguucaccggguacuuccccaaguccggcgccaacuuccgcgaccuggcccucaaggggagcaucuaccuguccacccugugguacaagccgcccuuccucagcgacuucaacaacggcaucuucuccaaggugaagaacaccaagcuguacgucaacaacacgcuguacagcgaguucuccaccaucgugaucggcagcguguucgucaacaccuccuacaccaucguggugcagccccacaacgggauccucgagaucacggccugccaguacaccaugugcgaguacccccacaccgucugcaagagcaagggcuccauccggaacgagagcuggcacaucgacuccagcgagccccugugccuguucaagaagaacuucaccuacaacguguccgccgacuggcucuacuuccacuucuaccaggagcgcgggguguucuacgccuacuacgccgacgucggcaugcccacgaccuuccuguucagccuguaccucgggaccauccugucccacuacuacgugaugccgcugaccugcaacgcgaucagcagcaacacggacaacgagacccucgaguacugggugacgccccugucccggcgccaguaccugcucaacuucgacgagcacggcgucaucaccaacgccguggacugcagcuccagcuuccuguccgagauccagugcaagacccagagcuucgcccccaacaccggcguguacgaccuguccggguucaccgucaagcccguggccaccguguaccggcgcaucccgaaccuccccgacugcgacaucgacaacuggcugaacaacgucagcgugcccagcccccugaacugggagcggcgcaucuucuccaacugcaacuucaaccucuccacgcugcugcggcucguccacguggacagcuucuccugcaacaaccuggacaagagcaagaucuucggcuccugcuucaacagcaucaccguggacaaguucgcgaucccgaaccgccggcgcgacgaccugcagcucggguccagcggcuuccugcaguccagcaacuacaagaucgacaucagcuccagcuccugccagcuguacuacagccucccccuggucaacgugaccaucaacaacuucaaccccuccagcuggaaccggcgcuacggcuucggguccuucaaccugagcuccuacgacguggucuacagcgaccacugcuucuccgugaacagcgacuucugccccugcgccgacccguccguggucaacagcugcgccaaguccaagccgcccagcgccaucugccccgccggcaccaaguaccggcacugcgaccucgacacgacccuguacgugaagaacuggugccgcugcuccugccugcccgaccccaucagcaccuacagccccaacacgugcccccagaagaagguggucguggggaucggcgagcacugcccggggcugggcaucaacgaggagaagugcggcacccagcucaaccacuccagcugcuucugcucccccgacgcguuccugggguggagcuucgacuccugcaucagcaacaaccggugcaacaucuucuccaacuucaucuucaacggcaucaacagcgggacgaccugcuccaacgaccugcucuacagcaacaccgagaucuccaccggcgugugcgucaacuacgaccuguacgggaucaccggccagggcaucuucaaggaggugagcgccgccuacuacaacaacuggcagaaccugcucuacgacuccaacgggaacaucaucggcuucaaggacuuccugaccaacaagaccuacaccauccugcccugcuacagcgggcgcguguccgccgccuucuaccagaacagcuccagcccggcgcuccuguaccggaaccugaagugcuccuacguccucaacaacaucagcuucaucagccagcccuucuacuucgacuccuaccugggcugcgugcugaacgccgugaaccucacgagcuacuccgucagcuccugcgaccugcgcauggggagcggcuucugcaucgacuacgcccugcccuccagcggcggguccggcagcgggaucuccagccccuaccgcuucgugaccuucgagccguucaacguguccuucgucaacgacagcguggagaccgugggcggccucuucgagauccagauccccaccaacuucacgaucgccgggcacgaggaguucauccagaccuccagccccaaggucaccaucgacugcuccgccuucgugugcagcaacuacgcggccugccacgaccugcuguccgaguacggcaccuucugcgacaacaucaacagcauccucaacgaggugaacgaccugcuggacaucacgcagcuccaggucgccaacgcccugaugcagggggugacccugagcuccaaccucaacaccaaccugcacagcgacguggacaacaucgacuucaagucccugcucggcugccuggggagccagugcggcuccagcucccggagccugcucgaggaccugcuguucaacaaggucaagcucuccgacgugggcuucguggaggccuacaacaacugcaccgggggcagcgagauccgcgaccugcugugcguccaguccuucaacgggaucaaggugcugcccccgauccugagcgagacgcagaucuccggcuacaccaccgcggccaccguggccgccauguucccgcccuggagcgcggccgccgggguccccuucucccugaacgugcaguaccggaucaacggccucggcgugacgauggacguccugaacaagaaccagaagcugaucgccaacgccuucaacaaggcgcuccugagcauccagaacggguucaccgccaccaacuccgcccuggccaagauccagagcguggugaacgccaacgcgcaggcccucaacucccugcugcagcagcuguucaacaaguucggcgccaucagcagcucccuccaggagauccugagccgccucgacccgcccgaggcccagguccagaucgaccggcugaucaacgggcgccugaccgcccucaacgcguacgugucccagcagcugagcgacaucacgcugaucaaggccggcgccucccgggccaucgagaaggugaacgagugcgucaagagccagagcccccgcaucaacuucugcgggaacggcaaccacauccucucccuggugcagaacgcgcccuacggccuccucuucauccacuucuccuacaagcccaccagcuucaagaccgugcuggucucccccgggcugugccucagcggcgaccgggggaucgcccccaagcagggcuacuucaucaagcagaacgacuccuggauguucaccgggagcuccuacuacuaccccgagccgaucagcgacaagaacguggucuucaugaacuccugcagcgugaacuucacgaaggcccccuucaucuaccugaacaacuccauccccaaccugagcgacuucgaggccgagcucagccugugguucaagaaccacaccuccaucgcccccaaccugaccuucaacagccacaucaacgcgaccuuccucgaccuguacuacgagaugaacgugauccaggaguccaucaagagccugaacggcggcuacaucccggaggcgccccgcgacgggcaggccuacguccggaaggacggcgagugggugcuccuguccacguucugaggacuaguuauaagacugacuagcccgaugggccucccaacgggcccuccuccccuccuugcaccgagauuaauaaaaaaaaaaaaaaaaaaaaaaaaaaaaaaaaaaaaaaaaaaaaaaaaaaaaaaaaaaaaaaaaugcaucccccccccccccccccccccccccccccccaaaggcucuuuucagagccaccagaauu

SEQ ID NO: 15148 - RNA, 3733 nt, Artificial Sequence
  HCoV/229E/BN1/GER/2015__AOG74783.1 spike protein mRNA gc (1-1171)
aggagaaagcuuaccauguucgugcugcucgucgccuacgcccugcugcacaucgcgggcugccagaccaccaacgggacgaacaccagccacuccgugugcaacggcugcguggggcacagcgagaacgucuucgccguggaguccggcggguacauccccagcaacuucgccuucaacaacugguuccuccugaccaacaccuccagcguggucgacggcguggugcgcuccuuccagccgcugcuccugaacugccuguggagcgucuccggcagccaguucacgaccggguucguguacuucaacggcaccgggcggggcgccugcaagggguucuacuccaacgccagcuccgacgugauccgcuacaacaucaacuucgaggagaaccuccggcgcggcaccauccuguucaagacgagcuacggcgcggucguguucuacugcaccaacaacacccugguguccggggacgcccacauccccagcggcaccguccucgggaacuucuacugcuucgugaacacgaccaucggcaacgagaccaccuccgccuucgugggcgcccugcccaagacgguccgggaguucgugaucagccgcaccgggcacuucuacaucaacggcuaccgguacuucucccugggggacguggaggcggucaacuucaacgugaccaacgccgccaccacggugugcaccgucgcccucgccagcuacgcggacgugcuggucaacgugagccagaccgccaucgccaacaucaucuacugcaacuccgugaucaaccgccugcggugcgaccagcucagcuucgacguccccgacggcuucuacuccaccagcccgauccagcccguggagcugcccguguccaucgucagccugcccguguaccacaagcacacguucaucgugcucuacgucaacuucgagcaccgccgggggccgggcaagugcuacaacugccgccccgccgugaucaacaucacccuggccaacuucaacgagaccaagggcccccugugcguggacaccucccacuucacgacccaguucgucgacaacgugaagcucgcgcgguggagcgccuccaucaacaccgggaacugccccuucagcuucggcaaggugaacaacuucgucaaguucggguccgugugcuucagccugaaggacaucccgggcgggugcgccaugcccaucauggccaaccuggugaacuccaagagccacaacaucggcucccucuacgucagcugguccgacggcgacgugaucaccggggugcccaagcccgucgagggcgugagcuccuucaugaacgugacgcugaacaagugcaccaaguacaacaucuacgacgucagcggggugggcgugauccgcaucagcaacgacaccuuccugaacgggaucaccuacacguccaccagcggcaaccuccugggcuucaaggacgucaccaacgggaccaucuacuccaucaccccgugcaacccgcccgaccagcuggugguguaccagcaggccgucgugggcgcgaugcucagcgagaacuucacguccuacggguucagcaacguggucgagaugcccaaguucuucuacgccuccaacggcaccuacaacugcaccgacgccgugcugaccuacagcuccuucggcgugugcgccgacgggagcaucaucgccguccagccccggaacguguccuacgacagcguguccgcgaucgucacggccaaccugagcauccccuucaacuggaccaccuccguccagguggaguaccuccagaucaccagcacgcccaucgugguggacugcuccaccuacgugugcaacggcaacguccgcugcguggagcugcugaagcaguacaccagcgccugcaagaccaucgaggacgcccuccggaacagcgcgaugcuggaguccgccgacgugagcgagaugcugacguucgacaagaaggccuucacccucgccaacgucuccagcuucggggacuacaaccuguccagcgugauccccucccugccgcgcagcggcucccggguggccgggcgcagcgcgaucgaggacauccucuucuccaagcuggucaccagcggccugggcaccguggacgccgacuacaagaagugcacgaaggggcuguccaucgccgaccucgccugcgcccaguacuacaacggcaucaugguccugcccgggguggcggacgccgagcggauggccauguacaccggcagccugaucgggggcaucgcccucggcgggcugaccuccgccgcgagcauccccuucucccuggccauccagagccgccucaacuacguggcccugcagaccgacguccugcaggagaaccagcgcauccucgccgcguccuucaacaaggccaugacgaacaucguggacgccuucaccggcgugaacgacgccaucacccagaccagccaggcccugcagacggucgcgaccgcccugaacaagauccaggacguggugaaccagcaggggaacagccucaaccaccugaccucccagcugcggcagaacuuccaggccaucagcuccagcauccaggccaucuacgaccgccucgacaucauccaggccgaccagcaggucgaccggcugaucaccggccgccuggcggcccucaacguguucgugucccacacgcugaccaaguacaccgagguccgggccagccgccagcuggcccagcagaaggugaacgagugcgugaagucccagagcaagcgguacggguucugcggcaacggcacccacaucuucucccucgucaacgccgcgcccgaggggcugguguuccugcacacggugcuccugccgacccaguacaaggacgucgaggccuggagcggccugugcguggacgggaucaacggcuacgugcuccgccagcccaaccuggcccuguacaaggaggggaacuacuaccggaucaccucccgcaucauguucgagccccggaucccgaccaucgccgacuucguccagaucgagaacugcaacgugacguucgugaacaucagccgcuccgagcuccagaccaucguccccgaguacaucgacgugaacaagacccugcaggagcugagcuacaagcuccccaacuacaccgugcccgaccuggucguggagcaguacaaccagaccauccugaaccucacguccgagaucagcacccuggagaacaaguccgcggagcugaacuacaccgugcagaagcuccagacccugaucgacaacaucaacagcacgcuggucgaccucaaguggcugaaccggguggagaccuacaucaaguggccgugguggguguggcugugcaucuccgucgugcucaucuucguggucagcaugcugcugcucugcugcugcagcaccggcugcugcggcuucuucuccugcuucgccagcuccauccgcgggugcugcgagagcaccaagcugcccuacuacgacguggagaagauccacauccagugaggacuaguuauaagacugacuagcccgaugggccucccaacgggcccuccuccccuccuugcaccgagauuaauaaaaaaaaaaaaaaaaaaaaaaaaaaaaaaaaaaaaaaaaaaaaaaaaaaaaaaaaaaaaaaaaugcaucccccccccccccccccccccccccccccccaaaggcucuuuucagagccaccagaauu

SEQ ID NO: 15149 - RNA, 3733 nt, Artificial Sequence
  HCoV/229E/BN1/GER/2015__AOG74783.1 spike protein mRNA gc (1-1171)(I869P_I870P)
aggagaaagcuuaccauguucgugcugcucgucgccuacgcccugcugcacaucgcgggcugccagaccaccaacgggacgaacaccagccacuccgugugcaacggcugcguggggcacagcgagaacgucuucgccguggaguccggcggguacauccccagcaacuucgccuucaacaacugguuccuccugaccaacaccuccagcguggucgacggcguggugcgcuccuuccagccgcugcuccugaacugccuguggagcgucuccggcagccaguucacgaccggguucguguacuucaacggcaccgggcggggcgccugcaagggguucuacuccaacgccagcuccgacgugauccgcuacaacaucaacuucgaggagaaccuccggcgcggcaccauccuguucaagacgagcuacggcgcggucguguucuacugcaccaacaacacccugguguccggggacgcccacauccccagcggcaccguccucgggaacuucuacugcuucgugaacacgaccaucggcaacgagaccaccuccgccuucgugggcgcccugcccaagacgguccgggaguucgugaucagccgcaccgggcacuucuacaucaacggcuaccgguacuucucccugggggacguggaggcggucaacuucaacgugaccaacgccgccaccacggugugcaccgucgcccucgccagcuacgcggacgugcuggucaacgugagccagaccgccaucgccaacaucaucuacugcaacuccgugaucaaccgccugcggugcgaccagcucagcuucgacguccccgacggcuucuacuccaccagcccgauccagcccguggagcugcccguguccaucgucagccugcccguguaccacaagcacacguucaucgugcucuacgucaacuucgagcaccgccgggggccgggcaagugcuacaacugccgccccgccgugaucaacaucacccuggccaacuucaacgagaccaagggcccccugugcguggacaccucccacuucacgacccaguucgucgacaacgugaagcucgcgcgguggagcgccuccaucaacaccgggaacugccccuucagcuucggcaaggugaacaacuucgucaaguucggguccgugugcuucagccugaaggacaucccgggcgggugcgccaugcccaucauggccaaccuggugaacuccaagagccacaacaucggcucccucuacgucagcugguccgacggcgacgugaucaccggggugcccaagcccgucgagggcgugagcuccuucaugaacgugacgcugaacaagugcaccaaguacaacaucuacgacgucagcggggugggcgugauccgcaucagcaacgacaccuuccugaacgggaucaccuacacguccaccagcggcaaccuccugggcuucaaggacgucaccaacgggaccaucuacuccaucaccccgugcaacccgcccgaccagcuggugguguaccagcaggccgucgugggcgcgaugcucagcgagaacuucacguccuacggguucagcaacguggucgagaugcccaaguucuucuacgccuccaacggcaccuacaacugcaccgacgccgugcugaccuacagcuccuucggcgugugcgccgacgggagcaucaucgccguccagccccggaacguguccuacgacagcguguccgcgaucgucacggccaaccugagcauccccuucaacuggaccaccuccguccagguggaguaccuccagaucaccagcacgcccaucgugguggacugcuccaccuacgugugcaacggcaacguccgcugcguggagcugcugaagcaguacaccagcgccugcaagaccaucgaggacgcccuccggaacagcgcgaugcuggaguccgccgacgugagcgagaugcugacguucgacaagaaggccuucacccucgccaacgucuccagcuucggggacuacaaccuguccagcgugauccccucccugccgcgcagcggcucccggguggccgggcgcagcgcgaucgaggacauccucuucuccaagcuggucaccagcggccugggcaccguggacgccgacuacaagaagugcacgaaggggcuguccaucgccgaccucgccugcgcccaguacuacaacggcaucaugguccugcccgggguggcggacgccgagcggauggccauguacaccggcagccugaucgggggcaucgcccucggcgggcugaccuccgccgcgagcauccccuucucccuggccauccagagccgccucaacuacguggcccugcagaccgacguccugcaggagaaccagcgcauccucgccgcguccuucaacaaggccaugacgaacaucguggacgccuucaccggcgugaacgacgccaucacccagaccagccaggcccugcagacggucgcgaccgcccugaacaagauccaggacguggugaaccagcaggggaacagccucaaccaccugaccucccagcugcggcagaacuuccaggccaucagcuccagcauccaggccaucuacgaccgccucgacccgccccaggccgaccagcaggucgaccggcugaucaccggccgccuggcggcccucaacguguucgugucccacacgcugaccaaguacaccgagguccgggccagccgccagcuggcccagcagaaggugaacgagugcgugaagucccagagcaagcgguacggguucugcggcaacggcacccacaucuucucccucgucaacgccgcgcccgaggggcugguguuccugcacacggugcuccugcccacccaguacaaggacgucgaggccuggagcggccugugcguggacgggaucaacggcuacgugcuccgccagccgaaccuggcccuguacaaggaggggaacuacuaccggaucaccucccgcaucauguucgagccccggauccccaccaucgccgacuucguccagaucgagaacugcaacgugacguucgugaacaucagccgcuccgagcuccagaccaucguccccgaguacaucgacgugaacaagacccugcaggagcugagcuacaagcucccgaacuacaccgugcccgaccuggucguggagcaguacaaccagaccauccugaaccucacguccgagaucagcacccuggagaacaaguccgcggagcugaacuacaccgugcagaagcuccagacccugaucgacaacaucaacagcacgcuggucgaccucaaguggcugaaccggguggagaccuacaucaaguggcccugguggguguggcugugcaucuccgucgugcucaucuucguggucagcaugcugcugcucugcugcugcagcaccggcugcugcggcuucuucuccugcuucgccagcuccauccgcgggugcugcgagagcaccaagcugcccuacuacgacguggagaagauccacauccagugaggacuaguuauaagacugacuagcccgaugggccucccaacgggcccuccuccccuccuugcaccgagauuaauaaaaaaaaaaaaaaaaaaaaaaaaaaaaaaaaaaaaaaaaaaaaaaaaaaaaaaaaaaaaaaaaugcaucccccccccccccccccccccccccccccccaaaggcucuuuucagagccaccagaauu

SEQ ID NO: 15150 - RNA, 3544 nt, Artificial Sequence
  HCoV/229E/BN1/GER/2015__AOG74783.1 spike protein mRNA gc (variant)
aggagaaagcuuaccauguucgugcugcucgucgccuacgcccugcugcacaucgcgggcugccagaccaccaacgggacgaacaccagccacuccgugugcaacggcugcguggggcacagcgagaacgucuucgccguggaguccggcggguacauccccagcaacuucgccuucaacaacugguuccuccugaccaacaccuccagcguggucgacggcguggugcgcuccuuccagccgcugcuccugaacugccuguggagcgucuccggcagccaguucacgaccggguucguguacuucaacggcaccgggcggggcgccugcaagggguucuacuccaacgccagcuccgacgugauccgcuacaacaucaacuucgaggagaaccuccggcgcggcaccauccuguucaagacgagcuacggcgcggucguguucuacugcaccaacaacacccugguguccggggacgcccacauccccagcggcaccguccucgggaacuucuacugcuucgugaacacgaccaucggcaacgagaccaccuccgccuucgugggcgcccugcccaagacgguccgggaguucgugaucagccgcaccgggcacuucuacaucaacggcuaccgguacuucucccugggggacguggaggcggucaacuucaacgugaccaacgccgccaccacggugugcaccgucgcccucgccagcuacgcggacgugcuggucaacgugagccagaccgccaucgccaacaucaucuacugcaacuccgugaucaaccgccugcggugcgaccagcucagcuucgacguccccgacggcuucuacuccaccagcccgauccagcccguggagcugcccguguccaucgucagccugcccguguaccacaagcacacguucaucgugcucuacgucaacuucgagcaccgccgggggccgggcaagugcuacaacugccgccccgccgugaucaacaucacccuggccaacuucaacgagaccaagggcccccugugcguggacaccucccacuucacgacccaguucgucgacaacgugaagcucgcgcgguggagcgccuccaucaacaccgggaacugccccuucagcuucggcaaggugaacaacuucgucaaguucggguccgugugcuucagccugaaggacaucccgggcgggugcgccaugcccaucauggccaaccuggugaacuccaagagccacaacaucggcucccucuacgucagcugguccgacggcgacgugaucaccggggugcccaagcccgucgagggcgugagcuccuucaugaacgugacgcugaacaagugcaccaaguacaacaucuacgacgucagcggggugggcgugauccgcaucagcaacgacaccuuccugaacgggaucaccuacacguccaccagcggcaaccuccugggcuucaaggacgucaccaacgggaccaucuacuccaucaccccgugcaacccgcccgaccagcuggugguguaccagcaggccgucgugggcgcgaugcucagcgagaacuucacguccuacggguucagcaacguggucgagaugcccaaguucuucuacgccuccaacggcaccuacaacugcaccgacgccgugcugaccuacagcuccuucggcgugugcgccgacgggagcaucaucgccguccagccccggaacguguccuacgacagcguguccgcgaucgucacggccaaccugagcauccccuucaacuggaccaccuccguccagguggaguaccuccagaucaccagcacgcccaucgugguggacugcuccaccuacgugugcaacggcaacguccgcugcguggagcugcugaagcaguacaccagcgccugcaagaccaucgaggacgcccuccggaacagcgcgaugcuggaguccgccgacgugagcgagaugcugacguucgacaagaaggccuucacccucgccaacgucuccagcuucggggacuacaaccuguccagcgugauccccucccugccgcgcagcggcucccggguggccgggcgcagcgcgaucgaggacauccucuucuccaagcuggucaccagcggccugggcaccguggacgccgacuacaagaagugcacgaaggggcuguccaucgccgaccucgccugcgcccaguacuacaacggcaucaugguccugcccgggguggcggacgccgagcggauggccauguacaccggcagccugaucgggggcaucgcccucggcgggcugaccuccgccgcgagcauccccuucucccuggccauccagagccgccucaacuacguggcccugcagaccgacguccugcaggagaaccagcgcauccucgccgcguccuucaacaaggccaugacgaacaucguggacgccuucaccggcgugaacgacgccaucacccagaccagccaggcccugcagacggucgcgaccgcccugaacaagauccaggacguggugaaccagcaggggaacagccucaaccaccugaccucccagcugcggcagaacuuccaggccaucagcuccagcauccaggccaucuacgaccgccucgacccgccccaggccgaccagcaggucgaccggcugaucaccggccgccuggcggcccucaacguguucgugucccacacgcugaccaaguacaccgagguccgggccagccgccagcuggcccagcagaaggugaacgagugcgugaagucccagagcaagcgguacggguucugcggcaacggcacccacaucuucucccucgucaacgccgcgcccgaggggcugguguuccugcacacggugcuccugcccacccaguacaaggacgucgaggccuggagcggccugugcguggacgggaucaacggcuacgugcuccgccagccgaaccuggcccuguacaaggaggggaacuacuaccggaucaccucccgcaucauguucgagccccggauccccaccaucgccgacuucguccagaucgagaacugcaacgugacguucgugaacaucagccgcuccgagcuccagaccaucguccccgaguacaucgacgugaacaagacccugcaggagcugagcuacaagcucccgaacuacaccgugcccgaccuggucguggagcaguacaaccagaccauccugaaccucacguccgagaucagcacccuggagaacaaguccgcggagcugaacuacaccgugcagaagcuccagacccugaucgacaacaucaacagcacgcuggucgaccucaaguggcugaaccggguggagaccugaggacuaguuauaagacugacuagcccgaugggccucccaacgggcccuccuccccuccuugcaccgagauuaauaaaaaaaaaaaaaaaaaaaaaaaaaaaaaaaaaaaaaaaaaaaaaaaaaaaaaaaaaaaaaaaaugcaucccccccccccccccccccccccccccccccaaaggcucuuuucagagccaccagaauu

SEQ ID NO: 15151 - RNA, 3625 nt, Artificial Sequence
  HCoV/229E/BN1/GER/2015__AOG74783.1 spike protein mRNA gc (variant)
aggagaaagcuuaccauguucgugcugcucgucgccuacgcccugcugcacaucgccggcugccagaccaccaacgggacgaacaccagccacuccgugugcaacggcugcguggggcacagcgagaacgucuucgccguggaguccggcggguacauccccagcaacuucgccuucaacaacugguuccuccugaccaacaccuccagcguggucgacggcguggugcgcuccuuccagccgcugcuccugaacugccuguggagcgucuccggcagccaguucacgaccggguucguguacuucaacggcaccgggcggggcgccugcaagggguucuacuccaacgccagcuccgacgugauccgcuacaacaucaacuucgaggagaaccuccggcgcggcaccauccuguucaagacgagcuacggcgcggucguguucuacugcaccaacaacacccugguguccggggacgcccacauccccagcggcaccguccucgggaacuucuacugcuucgugaacacgaccaucggcaacgagaccaccuccgccuucgugggcgcccugcccaagacgguccgggaguucgugaucagccgcaccgggcacuucuacaucaacggcuaccgguacuucucccugggggacguggaggcggucaacuucaacgugaccaacgccgccaccacggugugcaccgucgcccucgccagcuacgcggacgugcuggucaacgugagccagaccgccaucgccaacaucaucuacugcaacuccgugaucaaccgccugcggugcgaccagcucagcuucgacguccccgacggcuucuacuccaccagcccgauccagcccguggagcugcccguguccaucgucagccugcccguguaccacaagcacacguucaucgugcucuacgucaacuucgagcaccgccgggggccgggcaagugcuacaacugccgccccgccgugaucaacaucacccuggccaacuucaacgagaccaagggcccccugugcguggacaccucccacuucacgacccaguucgucgacaacgugaagcucgcgcgguggagcgccuccaucaacaccgggaacugccccuucagcuucggcaaggugaacaacuucgucaaguucggguccgugugcuucagccugaaggacaucccgggcgggugcgccaugcccaucauggccaaccuggugaacuccaagagccacaacaucggcucccucuacgucagcugguccgacggcgacgugaucaccggggugcccaagcccgucgagggcgugagcuccuucaugaacgugacgcugaacaagugcaccaaguacaacaucuacgacgucagcggggugggcgugauccgcaucagcaacgacaccuuccugaacgggaucaccuacacguccaccagcggcaaccuccugggcuucaaggacgucaccaacgggaccaucuacuccaucaccccgugcaacccgcccgaccagcuggugguguaccagcaggccgucgugggcgcgaugcucagcgagaacuucacguccuacggguucagcaacguggucgagaugcccaaguucuucuacgccuccaacggcaccuacaacugcaccgacgccgugcugaccuacagcuccuucggcgugugcgccgacgggagcaucaucgccguccagccccggaacguguccuacgacagcguguccgcgaucgucacggccaaccugagcauccccuucaacuggaccaccuccguccagguggaguaccuccagaucaccagcacgcccaucgugguggacugcuccaccuacgugugcaacggcaacguccgcugcguggagcugcugaagcaguacaccagcgccugcaagaccaucgaggacgcccuccggaacagcgcgaugcuggaguccgccgacgugagcgagaugcugacguucgacaagaaggccuucacccucgccaacgucuccagcuucggggacuacaaccuguccagcgugauccccucccugccgcgcagcggcucccggguggccgggcgcagcgcgaucgaggacauccucuucuccaagcuggucaccagcggccugggcaccguggacgccgacuacaagaagugcacgaaggggcuguccaucgccgaccucgccugcgcccaguacuacaacggcaucaugguccugcccgggguggcggacgccgagcggauggccauguacaccggcagccugaucgggggcaucgcccucggcgggcugaccuccgccgcgagcauccccuucucccuggccauccagagccgccucaacuacguggcccugcagaccgacguccugcaggagaaccagcgcauccucgccgcguccuucaacaaggccaugacgaacaucguggacgccuucaccggcgugaacgacgccaucacccagaccagccaggcccugcagacggucgcgaccgcccugaacaagauccaggacguggugaaccagcaggggaacagccucaaccaccugaccucccagcugcggcagaacuuccaggccaucagcuccagcauccaggccaucuacgaccgccucgacccgccccaggccgaccagcaggucgaccggcugaucaccggccgccuggcggcccucaacguguucgugucccacacgcugaccaaguacaccgagguccgggccagccgccagcuggcccagcagaaggugaacgagugcgugaagucccagagcaagcgguacggguucugcggcaacggcacccacaucuucucccucgucaacgccgcgcccgaggggcugguguuccugcacacggugcuccugcccacccaguacaaggacgucgaggccuggagcggccugugcguggacgggaucaacggcuacgugcuccgccagccgaaccuggcccuguacaaggaggggaacuacuaccggaucaccucccgcaucauguucgagccccggauccccaccaucgccgacuucguccagaucgagaacugcaacgugacguucgugaacaucagccgcuccgagcuccagaccaucguccccgaguacaucgacgugaacaagacccugcaggagcugagcuacaagcucccgaacuacaccgugcccgaccuggucguggagcaguacaaccagaccauccugaaccucacguccgagaucagcacccuggagaacaaguccgcggagcugaacuacaccgugcagaagcuccagacccugaucgacaacaucaacagcacgcuggucgaccucaaguggcugaaccggguggagaccggcggcuacauccccgaggcgccccgcgacgggcaggccuacgugcggaaggacggcgaguggguccugcucuccaccuucugaggacuaguuauaagacugacuagcccgaugggccucccaacgggcccuccuccccuccuugcaccgagauuaauaaaaaaaaaaaaaaaaaaaaaaaaaaaaaaaaaaaaaaaaaaaaaaaaaaaaaaaaaaaaaaaaugcaucccccccccccccccccccccccccccccccaaaggcucuuuucagagccaccagaauu

SEQ ID NO: 15152 - RNA, 4288 nt, Artificial Sequence
  HCoV/NL63/RPTEC/2004__AFV53148.1 spike protein mRNA gc (1-1356)
aggagaaagcuuaccaugaagcuguuccucauccugcuggugcucccccuggccagcugcuucuucacgugcaacuccaacgccaaccugagcaugcuccagcugggcgucccggacaacuccagcaccaucgugaccgggcugcuccccacccacugguucugcgcgaaccaguccaccagcguguacuccgccaacggcuucuucuacaucgacgucgggaaccaccgcagcgccuucgcccugcacaccggcuacuacgacgccaaccaguacuacaucuacgugacgaacgagaucgggcugaacgcguccgugacccucaagaucugcaaguucagccggaacaccaccuucgacuuccuguccaacgccagcuccagcuucgacugcaucgucaaccuccucuucacggagcagcugggcgcgccccugggcaucaccaucuccggggagaccgugcgccuccaccuguacaacgugacccggacguucuacguccccgccgccuacaagcugaccaagcucagcgugaagugcuacuucaacuacuccugcguguucagcgucgugaacgccaccgugaccgucaacgugacgacccacaacggccgcguggucaacuacaccgugugcgacgacugcaacggguacaccgacaacaucuucuccgugcagcaggacggccggaucccgaacggguuccccuucaacaacugguuccugcugacgaacggcagcacccucgucgacggcgugagccgccuguaccagccccugcggcugaccugccuguggcccgugccggggcugaaguccagcaccggcuucgucuacuucaacgccacgggguccgacgugaacugcaacggcuaccagcacaacagcgucguggacgugaugcgcuacaaccucaacuucuccgccaacagccuggacaaccugaaguccggcgucaucguguucaagacccuccaguacgacgugcuguucuacugcagcaacuccagcuccgggguccuggacaccaccauccccuucggccccagcucccagcccuacuacugcuucaucaacagcacgaucaacaccacccacguguccaccuucguggggauccucccgcccacgguccgggagaucgugguggcccgcaccggccaguucuacaucaacggguucaaguacuucgaccugggcuucaucgaggcggucaacuucaacgugaccaccgccagcgccacggacuucuggaccguggccuucgccaccuucgucgacgugcuggugaacgucuccgcgaccaacauccagaaccuccuguacugcgacagccccuucgagaagcugcagugcgagcaccuccaguucggccugcaggacggguucuacuccgccaacuuccuggacgacaacgugcuccccgagaccuacguggcccugccgaucuacuaccagcacacggacaucaacuucaccgccaccgccagcuucggcgggagcugcuacgucugcaagccccaccaggugaacaucucccugaacggcaacaccagcgugugcguccggacgucccacuucagcauccgcuacaucuacaaccgggugaaguccgggagccccggcgacuccagcuggcacaucuaccugaaguccgggaccugccccuucagcuucuccaagcucaacaacuuccagaaguucaagaccaucugcuucagcaccguggaggucccgggguccugcaacuucccccuggaggcgacguggcacuacaccagcuacaccaucgugggcgcccuguacgugaccugguccgaggggaacagcaucacgggcguccccuaccccguguccgggauccgcgaguucagcaaccucgugcugaacaacugcaccaaguacaacaucuacgacuacgucggcaccggcaucauccggagcuccaaccagagccuggccgggggcaucaccuacguguccaacagcgggaaccuccugggcuucaagaacguguccacgggcaacaucuucaucgucaccccgugcaaccagcccgaccagguggccguguaccagcagagcaucaucggggccaugaccgcggucaacgagucccgcuacggccugcagaaccuccugcagcugcccaacuucuacuacgugagcaacgggggcaacaacugcaccacggccgugaugaccuacuccaacuucgggaucugcgccgacggcagccucauccccguccggccgcgcaacuccagcgacaacggcaucuccgccaucaucaccgcgaaccugagcauccccuccaacuggaccacgagcguccagguggaguaccugcagaucaccuccacccccaucgugguggacugcgccaccuacgugugcaacgggaacccgcggugcaagaaccuccugaagcaguacacgagcgccugcaagaccaucgaggacgcccugcgccucuccgcccaccuggagaccaacgacgucagcagcaugcugaccuucgacuccaacgcguucagccucgccaacgugacguccuucggcgacuacaaccugagcuccgugcugccccagcggaacauccgcagcucccgcaucgccgggcggagcgcccucgaggaccugcuguucuccaaggucgugaccagcggccucgggaccgucgacguggacuacaaguccugcaccaagggccugagcaucgccgaccuggcgugcgcccaguacuacaacggcaucauggugcuccccggggucgccgacgccgagcgcauggccauguacacgggcucccugaucgggggcauggugcugggcggccucaccagcgcggccgccauccccuucucccuggcccugcaggcgcggcucaacuacguggcccugcagaccgacguccugcaggagaaccagaagauccucgccgccagcuucaacaaggccaucaacaacaucguggcguccuucagcuccgugaacgacgccaucacccagaccgccgaggccauccacacggucaccaucgcccugaacaagauccaggacguggugaaccagcagggcagcgcgcugaaccaccucaccagccagcugcgccacaacuuccaggccaucuccaacagcauccaggccaucuacgaccggcuggacuccauccaggccgaccagcaggucgaccgccucaucaccgggcggcuggccgcgcugaacgccuucgugagccaggugcucaacaaguacacggagguccgcggcucccggcgccuggcccagcagaagaucaacgagugcgucaagagccaguccaaccgguacggguucugcggcaacgggacccacaucuucagcaucgugaacuccgccccggacggccuccuguuccugcacaccgugcugcuccccaccgacuacaagaacgugaaggcguggagcggcaucugcguggacgggaucuacggcuacguccugcgccagcccaaccuggugcucuacuccgacaacgggguguuccgggucacgagccgcaucauguuccagccccggcugccggugcuguccgacuucgugcagaucuacaacugcaacgucaccuucgugaacaucagccgcguggagcuccacaccgucauccccgacuacguggacgugaacaagacccugcaggaguucgcccagaaccugcccaaguacgucaagcccaacuucgaccucacgccguucaaccugaccuaccugaaccucuccagcgagcugaagcagcuggaggccaagaccgccucccucuuccagaccacgguggagcugcagggccugaucgaccagaucaacagcaccuacguggaccucaagcugcugaaccgguucgagaacuacaucaaguggcccuggugggucuggcucaucaucuccgugguguucgucgugcugcugagccuccugguguucugcugccugagcaccggcugcugcgggugcugcaacugccucaccuccagcaugcgcggcugcugcgacugcggguccacgaagcugcccuacuacgaguucgagaagguccacgugcagugaggacuaguuauaagacugacuagcccgaugggccucccaacgggcccuccuccccuccuugcaccgagauuaauaaaaaaaaaaaaaaaaaaaaaaaaaaaaaaaaaaaaaaaaaaaaaaaaaaaaaaaaaaaaaaaaugcaucccccccccccccccccccccccccccccccaaaggcucuuuucagagccaccagaauu

SEQ ID NO: 15153 - RNA, 4288 nt, Artificial Sequence
  HCoV/NL63/RPTEC/2004__AFV53148.1 spike protein mRNA gc (1-1356)(S1052P_I1053P)
aggagaaagcuuaccaugaagcuguuccucauccugcuggugcucccccuggccagcugcuucuucacgugcaacuccaacgccaaccugagcaugcuccagcugggcgucccggacaacuccagcaccaucgugaccgggcugcuccccacccacugguucugcgcgaaccaguccaccagcguguacuccgccaacggcuucuucuacaucgacgucgggaaccaccgcagcgccuucgcccugcacaccggcuacuacgacgccaaccaguacuacaucuacgugacgaacgagaucgggcugaacgcguccgugacccucaagaucugcaaguucagccggaacaccaccuucgacuuccuguccaacgccagcuccagcuucgacugcaucgucaaccuccucuucacggagcagcugggcgcgccccugggcaucaccaucuccggggagaccgugcgccuccaccuguacaacgugacccggacguucuacguccccgccgccuacaagcugaccaagcucagcgugaagugcuacuucaacuacuccugcguguucagcgucgugaacgccaccgugaccgucaacgugacgacccacaacggccgcguggucaacuacaccgugugcgacgacugcaacggguacaccgacaacaucuucuccgugcagcaggacggccggaucccgaacggguuccccuucaacaacugguuccugcugacgaacggcagcacccucgucgacggcgugagccgccuguaccagccccugcggcugaccugccuguggcccgugccggggcugaaguccagcaccggcuucgucuacuucaacgccacgggguccgacgugaacugcaacggcuaccagcacaacagcgucguggacgugaugcgcuacaaccucaacuucuccgccaacagccuggacaaccugaaguccggcgucaucguguucaagacccuccaguacgacgugcuguucuacugcagcaacuccagcuccgggguccuggacaccaccauccccuucggccccagcucccagcccuacuacugcuucaucaacagcacgaucaacaccacccacguguccaccuucguggggauccucccgcccacgguccgggagaucgugguggcccgcaccggccaguucuacaucaacggguucaaguacuucgaccugggcuucaucgaggcggucaacuucaacgugaccaccgccagcgccacggacuucuggaccguggccuucgccaccuucgucgacgugcuggugaacgucuccgcgaccaacauccagaaccuccuguacugcgacagccccuucgagaagcugcagugcgagcaccuccaguucggccugcaggacggguucuacuccgccaacuuccuggacgacaacgugcuccccgagaccuacguggcccugccgaucuacuaccagcacacggacaucaacuucaccgccaccgccagcuucggcgggagcugcuacgucugcaagccccaccaggugaacaucucccugaacggcaacaccagcgugugcguccggacgucccacuucagcauccgcuacaucuacaaccgggugaaguccgggagccccggcgacuccagcuggcacaucuaccugaaguccgggaccugccccuucagcuucuccaagcucaacaacuuccagaaguucaagaccaucugcuucagcaccguggaggucccgggguccugcaacuucccccuggaggcgacguggcacuacaccagcuacaccaucgugggcgcccuguacgugaccugguccgaggggaacagcaucacgggcguccccuaccccguguccgggauccgcgaguucagcaaccucgugcugaacaacugcaccaaguacaacaucuacgacuacgucggcaccggcaucauccggagcuccaaccagagccuggccgggggcaucaccuacguguccaacagcgggaaccuccugggcuucaagaacguguccacgggcaacaucuucaucgucaccccgugcaaccagcccgaccagguggccguguaccagcagagcaucaucggggccaugaccgcggucaacgagucccgcuacggccugcagaaccuccugcagcugcccaacuucuacuacgugagcaacgggggcaacaacugcaccacggccgugaugaccuacuccaacuucgggaucugcgccgacggcagccucauccccguccggccgcgcaacuccagcgacaacggcaucuccgccaucaucaccgcgaaccugagcauccccuccaacuggaccacgagcguccagguggaguaccugcagaucaccuccacccccaucgugguggacugcgccaccuacgugugcaacgggaacccgcggugcaagaaccuccugaagcaguacacgagcgccugcaagaccaucgaggacgcccugcgccucuccgcccaccuggagaccaacgacgucagcagcaugcugaccuucgacuccaacgcguucagccucgccaacgugacguccuucggcgacuacaaccugagcuccgugcugccccagcggaacauccgcagcucccgcaucgccgggcggagcgcccucgaggaccugcuguucuccaaggucgugaccagcggccucgggaccgucgacguggacuacaaguccugcaccaagggccugagcaucgccgaccuggcgugcgcccaguacuacaacggcaucauggugcuccccggggucgccgacgccgagcgcauggccauguacacgggcucccugaucgggggcauggugcugggcggccucaccagcgcggccgccauccccuucucccuggcccugcaggcgcggcucaacuacguggcccugcagaccgacguccugcaggagaaccagaagauccucgccgccagcuucaacaaggccaucaacaacaucguggcguccuucagcuccgugaacgacgccaucacccagaccgccgaggccauccacacggucaccaucgcccugaacaagauccaggacguggugaaccagcagggcagcgcgcugaaccaccucaccagccagcugcgccacaacuuccaggccaucuccaacagcauccaggccaucuacgaccggcuggacccgccccaggccgaccagcaggucgaccgccucaucaccgggcggcuggccgcgcugaacgccuucgugucccaggugcucaacaaguacacggagguccgcggcagccggcgccuggcccagcagaagaucaacgagugcgugaagucccagagcaaccgguacggguucugcggcaacgggacccacaucuucuccaucgugaacagcgcccccgacggccuccuguuccugcacaccguccugcuccccaccgacuacaagaacgugaaggcgugguccggcaucugcguggacgggaucuacggcuacguccugcgccagccgaaccuggugcucuacagcgacaacgggguguuccgggucacgucccgcaucauguuccagccccggcugcccgugcugagcgacuucgugcagaucuacaacugcaacgucaccuucgugaacaucucccgcguggagcuccacaccgucauccccgacuacguggacgugaacaagacccugcaggaguucgcccagaaccugccgaaguacgucaagcccaacuucgaccucacgcccuucaaccugaccuaccugaaccucagcuccgagcugaagcagcuggaggccaagaccgccagccucuuccagaccacgguggagcugcagggccugaucgaccagaucaacuccaccuacguggaccucaagcugcugaaccgguucgagaacuacaucaaguggcccuggugggucuggcucaucaucagcgugguguucgucgugcugcugucccuccugguguucugcugccugagcaccggcugcugcgggugcugcaacugccucaccagcuccaugcgcggcugcugcgacugcgggagcacgaagcugccguacuacgaguucgagaagguccacgugcagugaggacuaguuauaagacugacuagcccgaugggccucccaacgggcccuccuccccuccuugcaccgagauuaauaaaaaaaaaaaaaaaaaaaaaaaaaaaaaaaaaaaaaaaaaaaaaaaaaaaaaaaaaaaaaaaaugcaucccccccccccccccccccccccccccccccaaaggcucuuuucagagccaccagaauu

SEQ ID NO: 15154 - RNA, 4093 nt, Artificial Sequence
  HCoV/NL63/RPTEC/2004__AFV53148.1 spike protein mRNA gc (variant)
aggagaaagcuuaccaugaagcuguuccucauccugcuggugcucccccuggccagcugcuucuucacgugcaacuccaacgccaaccugagcaugcuccagcugggcgucccggacaacuccagcaccaucgugaccgggcugcuccccacccacugguucugcgcgaaccaguccaccagcguguacuccgccaacggcuucuucuacaucgacgucgggaaccaccgcagcgccuucgcccugcacaccggcuacuacgacgccaaccaguacuacaucuacgugacgaacgagaucgggcugaacgcguccgugacccucaagaucugcaaguucagccggaacaccaccuucgacuuccuguccaacgccagcuccagcuucgacugcaucgucaaccuccucuucacggagcagcugggcgcgccccugggcaucaccaucuccggggagaccgugcgccuccaccuguacaacgugacccggacguucuacguccccgccgccuacaagcugaccaagcucagcgugaagugcuacuucaacuacuccugcguguucagcgucgugaacgccaccgugaccgucaacgugacgacccacaacggccgcguggucaacuacaccgugugcgacgacugcaacggguacaccgacaacaucuucuccgugcagcaggacggccggaucccgaacggguuccccuucaacaacugguuccugcugacgaacggcagcacccucgucgacggcgugagccgccuguaccagccccugcggcugaccugccuguggcccgugccggggcugaaguccagcaccggcuucgucuacuucaacgccacgggguccgacgugaacugcaacggcuaccagcacaacagcgucguggacgugaugcgcuacaaccucaacuucuccgccaacagccuggacaaccugaaguccggcgucaucguguucaagacccuccaguacgacgugcuguucuacugcagcaacuccagcuccgggguccuggacaccaccauccccuucggccccagcucccagcccuacuacugcuucaucaacagcacgaucaacaccacccacguguccaccuucguggggauccucccgcccacgguccgggagaucgugguggcccgcaccggccaguucuacaucaacggguucaaguacuucgaccugggcuucaucgaggcggucaacuucaacgugaccaccgccagcgccacggacuucuggaccguggccuucgccaccuucgucgacgugcuggugaacgucuccgcgaccaacauccagaaccuccuguacugcgacagccccuucgagaagcugcagugcgagcaccuccaguucggccugcaggacggguucuacuccgccaacuuccuggacgacaacgugcuccccgagaccuacguggcccugccgaucuacuaccagcacacggacaucaacuucaccgccaccgccagcuucggcgggagcugcuacgucugcaagccccaccaggugaacaucucccugaacggcaacaccagcgugugcguccggacgucccacuucagcauccgcuacaucuacaaccgggugaaguccgggagccccggcgacuccagcuggcacaucuaccugaaguccgggaccugccccuucagcuucuccaagcucaacaacuuccagaaguucaagaccaucugcuucagcaccguggaggucccgggguccugcaacuucccccuggaggcgacguggcacuacaccagcuacaccaucgugggcgcccuguacgugaccugguccgaggggaacagcaucacgggcguccccuaccccguguccgggauccgcgaguucagcaaccucgugcugaacaacugcaccaaguacaacaucuacgacuacgucggcaccggcaucauccggagcuccaaccagagccuggccgggggcaucaccuacguguccaacagcgggaaccuccugggcuucaagaacguguccacgggcaacaucuucaucgucaccccgugcaaccagcccgaccagguggccguguaccagcagagcaucaucggggccaugaccgcggucaacgagucccgcuacggccugcagaaccuccugcagcugcccaacuucuacuacgugagcaacgggggcaacaacugcaccacggccgugaugaccuacuccaacuucgggaucugcgccgacggcagccucauccccguccggccgcgcaacuccagcgacaacggcaucuccgccaucaucaccgcgaaccugagcauccccuccaacuggaccacgagcguccagguggaguaccugcagaucaccuccacccccaucgugguggacugcgccaccuacgugugcaacgggaacccgcggugcaagaaccuccugaagcaguacacgagcgccugcaagaccaucgaggacgcccugcgccucuccgcccaccuggagaccaacgacgucagcagcaugcugaccuucgacuccaacgcguucagccucgccaacgugacguccuucggcgacuacaaccugagcuccgugcugccccagcggaacauccgcagcucccgcaucgccgggcggagcgcccucgaggaccugcuguucuccaaggucgugaccagcggccucgggaccgucgacguggacuacaaguccugcaccaagggccugagcaucgccgaccuggcgugcgcccaguacuacaacggcaucauggugcuccccggggucgccgacgccgagcgcauggccauguacacgggcucccugaucgggggcauggugcugggcggccucaccagcgcggccgccauccccuucucccuggcccugcaggcgcggcucaacuacguggcccugcagaccgacguccugcaggagaaccagaagauccucgccgccagcuucaacaaggccaucaacaacaucguggcguccuucagcuccgugaacgacgccaucacccagaccgccgaggccauccacacggucaccaucgcccugaacaagauccaggacguggugaaccagcagggcagcgcgcugaaccaccucaccagccagcugcgccacaacuuccaggccaucuccaacagcauccaggccaucuacgaccggcuggacccgccccaggccgaccagcaggucgaccgccucaucaccgggcggcuggccgcgcugaacgccuucgugucccaggugcucaacaaguacacggagguccgcggcagccggcgccuggcccagcagaagaucaacgagugcgugaagucccagagcaaccgguacggguucugcggcaacgggacccacaucuucuccaucgugaacagcgcccccgacggccuccuguuccugcacaccguccugcuccccaccgacuacaagaacgugaaggcgugguccggcaucugcguggacgggaucuacggcuacguccugcgccagccgaaccuggugcucuacagcgacaacgggguguuccgggucacgucccgcaucauguuccagccccggcugcccgugcugagcgacuucgugcagaucuacaacugcaacgucaccuucgugaacaucucccgcguggagcuccacaccgucauccccgacuacguggacgugaacaagacccugcaggaguucgcccagaaccugccgaaguacgucaagcccaacuucgaccucacgcccuucaaccugaccuaccugaaccucagcuccgagcugaagcagcuggaggccaagaccgccagccucuuccagaccacgguggagcugcagggccugaucgaccagaucaacuccaccuacguggaccucaagcugcugaaccgguucgagaacugaggacuaguuauaagacugacuagcccgaugggccucccaacgggcccuccuccccuccuugcaccgagauuaauaaaaaaaaaaaaaaaaaaaaaaaaaaaaaaaaaaaaaaaaaaaaaaaaaaaaaaaaaaaaaaaaugcaucccccccccccccccccccccccccccccccaaaggcucuuuucagagccaccagaauu

SEQ ID NO: 15155 - RNA, 4174 nt, Artificial Sequence
  HCoV/NL63/RPTEC/2004__AFV53148.1 spike protein mRNA gc (variant)
aggagaaagcuuaccaugaagcuguuccucauccugcuggugcucccccuggccagcugcuucuucacgugcaacuccaacgccaaccugagcaugcuccagcugggcgucccggacaacuccagcaccaucgugaccgggcugcuccccacccacugguucugcgcgaaccaguccaccagcguguacuccgccaacggcuucuucuacaucgacgucgggaaccaccgcagcgccuucgcccugcacaccggcuacuacgacgccaaccaguacuacaucuacgugacgaacgagaucgggcugaacgcguccgugacccucaagaucugcaaguucagccggaacaccaccuucgacuuccuguccaacgccagcuccagcuucgacugcaucgucaaccuccucuucacggagcagcugggcgcgccccugggcaucaccaucuccggggagaccgugcgccuccaccuguacaacgugacccggacguucuacguccccgccgccuacaagcugaccaagcucagcgugaagugcuacuucaacuacuccugcguguucagcgucgugaacgccaccgugaccgucaacgugacgacccacaacggccgcguggucaacuacaccgugugcgacgacugcaacggguacaccgacaacaucuucuccgugcagcaggacggccggaucccgaacggguuccccuucaacaacugguuccugcugacgaacggcagcacccucgucgacggcgugagccgccuguaccagccccugcggcugaccugccuguggcccgugccggggcugaaguccagcaccggcuucgucuacuucaacgccacgggguccgacgugaacugcaacggcuaccagcacaacagcgucguggacgugaugcgcuacaaccucaacuucuccgccaacagccuggacaaccugaaguccggcgucaucguguucaagacccuccaguacgacgugcuguucuacugcagcaacuccagcuccgggguccuggacaccaccauccccuucggccccagcucccagcccuacuacugcuucaucaacagcacgaucaacaccacccacguguccaccuucguggggauccucccgcccacgguccgggagaucgugguggcccgcaccggccaguucuacaucaacggguucaaguacuucgaccugggcuucaucgaggcggucaacuucaacgugaccaccgccagcgccacggacuucuggaccguggccuucgccaccuucgucgacgugcuggugaacgucuccgcgaccaacauccagaaccuccuguacugcgacagccccuucgagaagcugcagugcgagcaccuccaguucggccugcaggacggguucuacuccgccaacuuccuggacgacaacgugcuccccgagaccuacguggcccugccgaucuacuaccagcacacggacaucaacuucaccgccaccgccagcuucggcgggagcugcuacgucugcaagccccaccaggugaacaucucccugaacggcaacaccagcgugugcguccggacgucccacuucagcauccgcuacaucuacaaccgggugaaguccgggagccccggcgacuccagcuggcacaucuaccugaaguccgggaccugccccuucagcuucuccaagcucaacaacuuccagaaguucaagaccaucugcuucagcaccguggaggucccgggguccugcaacuucccccuggaggcgacguggcacuacaccagcuacaccaucgugggcgcccuguacgugaccugguccgaggggaacagcaucacgggcguccccuaccccguguccgggauccgcgaguucagcaaccucgugcugaacaacugcaccaaguacaacaucuacgacuacgucggcaccggcaucauccggagcuccaaccagagccuggccgggggcaucaccuacguguccaacagcgggaaccuccugggcuucaagaacguguccacgggcaacaucuucaucgucaccccgugcaaccagcccgaccagguggccguguaccagcagagcaucaucggggccaugaccgcggucaacgagucccgcuacggccugcagaaccuccugcagcugcccaacuucuacuacgugagcaacgggggcaacaacugcaccacggccgugaugaccuacuccaacuucgggaucugcgccgacggcagccucauccccguccggccgcgcaacuccagcgacaacggcaucuccgccaucaucaccgcgaaccugagcauccccuccaacuggaccacgagcguccagguggaguaccugcagaucaccuccacccccaucgugguggacugcgccaccuacgugugcaacgggaacccgcggugcaagaaccuccugaagcaguacacgagcgccugcaagaccaucgaggacgcccugcgccucuccgcccaccuggagaccaacgacgucagcagcaugcugaccuucgacuccaacgcguucagccucgccaacgugacguccuucggcgacuacaaccugagcuccgugcugccccagcggaacauccgcagcucccgcaucgccgggcggagcgcccucgaggaccugcuguucuccaaggucgugaccagcggccucgggaccgucgacguggacuacaaguccugcaccaagggccugagcaucgccgaccuggcgugcgcccaguacuacaacggcaucauggugcuccccggggucgccgacgccgagcgcauggccauguacacgggcucccugaucgggggcauggugcugggcggccucaccagcgcggccgccauccccuucucccuggcccugcaggcgcggcucaacuacguggcccugcagaccgacguccugcaggagaaccagaagauccucgccgccagcuucaacaaggccaucaacaacaucguggcguccuucagcuccgugaacgacgccaucacccagaccgccgaggccauccacacggucaccaucgcccugaacaagauccaggacguggugaaccagcagggcagcgcgcugaaccaccucaccagccagcugcgccacaacuuccaggccaucuccaacagcauccaggccaucuacgaccggcuggacccgccccaggccgaccagcaggucgaccgccucaucaccgggcggcuggccgcgcugaacgccuucgugucccaggugcucaacaaguacacggagguccgcggcagccggcgccuggcccagcagaagaucaacgagugcgugaagucccagagcaaccgguacggguucugcggcaacgggacccacaucuucuccaucgugaacagcgcccccgacggccuccuguuccugcacaccguccugcuccccaccgacuacaagaacgugaaggcgugguccggcaucugcguggacgggaucuacggcuacguccugcgccagccgaaccuggugcucuacagcgacaacgggguguuccgggucacgucccgcaucauguuccagccccggcugcccgugcugagcgacuucgugcagaucuacaacugcaacgucaccuucgugaacaucucccgcguggagcuccacaccgucauccccgacuacguggacgugaacaagacccugcaggaguucgcccagaaccugccgaaguacgucaagcccaacuucgaccucacgcccuucaaccugaccuaccugaaccucagcuccgagcugaagcagcuggaggccaagaccgccagccucuuccagaccacgguggagcugcagggccugaucgaccagaucaacuccaccuacguggaccucaagcugcugaaccgguucgagaacggcggguacauccccgaggccccgcgcgacggccaggcguacguccggaaggacggggagugggugcuccugagcaccuucugaggacuaguuauaagacugacuagcccgaugggccucccaacgggcccuccuccccuccuugcaccgagauuaauaaaaaaaaaaaaaaaaaaaaaaaaaaaaaaaaaaaaaaaaaaaaaaaaaaaaaaaaaaaaaaaaugcaucccccccccccccccccccccccccccccccaaaggcucuuuucagagccaccagaauu

SEQ ID NO: 15156 - RNA, 3988 nt, Artificial Sequence
  Bat SARS-like CoV/WIV1__AGZ48828.1 spike protein mRNA gc (1-1256)
aggagaaagcuuaccaugaagcugcucgugcuggucuucgccacccuggugagcuccuacaccaucgagaagugccucgacuucgacgaccgcacgcccccggccaacacccaguuccugagcucccaccggggcguguacuaccccgacgacaucuuccgcagcaacguccugcaccucgugcaggaccacuuccugcccuucgacuccaacgugacccgguucaucaccuucgggcugaacuucgacaaccccaucaucccguucaaggacggcaucuacuucgcggccacggagaaguccaacgucauccgcggguggguguucggcagcaccaugaacaacaagagccaguccgugaucaucaugaacaacagcaccaaccucgucauccgggccugcaacuucgagcugugcgacaaccccuucuucguggugcugaaguccaacaacacccagauccccagcuacaucuucaacaacgccuucaacugcacguucgaguacgucuccaaggacuucaaccucgaccugggggagaagcccggcaacuucaaggaccugcgcgaguucguguuccggaacaaggacggcuuccuccacguguacagcggguaccagccgaucuccgccgcgagcggccugcccaccggguucaacgcccugaagcccaucuucaagcucccccugggcaucaacaucaccaacuuccgcacccugcucacggccuucccgccccggcccgacuacugggggaccuccgccgcggccuacuucgucggcuaccugaagcccaccaccuucaugcugaaguacgacgagaacggcacgaucaccgacgccguggacugcagccagaacccgcucgccgagcugaagugcuccgucaagagcuucgagaucgacaaggggaucuaccagaccagcaacuuccgcguggcccccuccaaggagguggugcgguuccccaacaucaccaaccugugccccuucggcgaggucuucaacgcgacgaccuucccgagcguguacgccugggagcgcaagcggaucuccaacugcguggccgacuacagcguccucuacaacuccaccagcuucuccaccuucaagugcuacggggugagcgccacgaagcugaacgaccugugcuucuccaacgucuacgccgacagcuucguggugaagggcgacgacguccgccagaucgcgcccggccagaccggggugaucgccgacuacaacuacaagcuccccgacgacuucaccggcugcgugcuggccuggaacacccggaacaucgacgccacgcagaccgggaacuacaacuacaaguaccgcucccugcggcacggcaagcuccgccccuucgagcgggacaucagcaacgucccguucucccccgacgggaagcccugcacgcccccggccuucaacugcuacuggccccugaacgacuacggcuucuacaucaccaacggcaucggguaccagcccuaccgcguggugguccugagcuucgagcuccugaacgcgccggccaccgugugcggccccaagcuguccaccgaccucaucaagaaccagugcgugaacuucaacuucaacgggcugaccggcaccgggguccugacgcccagcuccaagcgguuccagcccuuccagcaguucggccgcgacgugagcgacuucaccgacuccgugcgcgacccgaagaccagcgagauccucgacaucagccccugcuccuucggcggggucagcgugaucacccccggcaccaacacguccagcgagguggccguccuguaccaggacgugaacugcaccgacgugcccgucgccauccacgccgaccagcugaccccguccuggcgggugcacagcaccgggaacaacguguuccagacgcaggcgggcugccucaucggggccgagcacgucgacaccuccuacgagugcgacauccccaucggcgccggcaucugcgccagcuaccacaccguguccagccugcgcuccaccagccagaaguccaucguggcguacacgaugagccugggggccgacuccagcaucgccuacuccaacaacaccaucgccauccccaccaacuucagcaucagcaucaccacggaggucaugcccguguccauggccaagaccagcguggacugcaacauguacaucugcggcgacuccaccgagugcgcgaaccugcuccugcaguacgggagcuucugcacccagcugaaccgggcccucuccggcaucgccgucgagcaggaccgcaacacgcgggagguguucgcccaggugaagcagauguacaagaccccgacccugaaggacuucggcggguucaacuucagccagauccugcccgacccccucaagcccaccaagcgcuccuucaucgaggaccugcuguucaacaaggucacgcucgccgacgcgggcuucaugaagcaguacggggagugccugggcgacaucaacgcccgggaccugaucugcgcccagaaguucaacgggcucaccgugcugccgccccugcucaccgacgacaugaucgccgccuacaccgcggcccuggugagcggcacggccaccgccggcuggaccuucggggcgggcgccgcccugcagauccccuucgccaugcagauggccuaccgcuucaacgggaucggcgucacccagaacgugcucuacgagaaccagaagcagaucgcgaaccaguucaacaaggccaucucccagauccaggagagccugacgaccaccuccaccgcccuggggaagcuccaggacguggucaaccagaacgcccaggcccugaacacgcuggugaagcagcucagcuccaacuucggcgcgaucagcuccgugcugaacgacauccugagccggcucgacaaggucgaggccgaggugcagaucgaccgccugaucaccggccggcugcagucccuccagaccuacgugacccagcagcugauccgcgccgccgagauccgggccagcgcgaaccuggccgccacgaagauguccgagugcguccucgggcagagcaagcgcguggacuucugcggcaagggguaccaccugaugagcuucccccaggccgcgccgcacggcguggucuuccugcacgugaccuacgugcccucccaggagcggaacuucaccaccgcccccgccaucugccacgaggggaaggccuacuucccccgcgagggcgucuucguguucaacggcaccagcugguucaucacgcagcggaacuucuucuccccgcagaucaucaccaccgacaacaccuucgucagcggguccugcgacguggugaucggcaucaucaacaacacggucuacgacccccuccagcccgagcuggacagcuucaaggaggagcuggacaaguacuucaagaaccacaccuccccggacguggaccucggggacaucagcggcaucaacgccuccguggucaacauccagaaggagaucgaccgccugaacgagguggcgaagaaccugaacgagagccucaucgaccugcaggagcuggggaaguacgagcaguacaucaaguggcccugguacguguggcucggcuucaucgccggccugaucgccaucgucauggugaccauccugcucugcugcaugaccuccugcugcagcugccugaagggggccugcuccugcggcagcugcugcaaguucgacgaggacgacuccgagcccgugcugaagggggucaagcuccacuacacgugaggacuaguuauaagacugacuagcccgaugggccucccaacgggcccuccuccccuccuugcaccgagauuaauaaaaaaaaaaaaaaaaaaaaaaaaaaaaaaaaaaaaaaaaaaaaaaaaaaaaaaaaaaaaaaaaugcaucccccccccccccccccccccccccccccccaaaggcucuuuucagagccaccagaauu

SEQ ID NO: 15157 - RNA, 3988 nt, Artificial Sequence
  Bat SARS-like CoV/WIV1__AGZ48828.1 spike protein mRNA gc (1-1256)(K969P_V970P)
aggagaaagcuuaccaugaagcugcucgugcuggucuucgccacccuggugagcuccuacaccaucgagaagugccucgacuucgacgaccgcacgcccccggccaacacccaguuccugagcucccaccggggcguguacuaccccgacgacaucuuccgcagcaacguccugcaccucgugcaggaccacuuccugcccuucgacuccaacgugacccgguucaucaccuucgggcugaacuucgacaaccccaucaucccguucaaggacggcaucuacuucgcggccacggagaaguccaacgucauccgcggguggguguucggcuccaccaugaacaacaagagccaguccgugaucaucaugaacaacagcaccaaccucgucauccgggccugcaacuucgagcugugcgacaaccccuucuucguggugcugaaguccaacaacacccagauccccagcuacaucuucaacaacgccuucaacugcacguucgaguacgucuccaaggacuucaaccucgaccugggggagaagcccggcaacuucaaggaccugcgcgaguucguguuccggaacaaggacggcuuccuccacguguacagcggguaccagccgaucuccgccgcgagcggccugcccaccggguucaacgcccugaagcccaucuucaagcucccccugggcaucaacaucaccaacuuccgcacccugcucacggccuucccgccccggcccgacuacugggggaccuccgccgcggccuacuucgucggcuaccugaagcccaccaccuucaugcugaaguacgacgagaacggcacgaucaccgacgccguggacugcagccagaacccgcucgccgagcugaagugcuccgucaagagcuucgagaucgacaaggggaucuaccagaccagcaacuuccgcguggcccccuccaaggagguggugcgguuccccaacaucaccaaccugugccccuucggcgaggucuucaacgcgacgaccuucccgagcguguacgccugggagcgcaagcggaucuccaacugcguggccgacuacagcguccucuacaacuccaccagcuucuccaccuucaagugcuacggggugagcgccacgaagcugaacgaccugugcuucuccaacgucuacgccgacagcuucguggugaagggcgacgacguccgccagaucgcgcccggccagaccggggugaucgccgacuacaacuacaagcuccccgacgacuucaccggcugcgugcuggccuggaacacccggaacaucgacgccacgcagaccgggaacuacaacuacaaguaccgcucccugcggcacggcaagcuccgccccuucgagcgggacaucagcaacgucccguucucccccgacgggaagcccugcacgcccccggccuucaacugcuacuggccccugaacgacuacggcuucuacaucaccaacggcaucggguaccagcccuaccgcguggugguccugagcuucgagcuccugaacgcgccggccaccgugugcggccccaagcuguccaccgaccucaucaagaaccagugcgugaacuucaacuucaacgggcugaccggcaccgggguccugacgcccagcuccaagcgguuccagcccuuccagcaguucggccgcgacgugagcgacuucaccgacuccgugcgcgacccgaagaccagcgagauccucgacaucagccccugcuccuucggcggggucagcgugaucacccccggcaccaacacguccagcgagguggccguccuguaccaggacgugaacugcaccgacgugcccgucgccauccacgccgaccagcugaccccguccuggcgggugcacagcaccgggaacaacguguuccagacgcaggcgggcugccucaucggggccgagcacgucgacaccuccuacgagugcgacauccccaucggcgccggcaucugcgccagcuaccacaccguguccagccugcgcuccaccagccagaaguccaucguggcguacacgaugagccugggggccgacuccagcaucgccuacuccaacaacaccaucgccauccccaccaacuucagcaucagcaucaccacggaggucaugcccguguccauggccaagaccagcguggacugcaacauguacaucugcggcgacuccaccgagugcgcgaaccugcuccugcaguacgggagcuucugcacccagcugaaccgggcccucuccggcaucgccgucgagcaggaccgcaacacgcgggagguguucgcccaggugaagcagauguacaagaccccgacccugaaggacuucggcggguucaacuucagccagauccugcccgacccccucaagcccaccaagcgcuccuucaucgaggaccugcuguucaacaaggucacgcucgccgacgcgggcuucaugaagcaguacggggagugccugggcgacaucaacgcccgggaccugaucugcgcccagaaguucaacgggcucaccgugcugccgccccugcucaccgacgacaugaucgccgccuacaccgcggcccuggugagcggcacggccaccgccggcuggaccuucggggcgggcgccgcccugcagauccccuucgccaugcagauggccuaccgcuucaacgggaucggcgucacccagaacgugcucuacgagaaccagaagcagaucgcgaaccaguucaacaaggccaucucccagauccaggagagccugacgaccaccuccaccgcccuggggaagcuccaggacguggucaaccagaacgcccaggcccugaacacgcuggugaagcagcucagcuccaacuucggcgcgaucagcuccgugcugaacgacauccugagccggcucgacccgcccgaggccgagguccagaucgaccgccugaucaccggccggcugcagucccuccagaccuacgugacccagcagcugauccgcgccgccgagauccgggccagcgcgaaccuggccgccacgaagauguccgagugcgugcucgggcagagcaagcgcgucgacuucugcggcaagggguaccaccugaugagcuucccccaggccgcgccccacggcgugguguuccugcacgucaccuacgugcccucccaggagcggaacuucaccaccgccccggccaucugccacgaggggaaggccuacuucccccgcgagggcguguucgucuucaacggcaccagcugguucaucacgcagcggaacuucuucagcccccagaucaucaccaccgacaacaccuucgugagcggguccugcgacgucgugaucggcaucaucaacaacacgguguacgacccgcuccagcccgagcuggacagcuucaaggaggagcuggacaaguacuucaagaaccacaccucccccgacgucgaccucggggacaucagcggcaucaacgccuccguggugaacauccagaaggagaucgaccgccugaacgaggucgcgaagaaccugaacgagagccucaucgaccugcaggagcuggggaaguacgagcaguacaucaaguggcccugguacguguggcucggcuucaucgccggccugaucgccaucgugauggucaccauccugcucugcugcaugaccuccugcugcagcugccugaagggggccugcuccugcggcagcugcugcaaguucgacgaggacgacuccgagccggugcugaagggggugaagcuccacuacacgugaggacuaguuauaagacugacuagcccgaugggccucccaacgggcccuccuccccuccuugcaccgagauuaauaaaaaaaaaaaaaaaaaaaaaaaaaaaaaaaaaaaaaaaaaaaaaaaaaaaaaaaaaaaaaaaaugcaucccccccccccccccccccccccccccccccaaaggcucuuuucagagccaccagaauu

SEQ ID NO: 15158 - RNA, 3793 nt, Artificial Sequence
  Bat SARS-like CoV/WIV1__AGZ48828.1 spike protein mRNA gc (variant)
aggagaaagcuuaccaugaagcugcucgugcuggucuucgccacccuggugagcuccuacaccaucgagaagugccucgacuucgacgaccgcacgcccccggccaacacccaguuccugagcucccaccggggcguguacuaccccgacgacaucuuccgcagcaacguccugcaccucgugcaggaccacuuccugcccuucgacuccaacgugacccgguucaucaccuucgggcugaacuucgacaaccccaucaucccguucaaggacggcaucuacuucgcggccacggagaaguccaacgucauccgcggguggguguucggcuccaccaugaacaacaagagccaguccgugaucaucaugaacaacagcaccaaccucgucauccgggccugcaacuucgagcugugcgacaaccccuucuucguggugcugaaguccaacaacacccagauccccagcuacaucuucaacaacgccuucaacugcacguucgaguacgucuccaaggacuucaaccucgaccugggggagaagcccggcaacuucaaggaccugcgcgaguucguguuccggaacaaggacggcuuccuccacguguacagcggguaccagccgaucuccgccgcgagcggccugcccaccggguucaacgcccugaagcccaucuucaagcucccccugggcaucaacaucaccaacuuccgcacccugcucacggccuucccgccccggcccgacuacugggggaccuccgccgcggccuacuucgucggcuaccugaagcccaccaccuucaugcugaaguacgacgagaacggcacgaucaccgacgccguggacugcagccagaacccgcucgccgagcugaagugcuccgucaagagcuucgagaucgacaaggggaucuaccagaccagcaacuuccgcguggcccccuccaaggagguggugcgguuccccaacaucaccaaccugugccccuucggcgaggucuucaacgcgacgaccuucccgagcguguacgccugggagcgcaagcggaucuccaacugcguggccgacuacagcguccucuacaacuccaccagcuucuccaccuucaagugcuacggggugagcgccacgaagcugaacgaccugugcuucuccaacgucuacgccgacagcuucguggugaagggcgacgacguccgccagaucgcgcccggccagaccggggugaucgccgacuacaacuacaagcuccccgacgacuucaccggcugcgugcuggccuggaacacccggaacaucgacgccacgcagaccgggaacuacaacuacaaguaccgcucccugcggcacggcaagcuccgccccuucgagcgggacaucagcaacgucccguucucccccgacgggaagcccugcacgcccccggccuucaacugcuacuggccccugaacgacuacggcuucuacaucaccaacggcaucggguaccagcccuaccgcguggugguccugagcuucgagcuccugaacgcgccggccaccgugugcggccccaagcuguccaccgaccucaucaagaaccagugcgugaacuucaacuucaacgggcugaccggcaccgggguccugacgcccagcuccaagcgguuccagcccuuccagcaguucggccgcgacgugagcgacuucaccgacuccgugcgcgacccgaagaccagcgagauccucgacaucagccccugcuccuucggcggggucagcgugaucacccccggcaccaacacguccagcgagguggccguccuguaccaggacgugaacugcaccgacgugcccgucgccauccacgccgaccagcugaccccguccuggcgggugcacagcaccgggaacaacguguuccagacgcaggcgggcugccucaucggggccgagcacgucgacaccuccuacgagugcgacauccccaucggcgccggcaucugcgccagcuaccacaccguguccagccugcgcuccaccagccagaaguccaucguggcguacacgaugagccugggggccgacuccagcaucgccuacuccaacaacaccaucgccauccccaccaacuucagcaucagcaucaccacggaggucaugcccguguccauggccaagaccagcguggacugcaacauguacaucugcggcgacuccaccgagugcgcgaaccugcuccugcaguacgggagcuucugcacccagcugaaccgggcccucuccggcaucgccgucgagcaggaccgcaacacgcgggagguguucgcccaggugaagcagauguacaagaccccgacccugaaggacuucggcggguucaacuucagccagauccugcccgacccccucaagcccaccaagcgcuccuucaucgaggaccugcuguucaacaaggucacgcucgccgacgcgggcuucaugaagcaguacggggagugccugggcgacaucaacgcccgggaccugaucugcgcccagaaguucaacgggcucaccgugcugccgccccugcucaccgacgacaugaucgccgccuacaccgcggcccuggugagcggcacggccaccgccggcuggaccuucggggcgggcgccgcccugcagauccccuucgccaugcagauggccuaccgcuucaacgggaucggcgucacccagaacgugcucuacgagaaccagaagcagaucgcgaaccaguucaacaaggccaucucccagauccaggagagccugacgaccaccuccaccgcccuggggaagcuccaggacguggucaaccagaacgcccaggcccugaacacgcuggugaagcagcucagcuccaacuucggcgcgaucagcuccgugcugaacgacauccugagccggcucgacccgcccgaggccgagguccagaucgaccgccugaucaccggccggcugcagucccuccagaccuacgugacccagcagcugauccgcgccgccgagauccgggccagcgcgaaccuggccgccacgaagauguccgagugcgugcucgggcagagcaagcgcgucgacuucugcggcaagggguaccaccugaugagcuucccccaggccgcgccccacggcgugguguuccugcacgucaccuacgugcccucccaggagcggaacuucaccaccgccccggccaucugccacgaggggaaggccuacuucccccgcgagggcguguucgucuucaacggcaccagcugguucaucacgcagcggaacuucuucagcccccagaucaucaccaccgacaacaccuucgugagcggguccugcgacgucgugaucggcaucaucaacaacacgguguacgacccgcuccagcccgagcuggacagcuucaaggaggagcuggacaaguacuucaagaaccacaccucccccgacgucgaccucggggacaucagcggcaucaacgccuccguggugaacauccagaaggagaucgaccgccugaacgaggucgcgaagaaccugaacgagagccucaucgaccugcaggagcuggggaaguacgagcagugaggacuaguuauaagacugacuagcccgaugggccucccaacgggcccuccuccccuccuugcaccgagauuaauaaaaaaaaaaaaaaaaaaaaaaaaaaaaaaaaaaaaaaaaaaaaaaaaaaaaaaaaaaaaaaaaugcaucccccccccccccccccccccccccccccccaaaggcucuuuucagagccaccagaauu

SEQ ID NO: 15159 - RNA, 3874 nt, Artificial Sequence
  Bat SARS-like CoV/WIV1__AGZ48828.1 spike protein mRNA gc (variant)
aggagaaagcuuaccaugaagcugcucgugcuggucuucgccacccuggugagcuccuacaccaucgagaagugccucgacuucgacgaccgcacgcccccggccaacacccaguuccugagcucccaccggggcguguacuaccccgacgacaucuuccgcagcaacguccugcaccucgugcaggaccacuuccugcccuucgacuccaacgugacccgguucaucaccuucgggcugaacuucgacaaccccaucaucccguucaaggacggcaucuacuucgcggccacggagaaguccaacgucauccgcggguggguguucggcuccaccaugaacaacaagagccaguccgugaucaucaugaacaacagcaccaaccucgucauccgggccugcaacuucgagcugugcgacaaccccuucuucguggugcugaaguccaacaacacccagauccccagcuacaucuucaacaacgccuucaacugcacguucgaguacgucuccaaggacuucaaccucgaccugggggagaagcccggcaacuucaaggaccugcgcgaguucguguuccggaacaaggacggcuuccuccacguguacagcggguaccagccgaucuccgccgcgagcggccugcccaccggguucaacgcccugaagcccaucuucaagcucccccugggcaucaacaucaccaacuuccgcacccugcucacggccuucccgccccggcccgacuacugggggaccuccgccgcggccuacuucgucggcuaccugaagcccaccaccuucaugcugaaguacgacgagaacggcacgaucaccgacgccguggacugcagccagaacccgcucgccgagcugaagugcuccgucaagagcuucgagaucgacaaggggaucuaccagaccagcaacuuccgcguggcccccuccaaggagguggugcgguuccccaacaucaccaaccugugccccuucggcgaggucuucaacgcgacgaccuucccgagcguguacgccugggagcgcaagcggaucuccaacugcguggccgacuacagcguccucuacaacuccaccagcuucuccaccuucaagugcuacggggugagcgccacgaagcugaacgaccugugcuucuccaacgucuacgccgacagcuucguggugaagggcgacgacguccgccagaucgcgcccggccagaccggggugaucgccgacuacaacuacaagcuccccgacgacuucaccggcugcgugcuggccuggaacacccggaacaucgacgccacgcagaccgggaacuacaacuacaaguaccgcucccugcggcacggcaagcuccgccccuucgagcgggacaucagcaacgucccguucucccccgacgggaagcccugcacgcccccggccuucaacugcuacuggccccugaacgacuacggcuucuacaucaccaacggcaucggguaccagcccuaccgcguggugguccugagcuucgagcuccugaacgcgccggccaccgugugcggccccaagcuguccaccgaccucaucaagaaccagugcgugaacuucaacuucaacgggcugaccggcaccgggguccugacgcccagcuccaagcgguuccagcccuuccagcaguucggccgcgacgugagcgacuucaccgacuccgugcgcgacccgaagaccagcgagauccucgacaucagccccugcuccuucggcggggucagcgugaucacccccggcaccaacacguccagcgagguggccguccuguaccaggacgugaacugcaccgacgugcccgucgccauccacgccgaccagcugaccccguccuggcgggugcacagcaccgggaacaacguguuccagacgcaggcgggcugccucaucggggccgagcacgucgacaccuccuacgagugcgacauccccaucggcgccggcaucugcgccagcuaccacaccguguccagccugcgcuccaccagccagaaguccaucguggcguacacgaugagccugggggccgacuccagcaucgccuacuccaacaacaccaucgccauccccaccaacuucagcaucagcaucaccacggaggucaugcccguguccauggccaagaccagcguggacugcaacauguacaucugcggcgacuccaccgagugcgcgaaccugcuccugcaguacgggagcuucugcacccagcugaaccgggcccucuccggcaucgccgucgagcaggaccgcaacacgcgggagguguucgcccaggugaagcagauguacaagaccccgacccugaaggacuucggcggguucaacuucagccagauccugcccgacccccucaagcccaccaagcgcuccuucaucgaggaccugcuguucaacaaggucacgcucgccgacgcgggcuucaugaagcaguacggggagugccugggcgacaucaacgcccgggaccugaucugcgcccagaaguucaacgggcucaccgugcugccgccccugcucaccgacgacaugaucgccgccuacaccgcggcccuggugagcggcacggccaccgccggcuggaccuucggggcgggcgccgcccugcagauccccuucgccaugcagauggccuaccgcuucaacgggaucggcgucacccagaacgugcucuacgagaaccagaagcagaucgcgaaccaguucaacaaggccaucucccagauccaggagagccugacgaccaccuccaccgcccuggggaagcuccaggacguggucaaccagaacgcccaggcccugaacacgcuggugaagcagcucagcuccaacuucggcgcgaucagcuccgugcugaacgacauccugagccggcucgacccgcccgaggccgagguccagaucgaccgccugaucaccggccggcugcagucccuccagaccuacgugacccagcagcugauccgcgccgccgagauccgggccagcgcgaaccuggccgccacgaagauguccgagugcgugcucgggcagagcaagcgcgucgacuucugcggcaagggguaccaccugaugagcuucccccaggccgcgccccacggcgugguguuccugcacgucaccuacgugcccucccaggagcggaacuucaccaccgccccggccaucugccacgaggggaaggccuacuucccccgcgagggcguguucgucuucaacggcaccagcugguucaucacgcagcggaacuucuucagcccccagaucaucaccaccgacaacaccuucgugagcggguccugcgacgucgugaucggcaucaucaacaacacgguguacgacccgcuccagcccgagcuggacagcuucaaggaggagcuggacaaguacuucaagaaccacaccucccccgacgucgaccucggggacaucagcggcaucaacgccuccguggugaacauccagaaggagaucgaccgccugaacgaggucgcgaagaaccugaacgagagccucaucgaccugcaggagcuggggaaguacgagcagggcggcuacauccccgaggccccgcgggacgggcaggccuacgugcgcaaggacggcgagugggugcuccuguccaccuucugaggacuaguuauaagacugacuagcccgaugggccucccaacgggcccuccuccccuccuugcaccgagauuaauaaaaaaaaaaaaaaaaaaaaaaaaaaaaaaaaaaaaaaaaaaaaaaaaaaaaaaaaaaaaaaaaugcaucccccccccccccccccccccccccccccccaaaggcucuuuucagagccaccagaauu

SEQ ID NO: 15160 - RNA, 4042 nt, Artificial Sequence
  BatCoV/HKU9-1 BF_005I__YP_001039971.1 spike protein mRNA gc (1-1274)
aggagaaagcuuaccaugcugcucauccuggugcugggcgucagccucgccgccgcgucccgccccgagugcuucaacccgcgguucacccugacgccccugaaccacacccucaacuacaccagcaucaaggccaagguguccaacgugcugcugcccgaccccuacaucgccuacagcgggcagacccuccgccagaaccuguucauggccgacauguccaacaccauccuguacccggucacgccgcccgccaacggcgcgaacgggggcuucaucuacaacaccagcaucauccccguguccgccggccucuucgugaacaccuggauguaccggcagcccgccagcucccgcgccuacugccaggagcccuucggggucgcguucggcgacaccuucgagaacgaccggaucgccauccugaucauggcccccgacaaccuggggagcugguccgccguggcgccccgcaaccagacgaacaucuaccuccuggugugcagcaacgccacccugugcaucaacccgggcuucaaccggugggggcccgccggcuccuucaucgcccccgacgcccucgucgaccacagcaacuccugcuucgugaacaacaccuucagcgugaacaucuccaccagccgcaucucccuggccuuccuguucaaggacggggaccuccugaucuaccacagcggcuggcugcccacgagcaacuucgagcacggcuucucccgggggagccacccgaugaccuacuucaugucccuccccgucggcgggaaccugccccgcgcgcaguucuuccagagcaucgugcgguccaacgccaucgacaagggcgacggcaugugcaccaacuucgacgugaaccugcacgucgcccaccucaucaaccgcgaccugcuggugagcuacuucaacaacggguccguggccaacgccgcggacugcgccgacagcgccgccgaggagcucuacugcgucaccggcuccuucgacccgcccacggggguguacccccugagccgguaccgcgcccagguggcgggcuucguccgggugacccagcgcggguccuacugcaccccgcccuacagcgugcugcaggacccgccccagcccgucguguggcggcgcuacaugcucuacgacugcgucuucgacuucaccgugguggucgacucccugcccacgcaccagcugcagugcuacggcgugagcccccggcgccucgccuccaugugcuacggcagcgugacccuggacgucaugcggaucaacgagacccaccugaacaaccucuucaaccgcgugcccgacaccuucucccuguacaacuacgcccugcccgacaacuucuacgggugccuccacgccuucuaccugaacagcacggcgccguacgccguggccaaccgcuuccccaucaagcccggcgggcggcaguccaacagcgccuucaucgacaccgucaucaacgccgcgcacuacagccccuucuccuacguguacggccuggccgugaucacccucaagccggccgccgggagcaagcuggucugccccguggccaacgacaccguggucaucacggaccgcugcgugcaguacaaccuguacggcuacaccggcaccggggugcuguccaagaacaccagccucgucauccccgacggcaagguguucacggcguccagcaccgggaccaucaucggcguguccaucaacagcaccacguacuccaucaugcccugcgucaccgugccggugagcgucggguaccaccccaacuucgagcgggcccugcuguucaacggccucuccugcagccagcgcucccgggccgugaccgagcccgugagcguccugugguccgccagcgccaccgcgcaggacgccuucgacacccccuccggcugcguggugaacgucgagcugcgcaacacgaccaucgugaacacgugcgccaugccgaucgggaacagccucugcuucaucaacggcagcaucgccaccgcgaacgccgacucccugccccggcugcagcucgugaacuacgacccccuguacgacaacagcaccgccacccccaugaccccggucuacugggugaaggugcccaccaacuucacgcuguccgccaccgaggaguacauccagaccaccgcccccaagaucacgaucgacugcgcgcgcuaccucugcggggacagcucccggugccugaacguccugcuccacuacggcaccuucugcaacgacaucaacaaggcccugagccgcguguccaccauccuggacagcgcccuccugucccuggugaaggagcucagcaucaacacccgggacgaggucacgaccuucuccuucgacggcgacuacaacuucaccgggcugaugggcugccuggggcccaacugcggcgccaccacguaccgcagcgccuucuccgaccuccuguacgacaaggugcggaucaccgacccgggguucaugcagagcuaccagaagugcaucgacucccaguggggcggcagcauccgcgaccugcucugcacccagaccuacaacgggaucgcggugcugccgcccaucgucucccccgccaugcaggcccuguacacgagccuccuggugggcgccguggccuccagcggguacaccuucggcaucaccagcgcgggggucauccccuucgccacccagcugcaguuccggcucaacggcaucggcgugacgacccaggugcuggucgagaaccagaagcugaucgccuccagcuucaacaacgcccucgugaacauccagaagggguucaccgagaccuccaucgcgcugagcaagaugcaggacgugaucaaccagcacgccgcccagcugcacacgcucgucgugcagcugggcaacuccuucggggccaucagcuccagcaucaacgagaucuucucccgccuggagggccucgccgcgaacgccgaggucgaccggcugaucaacgggcgcaugauggugcugaacaccuacgugacccagcuccugauccaggccagcgaggccaaggcccagaacgcgcuggccgcccagaagaucuccgagugcgucaaggcccagagccuccggaacgacuucugcggcaacggcacccacgugcuguccaucccccagcuggcccccaacgggguccucuucauccacuacgcguacacgccgaccgaguacgccuucgugcagaccagcgccggccugugccacaacgggaccggcuacgcgccccgccaggggauguucgugcugcccaacaacaccaacauguggcacuucacgaccaugcaguucuacaaccccgugaacaucuccgccagcaacacccagguccucaccuccugcagcgugaacuacacguccgugaacuacaccguccuggagccgagcgugcccggcgacuacgacuuccagaaggaguucgacaaguucuacaagaaccugagcaccaucuucaacaacaccuucaaccccaacgacuucaacuucuccacgguggacgucaccgcccagaucaagagccuccacgacguggugaaccagcugaaccaguccuucaucgaccugaagaagcucaacgucuacgagaagaccaucaaguggcccugguacguguggcuggccaugaucgccggcaucguggggcugguccucgccgugaucaugcugaugugcaugaccaacugcugcagcugcuucaagggcaugugcgacugccgccggugcugcggguccuacgacagcuacgacgacguguacccggcgguccgcgugaacaagaagcggacggugugaggacuaguuauaagacugacuagcccgaugggccucccaacgggcccuccuccccuccuugcaccgagauuaauaaaaaaaaaaaaaaaaaaaaaaaaaaaaaaaaaaaaaaaaaaaaaaaaaaaaaaaaaaaaaaaaugcaucccccccccccccccccccccccccccccccaaaggcucuuuucagagccaccagaauu

SEQ ID NO: 15161 - RNA, 4042 nt, Artificial Sequence
  BatCoV/HKU9-1 BF_005I__YP_001039971.1 spike protein mRNA gc (1-1274)(G983P_L984P)
aggagaaagcuuaccaugcugcucauccuggugcugggcgucagccucgccgccgcgucccgccccgagugcuucaacccgcgguucacccugacgccccugaaccacacccucaacuacaccagcaucaaggccaagguguccaacgugcugcugcccgaccccuacaucgccuacagcgggcagacccuccgccagaaccuguucauggccgacauguccaacaccauccuguacccggucacgccgcccgccaacggcgcgaacgggggcuucaucuacaacaccagcaucauccccguguccgccggccucuucgugaacaccuggauguaccggcagcccgccagcucccgcgccuacugccaggagcccuucggggucgcguucggcgacaccuucgagaacgaccggaucgccauccugaucauggcccccgacaaccuggggagcugguccgccguggcgccccgcaaccagacgaacaucuaccuccuggugugcagcaacgccacccugugcaucaacccgggcuucaaccggugggggcccgccggcuccuucaucgcccccgacgcccucgucgaccacagcaacuccugcuucgugaacaacaccuucagcgugaacaucuccaccagccgcaucucccuggccuuccuguucaaggacggggaccuccugaucuaccacagcggcuggcugcccacgagcaacuucgagcacggcuucucccgggggagccacccgaugaccuacuucaugucccuccccgucggcgggaaccugccccgcgcgcaguucuuccagagcaucgugcgguccaacgccaucgacaagggcgacggcaugugcaccaacuucgacgugaaccugcacgucgcccaccucaucaaccgcgaccugcuggugagcuacuucaacaacggguccguggccaacgccgcggacugcgccgacagcgccgccgaggagcucuacugcgucaccggcuccuucgacccgcccacggggguguacccccugagccgguaccgcgcccagguggcgggcuucguccgggugacccagcgcggguccuacugcaccccgcccuacagcgugcugcaggacccgccccagcccgucguguggcggcgcuacaugcucuacgacugcgucuucgacuucaccgugguggucgacucccugcccacgcaccagcugcagugcuacggcgugagcccccggcgccucgccuccaugugcuacggcagcgugacccuggacgucaugcggaucaacgagacccaccugaacaaccucuucaaccgcgugcccgacaccuucucccuguacaacuacgcccugcccgacaacuucuacgggugccuccacgccuucuaccugaacagcacggcgccguacgccguggccaaccgcuuccccaucaagcccggcgggcggcaguccaacagcgccuucaucgacaccgucaucaacgccgcgcacuacagccccuucuccuacguguacggccuggccgugaucacccucaagccggccgccgggagcaagcuggucugccccguggccaacgacaccguggucaucacggaccgcugcgugcaguacaaccuguacggcuacaccggcaccggggugcuguccaagaacaccagccucgucauccccgacggcaagguguucacggcguccagcaccgggaccaucaucggcguguccaucaacagcaccacguacuccaucaugcccugcgucaccgugccggugagcgucggguaccaccccaacuucgagcgggcccugcuguucaacggccucuccugcagccagcgcucccgggccgugaccgagcccgugagcguccugugguccgccagcgccaccgcgcaggacgccuucgacacccccuccggcugcguggugaacgucgagcugcgcaacacgaccaucgugaacacgugcgccaugccgaucgggaacagccucugcuucaucaacggcagcaucgccaccgcgaacgccgacucccugccccggcugcagcucgugaacuacgacccccuguacgacaacagcaccgccacccccaugaccccggucuacugggugaaggugcccaccaacuucacgcuguccgccaccgaggaguacauccagaccaccgcccccaagaucacgaucgacugcgcgcgcuaccucugcggggacagcucccggugccugaacguccugcuccacuacggcaccuucugcaacgacaucaacaaggcccugagccgcguguccaccauccuggacagcgcccuccugucccuggugaaggagcucagcaucaacacccgggacgaggucacgaccuucuccuucgacggcgacuacaacuucaccgggcugaugggcugccuggggcccaacugcggcgccaccacguaccgcagcgccuucuccgaccuccuguacgacaaggugcggaucaccgacccgggguucaugcagagcuaccagaagugcaucgacucccaguggggcggcagcauccgcgaccugcucugcacccagaccuacaacgggaucgcggugcugccgcccaucgucucccccgccaugcaggcccuguacacgagccuccuggugggcgccguggccuccagcggguacaccuucggcaucaccagcgcgggggucauccccuucgccacccagcugcaguuccggcucaacggcaucggcgugacgacccaggugcuggucgagaaccagaagcugaucgccuccagcuucaacaacgcccucgugaacauccagaagggguucaccgagaccuccaucgcgcugagcaagaugcaggacgugaucaaccagcacgccgcccagcugcacacgcucgucgugcagcugggcaacuccuucggggccaucagcuccagcaucaacgagaucuucucccgccuggagccgcccgccgcgaacgccgaggucgaccggcucaucaacggccgcaugauggugcugaacaccuacgugacccagcugcucauccaggccagcgaggccaaggcccagaacgcgcuggccgcccagaagaucuccgagugcgucaaggcccagagccugcggaacgacuucugcgggaacggcacccacgugcucuccaucccccagcuggcccccaacggcgugcuguucauccacuacgcguacacgcccaccgaguacgccuucguccagaccagcgccgggcucugccacaacggcaccggguacgcgccccgccagggcauguucgugcugccgaacaacaccaacauguggcacuucacgaccaugcaguucuacaaccccgugaacaucuccgccagcaacacccagguccugaccuccugcagcgugaacuacacguccgugaacuacaccguccucgagcccagcgugcccggggacuacgacuuccagaaggaguucgacaaguucuacaagaaccugagcaccaucuucaacaacaccuucaacccgaacgacuucaacuucuccacgguggacgucaccgcccagaucaagagccugcacgacguggugaaccagcucaaccaguccuucaucgaccugaagaagcugaacgucuacgagaagaccaucaaguggcccugguacguguggcucgccaugaucgccggcaucgugggccugguccuggccgugaucaugcucaugugcaugaccaacugcugcagcugcuucaaggggaugugcgacugccgccggugcugcggcuccuacgacagcuacgacgacguguaccccgcgguccgcgugaacaagaagcggacggugugaggacuaguuauaagacugacuagcccgaugggccucccaacgggcccuccuccccuccuugcaccgagauuaauaaaaaaaaaaaaaaaaaaaaaaaaaaaaaaaaaaaaaaaaaaaaaaaaaaaaaaaaaaaaaaaaugcaucccccccccccccccccccccccccccccccaaaggcucuuuucagagccaccagaauu

SEQ ID NO: 15162 - RNA, 3841 nt, Artificial Sequence
  BatCoV/HKU9-1 BF_005I__YP_001039971.1 spike protein mRNA gc (variant)
aggagaaagcuuaccaugcugcucauccuggugcugggcgucagccucgccgccgcgucccgccccgagugcuucaacccgcgguucacccugacgccccugaaccacacccucaacuacaccagcaucaaggccaagguguccaacgugcugcugcccgaccccuacaucgccuacagcgggcagacccuccgccagaaccuguucauggccgacauguccaacaccauccuguacccggucacgccgcccgccaacggcgcgaacgggggcuucaucuacaacaccagcaucauccccguguccgccggccucuucgugaacaccuggauguaccggcagcccgccagcucccgcgccuacugccaggagcccuucggggucgcguucggcgacaccuucgagaacgaccggaucgccauccugaucauggcccccgacaaccuggggagcugguccgccguggcgccccgcaaccagacgaacaucuaccuccuggugugcagcaacgccacccugugcaucaacccgggcuucaaccggugggggcccgccggcuccuucaucgcccccgacgcccucgucgaccacagcaacuccugcuucgugaacaacaccuucagcgugaacaucuccaccagccgcaucucccuggccuuccuguucaaggacggggaccuccugaucuaccacagcggcuggcugcccacgagcaacuucgagcacggcuucucccgggggagccacccgaugaccuacuucaugucccuccccgucggcgggaaccugccccgcgcgcaguucuuccagagcaucgugcgguccaacgccaucgacaagggcgacggcaugugcaccaacuucgacgugaaccugcacgucgcccaccucaucaaccgcgaccugcuggugagcuacuucaacaacggguccguggccaacgccgcggacugcgccgacagcgccgccgaggagcucuacugcgucaccggcuccuucgacccgcccacggggguguacccccugagccgguaccgcgcccagguggcgggcuucguccgggugacccagcgcggguccuacugcaccccgcccuacagcgugcugcaggacccgccccagcccgucguguggcggcgcuacaugcucuacgacugcgucuucgacuucaccgugguggucgacucccugcccacgcaccagcugcagugcuacggcgugagcccccggcgccucgccuccaugugcuacggcagcgugacccuggacgucaugcggaucaacgagacccaccugaacaaccucuucaaccgcgugcccgacaccuucucccuguacaacuacgcccugcccgacaacuucuacgggugccuccacgccuucuaccugaacagcacggcgccguacgccguggccaaccgcuuccccaucaagcccggcgggcggcaguccaacagcgccuucaucgacaccgucaucaacgccgcgcacuacagccccuucuccuacguguacggccuggccgugaucacccucaagccggccgccgggagcaagcuggucugccccguggccaacgacaccguggucaucacggaccgcugcgugcaguacaaccuguacggcuacaccggcaccggggugcuguccaagaacaccagccucgucauccccgacggcaagguguucacggcguccagcaccgggaccaucaucggcguguccaucaacagcaccacguacuccaucaugcccugcgucaccgugccggugagcgucggguaccaccccaacuucgagcgggcccugcuguucaacggccucuccugcagccagcgcucccgggccgugaccgagcccgugagcguccugugguccgccagcgccaccgcgcaggacgccuucgacacccccuccggcugcguggugaacgucgagcugcgcaacacgaccaucgugaacacgugcgccaugccgaucgggaacagccucugcuucaucaacggcagcaucgccaccgcgaacgccgacucccugccccggcugcagcucgugaacuacgacccccuguacgacaacagcaccgccacccccaugaccccggucuacugggugaaggugcccaccaacuucacgcuguccgccaccgaggaguacauccagaccaccgcccccaagaucacgaucgacugcgcgcgcuaccucugcggggacagcucccggugccugaacguccugcuccacuacggcaccuucugcaacgacaucaacaaggcccugagccgcguguccaccauccuggacagcgcccuccugucccuggugaaggagcucagcaucaacacccgggacgaggucacgaccuucuccuucgacggcgacuacaacuucaccgggcugaugggcugccuggggcccaacugcggcgccaccacguaccgcagcgccuucuccgaccuccuguacgacaaggugcggaucaccgacccgggguucaugcagagcuaccagaagugcaucgacucccaguggggcggcagcauccgcgaccugcucugcacccagaccuacaacgggaucgcggugcugccgcccaucgucucccccgccaugcaggcccuguacacgagccuccuggugggcgccguggccuccagcggguacaccuucggcaucaccagcgcgggggucauccccuucgccacccagcugcaguuccggcucaacggcaucggcgugacgacccaggugcuggucgagaaccagaagcugaucgccuccagcuucaacaacgcccucgugaacauccagaagggguucaccgagaccuccaucgcgcugagcaagaugcaggacgugaucaaccagcacgccgcccagcugcacacgcucgucgugcagcugggcaacuccuucggggccaucagcuccagcaucaacgagaucuucucccgccuggagccgcccgccgcgaacgccgaggucgaccggcucaucaacggccgcaugauggugcugaacaccuacgugacccagcugcucauccaggccagcgaggccaaggcccagaacgcgcuggccgcccagaagaucuccgagugcgucaaggcccagagccugcggaacgacuucugcgggaacggcacccacgugcucuccaucccccagcuggcccccaacggcgugcuguucauccacuacgcguacacgcccaccgaguacgccuucguccagaccagcgccgggcucugccacaacggcaccggguacgcgccccgccagggcauguucgugcugccgaacaacaccaacauguggcacuucacgaccaugcaguucuacaaccccgugaacaucuccgccagcaacacccagguccugaccuccugcagcgugaacuacacguccgugaacuacaccguccucgagcccagcgugcccggggacuacgacuuccagaaggaguucgacaaguucuacaagaaccugagcaccaucuucaacaacaccuucaacccgaacgacuucaacuucuccacgguggacgucaccgcccagaucaagagccugcacgacguggugaaccagcucaaccaguccuucaucgaccugaagaagcugaacgucuacgagaagugaggacuaguuauaagacugacuagcccgaugggccucccaacgggcccuccuccccuccuugcaccgagauuaauaaaaaaaaaaaaaaaaaaaaaaaaaaaaaaaaaaaaaaaaaaaaaaaaaaaaaaaaaaaaaaaaugcaucccccccccccccccccccccccccccccccaaaggcucuuuucagagccaccagaauu

SEQ ID NO: 15163 - RNA, 3922 nt, Artificial Sequence
  BatCoV/HKU9-1 BF_005I__YP_001039971.1 spike protein mRNA gc (variant)
aggagaaagcuuaccaugcugcucauccuggugcugggcgucagccucgccgccgccucccgccccgagugcuucaacccgcgguucacccugacgccccugaaccacacccucaacuacaccagcaucaaggccaagguguccaacgugcugcugcccgaccccuacaucgccuacagcgggcagacccuccgccagaaccuguucauggccgacauguccaacaccauccuguacccggucacgccgcccgccaacggcgcgaacgggggcuucaucuacaacaccagcaucauccccguguccgccggccucuucgugaacaccuggauguaccggcagcccgccagcucccgcgccuacugccaggagcccuucggggucgcguucggcgacaccuucgagaacgaccggaucgccauccugaucauggcccccgacaaccuggggagcugguccgccguggcgccccgcaaccagacgaacaucuaccuccuggugugcagcaacgccacccugugcaucaacccgggcuucaaccggugggggcccgccggcuccuucaucgcccccgacgcccucgucgaccacagcaacuccugcuucgugaacaacaccuucagcgugaacaucuccaccagccgcaucucccuggccuuccuguucaaggacggggaccuccugaucuaccacagcggcuggcugcccacgagcaacuucgagcacggcuucucccgggggagccacccgaugaccuacuucaugucccuccccgucggcgggaaccugccccgcgcgcaguucuuccagagcaucgugcgguccaacgccaucgacaagggcgacggcaugugcaccaacuucgacgugaaccugcacgucgcccaccucaucaaccgcgaccugcuggugagcuacuucaacaacggguccguggccaacgccgcggacugcgccgacagcgccgccgaggagcucuacugcgucaccggcuccuucgacccgcccacggggguguacccccugagccgguaccgcgcccagguggcgggcuucguccgggugacccagcgcggguccuacugcaccccgcccuacagcgugcugcaggacccgccccagcccgucguguggcggcgcuacaugcucuacgacugcgucuucgacuucaccgugguggucgacucccugcccacgcaccagcugcagugcuacggcgugagcccccggcgccucgccuccaugugcuacggcagcgugacccuggacgucaugcggaucaacgagacccaccugaacaaccucuucaaccgcgugcccgacaccuucucccuguacaacuacgcccugcccgacaacuucuacgggugccuccacgccuucuaccugaacagcacggcgccguacgccguggccaaccgcuuccccaucaagcccggcgggcggcaguccaacagcgccuucaucgacaccgucaucaacgccgcgcacuacagccccuucuccuacguguacggccuggccgugaucacccucaagccggccgccgggagcaagcuggucugccccguggccaacgacaccguggucaucacggaccgcugcgugcaguacaaccuguacggcuacaccggcaccggggugcuguccaagaacaccagccucgucauccccgacggcaagguguucacggcguccagcaccgggaccaucaucggcguguccaucaacagcaccacguacuccaucaugcccugcgucaccgugccggugagcgucggguaccaccccaacuucgagcgggcccugcuguucaacggccucuccugcagccagcgcucccgggccgugaccgagcccgugagcguccugugguccgccagcgccaccgcgcaggacgccuucgacacccccuccggcugcguggugaacgucgagcugcgcaacacgaccaucgugaacacgugcgccaugccgaucgggaacagccucugcuucaucaacggcagcaucgccaccgcgaacgccgacucccugccccggcugcagcucgugaacuacgacccccuguacgacaacagcaccgccacccccaugaccccggucuacugggugaaggugcccaccaacuucacgcuguccgccaccgaggaguacauccagaccaccgcccccaagaucacgaucgacugcgcgcgcuaccucugcggggacagcucccggugccugaacguccugcuccacuacggcaccuucugcaacgacaucaacaaggcccugagccgcguguccaccauccuggacagcgcccuccugucccuggugaaggagcucagcaucaacacccgggacgaggucacgaccuucuccuucgacggcgacuacaacuucaccgggcugaugggcugccuggggcccaacugcggcgccaccacguaccgcagcgccuucuccgaccuccuguacgacaaggugcggaucaccgacccgggguucaugcagagcuaccagaagugcaucgacucccaguggggcggcagcauccgcgaccugcucugcacccagaccuacaacgggaucgcggugcugccgcccaucgucucccccgccaugcaggcccuguacacgagccuccuggugggcgccguggccuccagcggguacaccuucggcaucaccagcgcgggggucauccccuucgccacccagcugcaguuccggcucaacggcaucggcgugacgacccaggugcuggucgagaaccagaagcugaucgccuccagcuucaacaacgcccucgugaacauccagaagggguucaccgagaccuccaucgcgcugagcaagaugcaggacgugaucaaccagcacgccgcccagcugcacacgcucgucgugcagcugggcaacuccuucggggccaucagcuccagcaucaacgagaucuucucccgccuggagccgcccgccgcgaacgccgaggucgaccggcucaucaacggccgcaugauggugcugaacaccuacgugacccagcugcucauccaggccagcgaggccaaggcccagaacgcgcuggccgcccagaagaucuccgagugcgucaaggcccagagccugcggaacgacuucugcgggaacggcacccacgugcucuccaucccccagcuggcccccaacggcgugcuguucauccacuacgcguacacgcccaccgaguacgccuucguccagaccagcgccgggcucugccacaacggcaccggguacgcgccccgccagggcauguucgugcugccgaacaacaccaacauguggcacuucacgaccaugcaguucuacaaccccgugaacaucuccgccagcaacacccagguccugaccuccugcagcgugaacuacacguccgugaacuacaccguccucgagcccagcgugcccggggacuacgacuuccagaaggaguucgacaaguucuacaagaaccugagcaccaucuucaacaacaccuucaacccgaacgacuucaacuucuccacgguggacgucaccgcccagaucaagagccugcacgacguggugaaccagcucaaccaguccuucaucgaccugaagaagcugaacgucuacgagaagggcggcuacauccccgaggcgccccgcgacgggcaggccuacgugcggaaggacggcgagugggugcuccugagcaccuucugaggacuaguuauaagacugacuagcccgaugggccucccaacgggcccuccuccccuccuugcaccgagauuaauaaaaaaaaaaaaaaaaaaaaaaaaaaaaaaaaaaaaaaaaaaaaaaaaaaaaaaaaaaaaaaaaugcaucccccccccccccccccccccccccccccccaaaggcucuuuucagagccaccagaauu

SEQ ID NO: 15164 - RNA, 3700 nt, Artificial Sequence
  PDCoV/Swine/Thailand/S5011/2015__AMN91621.1 spike protein mRNA gc (1-1160)
aggagaaagcuuaccaugcagcgcgcccugcucaucaugacccugcugugccucgcccgggcgaaguucgccgacgaccugcuggaccuccugaccuuccccggcgcccaccgcuuccugcacaagccgacgcggaacgacagcauccucuacucccgcgccaacaacaacuucgacguggggguccugcccggcuaccccaccaagaacgugaaccuguucagcccccucaccaacuccacccugccgaucaacgggcugcaccggagcuaccagccccucaugcugaacugccugacgaagaucaccaaccagacccucuccauguaccugcagcccagcgagauccagaccuacuccugcggcggggccauggugaaguaccagacgcacgacgcgguccgcaucauccuggaccucaucgccaccgaccggaucagcguggagguggucggccaggccggcgagaacuacguguucgugugcuccgaccaguucaacuacaccaccgcccugcacaacagcacguucuucucccugaacagccagcucuacugcuucaccaacaacaccuaccuggggauccugcccccggaccucaccgacuucacggucuaccgcaccggccaguucuacgcgaacggguaccugcugggcacccuccccaucaccgugaacuacgugcggcuguaccgcgggcagcuguccgccaacagcgcccacuucgcccucgccaaccugacggacacccugaucacccucaccaacacgaccaucucccagaucaccuacugcgacaagagcgucguggacuccaucgcgugccagcggagcucccaccagguggaggacggcuucuacagcgaccccaagagcgccguccgcgcccggcagcgcaccaucgugacgcugcccaagcugccggagcucgaggugguccagcugaacaucuccgcccacauggacuucggcgaggcccggcuggacagcgugaccaucaacgggaacaccuccuacugcgugaccaagcccuacuuccgccucgagacgaacuuccugugccggggcugcaccaugaaccugcgcaccgacacgugcagcuucgaccucuccgcggucaacaacgggaugagcuucucccaguucugccugagcaccgaguccggcgccugcgagaugaagaucaucgugaccuacguguggaacuaccugcugcggcagcgccucuacgucaccgccguggagggccagacccacaccgggacgaccagcguccacgccaccgacaccuccagcgugaucacggacgugugcaccgacuacaccaucuacggcgucuccgggaccggcaucaucaagcccagcgaccugcugcuccacaacgggaucgccuucacgucccccaccggcgagcuguacgcguucaagaacaucaccaccggcaagacgcuccaggugcugccgugcgagacccccagccagcugaucgugaucaacaacaccgucgugggggccaucaccuccagcaacuccacggagaacaaccgguucaccaccaccaucgugacgcccaccuucuucuacagcaccaacgccaccacgcugaacugcaccaagcccguccucagcuacggcccgaucuccgugugcagcgacggggccaucgccggcaccuccacccugcagaacacgcgccccagcaucgugucccuguacgacggggagaucgagauccccagcgcguucucccucagcguccagaccgaguaccuccaggugcaggccgagcaggucaucguggacugcccccaguacgugugcaacggcaacucccgcugccugcagcugcuggcccaguacaccagcgccugcuccaacaucgagguggcgcugcacagcuccgcccagcucgacagccgggagaucaucuccauguucaagaccagcacgcagucccugcagcuggccaacaucaccaacuucaagggcgacuacaacuucagcagcauccucaccucccgcgucgggggccggagcgccaucgaggaccugcuguucaacaagguggugaccuccgggcucggcacggucgaccaggacuacaagagcugcucccgcaacauggccaucgcggaccuggugugcagccaguacuacaacgggaucauggugcugccgggcgucguggacgccgagaagauggccauguacaccggcucccucaccggggccaugguguucggcgggcugaccgccgcggccgccauccccuucgccaccgccguccaggcgcggcugaacuacguggcccuccagacgaacgugcugcaggagaaccagaagauccuggccgagagcuucaaccaggccgucggcaacaucucccucgcgcugagcuccgugaacgacgccauccagcagaccagcgaggcccugaacaccguggccaucgccaucaagaagauccagaccgucgugaaccagcagggcgaggcgcucucccaccugacggcccagcugagcaacaacuuccaggccaucuccaccagcauccaggacaucuacaaccgccucgaggagguggaggccaaccagcaggucgaccggcugaucaacgggcgccuggccgcgcucaacgccuacgugacccagcugcugaaccagaugucccagauccggcagagccgccuccuggcccagcagaagaucaacgagugcgugaagucccagagcccccgguacggcuucugcgggaacggcacccacaucuucagccugacgcagaccgcccccaacgggaucuucuucaugcacgccguccucgugccgaacaaguucacccgcgugaacgcguccgccggcaucugcgucgacaacacccggggcuacagccugcagccccagcugauccucuaccaguucaacaacuccuggcgcgugacgccccggaacauguacgagccgcgccugccccggcaggccgacuucauccagcugaccgacugcagcgugaccuucuacaacaccacggccgcgaaccuccccaacaucauccccgacgucaucgacgugaaccagaccguguccgacaucaucgacaaccugccgaccgccaccccgccccagugggacgucgggaucuacaacaacacgauccugaaccucaccguggagaucaacgaccugcaggagcgcagcaagaaccugucccagaucgccgaccggcuccagaacuacaucgacaaccugaacaacacccugguggaccucgaguggcugaaccgcgucgagaccuaccugaaguggcccugguacaucuggcucgccaucgcccuggcgcugaucgccuucgugacgauccucaucaccaucuuccugugcaccggcugcugcgggggcugcuucgggugcugcggcggcugcuucgggcuguucagcaagaagaagcgcuacaccgacgaccagcccacgcccuccuucaaguucaaggaguggugaggacuaguuauaagacugacuagcccgaugggccucccaacgggcccuccuccccuccuugcaccgagauuaauaaaaaaaaaaaaaaaaaaaaaaaaaaaaaaaaaaaaaaaaaaaaaaaaaaaaaaaaaaaaaaaaugcaucccccccccccccccccccccccccccccccaaaggcucuuuucagagccaccagaauu

SEQ ID NO: 15165 - RNA, 3700 nt, Artificial Sequence
  PDCoV/Swine/Thailand/S5011/2015__AMN91621.1 spike protein mRNA gc (1-1160)(E855P_V856P)
aggagaaagcuuaccaugcagcgcgcccugcucaucaugacccugcugugccucgcccgggcgaaguucgccgacgaccugcuggaccuccugaccuuccccggcgcccaccgcuuccugcacaagccgacgcggaacgacagcauccucuacucccgcgccaacaacaacuucgacguggggguccugcccggcuaccccaccaagaacgugaaccuguucagcccccucaccaacuccacccugccgaucaacgggcugcaccggagcuaccagccccucaugcugaacugccugacgaagaucaccaaccagacccucuccauguaccugcagcccagcgagauccagaccuacuccugcggcggggccauggugaaguaccagacgcacgacgcgguccgcaucauccuggaccucaucgccaccgaccggaucagcguggagguggucggccaggccggcgagaacuacguguucgugugcuccgaccaguucaacuacaccaccgcccugcacaacagcacguucuucucccugaacagccagcucuacugcuucaccaacaacaccuaccuggggauccugcccccggaccucaccgacuucacggucuaccgcaccggccaguucuacgcgaacggguaccugcugggcacccuccccaucaccgugaacuacgugcggcuguaccgcgggcagcuguccgccaacagcgcccacuucgcccucgccaaccugacggacacccugaucacccucaccaacacgaccaucucccagaucaccuacugcgacaagagcgucguggacuccaucgcgugccagcggagcucccaccagguggaggacggcuucuacagcgaccccaagagcgccguccgcgcccggcagcgcaccaucgugacgcugcccaagcugccggagcucgaggugguccagcugaacaucuccgcccacauggacuucggcgaggcccggcuggacagcgugaccaucaacgggaacaccuccuacugcgugaccaagcccuacuuccgccucgagacgaacuuccugugccggggcugcaccaugaaccugcgcaccgacacgugcagcuucgaccucuccgcggucaacaacgggaugagcuucucccaguucugccugagcaccgaguccggcgccugcgagaugaagaucaucgugaccuacguguggaacuaccugcugcggcagcgccucuacgucaccgccguggagggccagacccacaccgggacgaccagcguccacgccaccgacaccuccagcgugaucacggacgugugcaccgacuacaccaucuacggcgucuccgggaccggcaucaucaagcccagcgaccugcugcuccacaacgggaucgccuucacgucccccaccggcgagcuguacgcguucaagaacaucaccaccggcaagacgcuccaggugcugccgugcgagacccccagccagcugaucgugaucaacaacaccgucgugggggccaucaccuccagcaacuccacggagaacaaccgguucaccaccaccaucgugacgcccaccuucuucuacagcaccaacgccaccacgcugaacugcaccaagcccguccucagcuacggcccgaucuccgugugcagcgacggggccaucgccggcaccuccacccugcagaacacgcgccccagcaucgugucccuguacgacggggagaucgagauccccagcgcguucucccucagcguccagaccgaguaccuccaggugcaggccgagcaggucaucguggacugcccccaguacgugugcaacggcaacucccgcugccugcagcugcuggcccaguacaccagcgccugcuccaacaucgagguggcgcugcacagcuccgcccagcucgacagccgggagaucaucuccauguucaagaccagcacgcagucccugcagcuggccaacaucaccaacuucaagggcgacuacaacuucagcagcauccucaccucccgcgucgggggccggagcgccaucgaggaccugcuguucaacaagguggugaccuccgggcucggcacggucgaccaggacuacaagagcugcucccgcaacauggccaucgcggaccuggugugcagccaguacuacaacgggaucauggugcugccgggcgucguggacgccgagaagauggccauguacaccggcucccucaccggggccaugguguucggcgggcugaccgccgcggccgccauccccuucgccaccgccguccaggcgcggcugaacuacguggcccuccagacgaacgugcugcaggagaaccagaagauccuggccgagagcuucaaccaggccgucggcaacaucucccucgcgcugagcuccgugaacgacgccauccagcagaccagcgaggcccugaacaccguggccaucgccaucaagaagauccagaccgucgugaaccagcagggcgaggcgcucucccaccugacggcccagcugagcaacaacuuccaggccaucuccaccagcauccaggacaucuacaaccgccucgagccgcccgaggccaaccagcaggucgaccggcugaucaacgggcgccuggccgcgcucaacgccuacgugacccagcugcugaaccagaugucccagauccggcagagccgccuccuggcccagcagaagaucaacgagugcgugaagucccagagcccccgguacggcuucugcgggaacggcacccacaucuucagccugacgcagaccgcccccaacgggaucuucuucaugcacgccgugcucguccccaacaaguucacccgcgugaacgcguccgccggcaucugcguggacaacacccggggcuacagccugcagccgcagcugauccucuaccaguucaacaacuccuggcgcgucacgccccggaacauguacgagccccgccugccccggcaggccgacuucauccagcugaccgacugcagcgugaccuucuacaacaccacggccgcgaaccucccgaacaucauccccgacgugaucgacgucaaccagaccguguccgacaucaucgacaaccugcccaccgccacgcccccgcagugggacguggggaucuacaacaacaccauccugaaccucaccgucgagaucaacgaccugcaggagcgcagcaagaaccugucccagaucgccgaccggcuccagaacuacaucgacaaccugaacaacacccugguggaccucgaguggcugaaccgcguggagaccuaccugaaguggcccugguacaucuggcucgccaucgcccuggcgcugaucgccuucgucacgauccucaucaccaucuuccugugcaccggcugcugcgggggcugcuucgggugcugcggcggcugcuucgggcuguucagcaagaagaagcgcuacaccgacgaccagcccacgcccuccuucaaguucaaggaguggugaggacuaguuauaagacugacuagcccgaugggccucccaacgggcccuccuccccuccuugcaccgagauuaauaaaaaaaaaaaaaaaaaaaaaaaaaaaaaaaaaaaaaaaaaaaaaaaaaaaaaaaaaaaaaaaaugcaucccccccccccccccccccccccccccccccaaaggcucuuuucagagccaccagaauu

SEQ ID NO: 15166 - RNA, 3499 nt, Artificial Sequence
  PDCoV/Swine/Thailand/S5011/2015__AMN91621.1 spike protein mRNA gc (variant)
aggagaaagcuuaccaugcagcgcgcccugcucaucaugacccugcugugccucgcccgggcgaaguucgccgacgaccugcuggaccuccugaccuuccccggcgcccaccgcuuccugcacaagccgacgcggaacgacagcauccucuacucccgcgccaacaacaacuucgacguggggguccugcccggcuaccccaccaagaacgugaaccuguucagcccccucaccaacuccacccugccgaucaacgggcugcaccggagcuaccagccccucaugcugaacugccugacgaagaucaccaaccagacccucuccauguaccugcagcccagcgagauccagaccuacuccugcggcggggccauggugaaguaccagacgcacgacgcgguccgcaucauccuggaccucaucgccaccgaccggaucagcguggagguggucggccaggccggcgagaacuacguguucgugugcuccgaccaguucaacuacaccaccgcccugcacaacagcacguucuucucccugaacagccagcucuacugcuucaccaacaacaccuaccuggggauccugcccccggaccucaccgacuucacggucuaccgcaccggccaguucuacgcgaacggguaccugcugggcacccuccccaucaccgugaacuacgugcggcuguaccgcgggcagcuguccgccaacagcgcccacuucgcccucgccaaccugacggacacccugaucacccucaccaacacgaccaucucccagaucaccuacugcgacaagagcgucguggacuccaucgcgugccagcggagcucccaccagguggaggacggcuucuacagcgaccccaagagcgccguccgcgcccggcagcgcaccaucgugacgcugcccaagcugccggagcucgaggugguccagcugaacaucuccgcccacauggacuucggcgaggcccggcuggacagcgugaccaucaacgggaacaccuccuacugcgugaccaagcccuacuuccgccucgagacgaacuuccugugccggggcugcaccaugaaccugcgcaccgacacgugcagcuucgaccucuccgcggucaacaacgggaugagcuucucccaguucugccugagcaccgaguccggcgccugcgagaugaagaucaucgugaccuacguguggaacuaccugcugcggcagcgccucuacgucaccgccguggagggccagacccacaccgggacgaccagcguccacgccaccgacaccuccagcgugaucacggacgugugcaccgacuacaccaucuacggcgucuccgggaccggcaucaucaagcccagcgaccugcugcuccacaacgggaucgccuucacgucccccaccggcgagcuguacgcguucaagaacaucaccaccggcaagacgcuccaggugcugccgugcgagacccccagccagcugaucgugaucaacaacaccgucgugggggccaucaccuccagcaacuccacggagaacaaccgguucaccaccaccaucgugacgcccaccuucuucuacagcaccaacgccaccacgcugaacugcaccaagcccguccucagcuacggcccgaucuccgugugcagcgacggggccaucgccggcaccuccacccugcagaacacgcgccccagcaucgugucccuguacgacggggagaucgagauccccagcgcguucucccucagcguccagaccgaguaccuccaggugcaggccgagcaggucaucguggacugcccccaguacgugugcaacggcaacucccgcugccugcagcugcuggcccaguacaccagcgccugcuccaacaucgagguggcgcugcacagcuccgcccagcucgacagccgggagaucaucuccauguucaagaccagcacgcagucccugcagcuggccaacaucaccaacuucaagggcgacuacaacuucagcagcauccucaccucccgcgucgggggccggagcgccaucgaggaccugcuguucaacaagguggugaccuccgggcucggcacggucgaccaggacuacaagagcugcucccgcaacauggccaucgcggaccuggugugcagccaguacuacaacgggaucauggugcugccgggcgucguggacgccgagaagauggccauguacaccggcucccucaccggggccaugguguucggcgggcugaccgccgcggccgccauccccuucgccaccgccguccaggcgcggcugaacuacguggcccuccagacgaacgugcugcaggagaaccagaagauccuggccgagagcuucaaccaggccgucggcaacaucucccucgcgcugagcuccgugaacgacgccauccagcagaccagcgaggcccugaacaccguggccaucgccaucaagaagauccagaccgucgugaaccagcagggcgaggcgcucucccaccugacggcccagcugagcaacaacuuccaggccaucuccaccagcauccaggacaucuacaaccgccucgagccgcccgaggccaaccagcaggucgaccggcugaucaacgggcgccuggccgcgcucaacgccuacgugacccagcugcugaaccagaugucccagauccggcagagccgccuccuggcccagcagaagaucaacgagugcgugaagucccagagcccccgguacggcuucugcgggaacggcacccacaucuucagccugacgcagaccgcccccaacgggaucuucuucaugcacgccgugcucguccccaacaaguucacccgcgugaacgcguccgccggcaucugcguggacaacacccggggcuacagccugcagccgcagcugauccucuaccaguucaacaacuccuggcgcgucacgccccggaacauguacgagccccgccugccccggcaggccgacuucauccagcugaccgacugcagcgugaccuucuacaacaccacggccgcgaaccucccgaacaucauccccgacgugaucgacgucaaccagaccguguccgacaucaucgacaaccugcccaccgccacgcccccgcagugggacguggggaucuacaacaacaccauccugaaccucaccgucgagaucaacgaccugcaggagcgcagcaagaaccugucccagaucgccgaccggcuccagaacuacaucgacaaccugaacaacacccugguggaccucgaguggcugaaccgcguggagaccugaggacuaguuauaagacugacuagcccgaugggccucccaacgggcccuccuccccuccuugcaccgagauuaauaaaaaaaaaaaaaaaaaaaaaaaaaaaaaaaaaaaaaaaaaaaaaaaaaaaaaaaaaaaaaaaaugcaucccccccccccccccccccccccccccccccaaaggcucuuuucagagccaccagaauu

SEQ ID NO: 15167 - RNA, 3580 nt, Artificial Sequence
  PDCoV/Swine/Thailand/S5011/2015__AMN91621.1 spike protein mRNA gc (variant)
aggagaaagcuuaccaugcagcgcgcccugcucaucaugacccugcugugccucgcccgggccaaguucgccgacgaccugcuggaccuccugaccuuccccggcgcccaccgcuuccugcacaagccgacgcggaacgacagcauccucuacucccgcgccaacaacaacuucgacguggggguccugcccggcuaccccaccaagaacgugaaccuguucagcccccucaccaacuccacccugccgaucaacgggcugcaccggagcuaccagccccucaugcugaacugccugacgaagaucaccaaccagacccucuccauguaccugcagcccagcgagauccagaccuacuccugcggcggggccauggugaaguaccagacgcacgacgcgguccgcaucauccuggaccucaucgccaccgaccggaucagcguggagguggucggccaggccggcgagaacuacguguucgugugcuccgaccaguucaacuacaccaccgcccugcacaacagcacguucuucucccugaacagccagcucuacugcuucaccaacaacaccuaccuggggauccugcccccggaccucaccgacuucacggucuaccgcaccggccaguucuacgcgaacggguaccugcugggcacccuccccaucaccgugaacuacgugcggcuguaccgcgggcagcuguccgccaacagcgcccacuucgcccucgccaaccugacggacacccugaucacccucaccaacacgaccaucucccagaucaccuacugcgacaagagcgucguggacuccaucgcgugccagcggagcucccaccagguggaggacggcuucuacagcgaccccaagagcgccguccgcgcccggcagcgcaccaucgugacgcugcccaagcugccggagcucgaggugguccagcugaacaucuccgcccacauggacuucggcgaggcccggcuggacagcgugaccaucaacgggaacaccuccuacugcgugaccaagcccuacuuccgccucgagacgaacuuccugugccggggcugcaccaugaaccugcgcaccgacacgugcagcuucgaccucuccgcggucaacaacgggaugagcuucucccaguucugccugagcaccgaguccggcgccugcgagaugaagaucaucgugaccuacguguggaacuaccugcugcggcagcgccucuacgucaccgccguggagggccagacccacaccgggacgaccagcguccacgccaccgacaccuccagcgugaucacggacgugugcaccgacuacaccaucuacggcgucuccgggaccggcaucaucaagcccagcgaccugcugcuccacaacgggaucgccuucacgucccccaccggcgagcuguacgcguucaagaacaucaccaccggcaagacgcuccaggugcugccgugcgagacccccagccagcugaucgugaucaacaacaccgucgugggggccaucaccuccagcaacuccacggagaacaaccgguucaccaccaccaucgugacgcccaccuucuucuacagcaccaacgccaccacgcugaacugcaccaagcccguccucagcuacggcccgaucuccgugugcagcgacggggccaucgccggcaccuccacccugcagaacacgcgccccagcaucgugucccuguacgacggggagaucgagauccccagcgcguucucccucagcguccagaccgaguaccuccaggugcaggccgagcaggucaucguggacugcccccaguacgugugcaacggcaacucccgcugccugcagcugcuggcccaguacaccagcgccugcuccaacaucgagguggcgcugcacagcuccgcccagcucgacagccgggagaucaucuccauguucaagaccagcacgcagucccugcagcuggccaacaucaccaacuucaagggcgacuacaacuucagcagcauccucaccucccgcgucgggggccggagcgccaucgaggaccugcuguucaacaagguggugaccuccgggcucggcacggucgaccaggacuacaagagcugcucccgcaacauggccaucgcggaccuggugugcagccaguacuacaacgggaucauggugcugccgggcgucguggacgccgagaagauggccauguacaccggcucccucaccggggccaugguguucggcgggcugaccgccgcggccgccauccccuucgccaccgccguccaggcgcggcugaacuacguggcccuccagacgaacgugcugcaggagaaccagaagauccuggccgagagcuucaaccaggccgucggcaacaucucccucgcgcugagcuccgugaacgacgccauccagcagaccagcgaggcccugaacaccguggccaucgccaucaagaagauccagaccgucgugaaccagcagggcgaggcgcucucccaccugacggcccagcugagcaacaacuuccaggccaucuccaccagcauccaggacaucuacaaccgccucgagccgcccgaggccaaccagcaggucgaccggcugaucaacgggcgccuggccgcgcucaacgccuacgugacccagcugcugaaccagaugucccagauccggcagagccgccuccuggcccagcagaagaucaacgagugcgugaagucccagagcccccgguacggcuucugcgggaacggcacccacaucuucagccugacgcagaccgcccccaacgggaucuucuucaugcacgccgugcucguccccaacaaguucacccgcgugaacgcguccgccggcaucugcguggacaacacccggggcuacagccugcagccgcagcugauccucuaccaguucaacaacuccuggcgcgucacgccccggaacauguacgagccccgccugccccggcaggccgacuucauccagcugaccgacugcagcgugaccuucuacaacaccacggccgcgaaccucccgaacaucauccccgacgugaucgacgucaaccagaccguguccgacaucaucgacaaccugcccaccgccacgcccccgcagugggacguggggaucuacaacaacaccauccugaaccucaccgucgagaucaacgaccugcaggagcgcagcaagaaccugucccagaucgccgaccggcuccagaacuacaucgacaaccugaacaacacccugguggaccucgaguggcugaaccgcguggagaccggcggguacauccccgaggcgccccgcgacggccaggccuacguccggaaggacggggagugggugcugcucagcacguucugaggacuaguuauaagacugacuagcccgaugggccucccaacgggcccuccuccccuccuugcaccgagauuaauaaaaaaaaaaaaaaaaaaaaaaaaaaaaaaaaaaaaaaaaaaaaaaaaaaaaaaaaaaaaaaaaugcaucccccccccccccccccccccccccccccccaaaggcucuuuucagagccaccagaauu

SEQ ID NO: 15168 - RNA, 4378 nt, Artificial Sequence
  PEDV/NPL-PEDv/2013/P10__AHZ94887.1 spike protein mRNA gc (1-1386)
aggagaaagcuuaccaugaagucccugaccuacuucuggcuguuccugcccgugcugagcacccucagccugccgcaggacgucacgcgcugcuccgccaacaccaacuuccggcgcuucuucagcaaguucaacgugcaggcccccgcgguggucgugcugggcggguaccuccccaucggcgagaaccagggggugaacuccaccugguacugcgccggccagcaccccaccgccagcgggguccacggcaucuucgugucccacauccggggcgggcacggcuucgagaucgggaucagccaggagccguucgaccccuccggcuaccagcuguaccugcacaaggccacgaacgggaacaccaacgccaccgcgcgccuccggaucugccaguuccccagcaucaagacccugggccccacggccaacaacgacgugaccaccggccgcaacugccuguucaacaaggccaucccggcccacauguccgagcacagcgucguggggaucaccugggacaacgaccgggugacggucuucuccgacaagaucuacuacuucuacuucaagaacgacuggagccgcguggcgaccaagugcuacaacuccggcgggugcgccaugcaguacguguacgagcccaccuacuacaugcucaacgucaccagcgccggcgaggacggcaucuccuaccagcccugcacggccaacugcaucggguacgccgcgaacguguucgccaccgagcccaacggccacaucccggagggguucagcuucaacaacugguuccugcuguccaacgacagcacccucgugcacggcaaggucgugagcaaccagccccugcuggugaacugccuccuggccauccccaagaucuacgggcugggccaguucuucuccuucaaccagaccaucgacggcgucugcaacggggccgccgugcagcgggcgcccgaggcccuccgcuucaacaucaacgacaucagcgugauccuggccgagggcuccaucguccugcacacggcccucgggaccaacuucagcuucgugugcuccaacagcuccaacccgcaccuggccaccuucgcgaucccccugggcgccacccagguccccuacuacugcuucuucaagguggacacguacaacagcaccguguacaaguuccucgccguccugcccccgaccgugcgggagaucgugaucaccaaguacggggacgucuacgugaacggcuucggcuaccugcaccucgggcugcuggacgccgugacgaucaacuucaccggccacgggaccgacgacgacgucuccggcuucuggaccaucgccagcacgaacuucguggacgcgcucaucgaggugcaggggaccgccauccagcgcauccuguacugcgacgaccccgucucccagcugaagugcagccagguggccuucgaccucgacgacggcuucuacaccaucuccagccggaaccugcugucccacgagcagcccaucagcuucgugacccuccccuccuucaacgaccacagcuucgucaacaucacgguguccgccagcuucggcgggcacagcggcgcgaaccugaucgccuccgacaccaccaucaacggguucagcuccuucugcguggacacccgccaguucaccaucagccuguucuacaacgucacgaacuccuacggcuacgugagcaagucccaggacagcaacugcccguucacccuccaguccgugaacgacuaccugagcuucuccaaguucugcgucagcaccucccugcucgccagcgccugcaccaucgaccuguucggcuaccccgaguucggguccggcgugaaguucacgagccuguacuuccaguucaccaagggggagcugaucaccggcacccccaagccccucgagggggugacggacgucuccuucaugacccuggacgugugcaccaaguacaccaucuacggcuucaagggcgaggggaucaucacgcugaccaacagcagcuuccucgccggcguguacuacaccuccgacagcgggcagcugcuggcguucaagaacgucaccuccggcgccguguacagcgugacgccgugcuccuucagcgagcaggccgccuacgucgacgacgacaucgugggggugaucuccagccucuccagcuccaccuucaacagcacccgggagcugcccggcuucuucuaccacuccaacgacggcagcaacugcaccgagcccguccugguguacuccaacaucggggugugcaagagcggcuccaucggguacgucccgagccaguccggccaggugaagaucgcccccacggugaccgggaacaucagcauccccaccaacuucagcauguccauccgcaccgaguaccuccagcuguacaacacgcccgucagcguggacugcgcgaccuacgugugcaacggcaacucccggugcaagcagcugcucacccaguacaccgccgccugcaagacgaucgagagcgcccugcagcuguccgcccgccucgagagcgucgaggugaacuccaugcugaccaucagcgacgaggcgcugcagcucgccaccaucuccagcuucaacggcgacggguacaacuucaccaacgugcugggcgucuccguguacgacccggccagccggcgcgugguccagaagcgguccuucaucgaggaccuccucuucaacaagguggugacgaacgggcugggcaccgucgacgaggacuacaagcgcugcagcaacgggcgcuccguggccgaccuggucugcgcgcaguacuacagcggcgugauggugcuccccggcgucguggacgccgagaagcugcacauguacuccgccagccugaucgggggcauggugcucgggggcuucaccuccgccgccgcgcugcccuucagcuacgccguccaggcccggcugaacuaccucgcccugcagaccgacgugcugcagcgcaaccagcagcuccuggccgagagcuucaacuccgcgaucggcaacaucacgagcgccuucgaguccgugaaggaggccaucagccagaccuccaaggggcugaacaccgucgcccacgcccucaccaaggugcaggagguggucaacagccagggcgcggcccugacccagcugacggugcagcuccagcacaacuuccaggccaucuccagcuccaucgacgacaucuacagccggcuggacauccuguccgccgacgcccagguggaccgccucaucaccgggcggcugagcgcccugaacgccuucgucgcccagacccucaccaaguacacggaggugcaggccucccgcaagcuggcgcagcagaaggugaacgagugcgucaagagccagucccagcgguacggcuucugcgggggcgacggcgagcacaucuucagccuggugcaggccgcgccccaggggcuccuguuccugcacaccgugcucgucccguccgacuucguggacgugaucgccaucgccggccugugcgucaacgacgagaucgcgcugacccuccgcgagcccgggcuggugcuguucacccacgagcuccagaaccacacggccaccgaguacuucgugagcucccggcgcauguucgagccccggaagcccaccgucagcgacuucgugcagaucgagagcugcguggucaccuacgugaaccugacgcgcgaccagcugccggacgugauccccgacuacaucgacgucaacaagacccucuacgagauccuggccucccugcccaaccggaccggccccagccucccgcuggacguguucaacgccaccuaccugaaccucacgggggagaucgccgaccuggagcagcgcuccgagagccugcggaacaccaccgaggagcuccagucccugaucuacaacaucaacaacacccugguggaccucgaguggcugaaccgcgucgagacguacaucaaguggcccugguggguguggcugaucaucuucaucgugcucaucuucgucgugagccugcugguguucugcugcaucuccaccggcugcugcggcugcugcgggugcugcugcgcgugcuucagcggcugcugccgggggccccgccuccagcccuacgaggucuucgagaaggugcacgugcagugaggacuaguuauaagacugacuagcccgaugggccucccaacgggcccuccuccccuccuugcaccgagauuaauaaaaaaaaaaaaaaaaaaaaaaaaaaaaaaaaaaaaaaaaaaaaaaaaaaaaaaaaaaaaaaaaugcaucccccccccccccccccccccccccccccccaaaggcucuuuucagagccaccagaauu

SEQ ID NO: 15169 - RNA, 4378 nt, Artificial Sequence
  PEDV/NPL-PEDv/2013/P10__AHZ94887.1 spike protein mRNA gc (1-1386)(I1076P_L1077P)
aggagaaagcuuaccaugaagucccugaccuacuucuggcuguuccugcccgugcugagcacccucagccugccgcaggacgucacgcgcugcuccgccaacaccaacuuccggcgcuucuucagcaaguucaacgugcaggcccccgcgguggucgugcugggcggguaccuccccaucggcgagaaccagggggugaacuccaccugguacugcgccggccagcaccccaccgccagcgggguccacggcaucuucgugucccacauccggggcgggcacggcuucgagaucgggaucagccaggagccguucgaccccuccggcuaccagcuguaccugcacaaggccacgaacgggaacaccaacgccaccgcgcgccuccggaucugccaguuccccagcaucaagacccugggccccacggccaacaacgacgugaccaccggccgcaacugccuguucaacaaggccaucccggcccacauguccgagcacagcgucguggggaucaccugggacaacgaccgggugacggucuucuccgacaagaucuacuacuucuacuucaagaacgacuggagccgcguggcgaccaagugcuacaacuccggcgggugcgccaugcaguacguguacgagcccaccuacuacaugcucaacgucaccagcgccggcgaggacggcaucuccuaccagcccugcacggccaacugcaucggguacgccgcgaacguguucgccaccgagcccaacggccacaucccggagggguucagcuucaacaacugguuccugcuguccaacgacagcacccucgugcacggcaaggucgugagcaaccagccccugcuggugaacugccuccuggccauccccaagaucuacgggcugggccaguucuucuccuucaaccagaccaucgacggcgucugcaacggggccgccgugcagcgggcgcccgaggcccuccgcuucaacaucaacgacaucagcgugauccuggccgagggcuccaucguccugcacacggcccucgggaccaacuucagcuucgugugcuccaacagcuccaacccgcaccuggccaccuucgcgaucccccugggcgccacccagguccccuacuacugcuucuucaagguggacacguacaacagcaccguguacaaguuccucgccguccugcccccgaccgugcgggagaucgugaucaccaaguacggggacgucuacgugaacggcuucggcuaccugcaccucgggcugcuggacgccgugacgaucaacuucaccggccacgggaccgacgacgacgucuccggcuucuggaccaucgccagcacgaacuucguggacgcgcucaucgaggugcaggggaccgccauccagcgcauccuguacugcgacgaccccgucucccagcugaagugcagccagguggccuucgaccucgacgacggcuucuacaccaucuccagccggaaccugcugucccacgagcagcccaucagcuucgugacccuccccuccuucaacgaccacagcuucgucaacaucacgguguccgccagcuucggcgggcacagcggcgcgaaccugaucgccuccgacaccaccaucaacggguucagcuccuucugcguggacacccgccaguucaccaucagccuguucuacaacgucacgaacuccuacggcuacgugagcaagucccaggacagcaacugcccguucacccuccaguccgugaacgacuaccugagcuucuccaaguucugcgucagcaccucccugcucgccagcgccugcaccaucgaccuguucggcuaccccgaguucggguccggcgugaaguucacgagccuguacuuccaguucaccaagggggagcugaucaccggcacccccaagccccucgagggggugacggacgucuccuucaugacccuggacgugugcaccaaguacaccaucuacggcuucaagggcgaggggaucaucacgcugaccaacagcagcuuccucgccggcguguacuacaccuccgacagcgggcagcugcuggcguucaagaacgucaccuccggcgccguguacagcgugacgccgugcuccuucagcgagcaggccgccuacgucgacgacgacaucgugggggugaucuccagccucuccagcuccaccuucaacagcacccgggagcugcccggcuucuucuaccacuccaacgacggcagcaacugcaccgagcccguccugguguacuccaacaucggggugugcaagagcggcuccaucggguacgucccgagccaguccggccaggugaagaucgcccccacggugaccgggaacaucagcauccccaccaacuucagcauguccauccgcaccgaguaccuccagcuguacaacacgcccgucagcguggacugcgcgaccuacgugugcaacggcaacucccggugcaagcagcugcucacccaguacaccgccgccugcaagacgaucgagagcgcccugcagcuguccgcccgccucgagagcgucgaggugaacuccaugcugaccaucagcgacgaggcgcugcagcucgccaccaucuccagcuucaacggcgacggguacaacuucaccaacgugcugggcgucuccguguacgacccggccagccggcgcgugguccagaagcgguccuucaucgaggaccuccucuucaacaagguggugacgaacgggcugggcaccgucgacgaggacuacaagcgcugcagcaacgggcgcuccguggccgaccuggucugcgcgcaguacuacagcggcgugauggugcuccccggcgucguggacgccgagaagcugcacauguacuccgccagccugaucgggggcauggugcucgggggcuucaccuccgccgccgcgcugcccuucagcuacgccguccaggcccggcugaacuaccucgcccugcagaccgacgugcugcagcgcaaccagcagcuccuggccgagagcuucaacuccgcgaucggcaacaucacgagcgccuucgaguccgugaaggaggccaucagccagaccuccaaggggcugaacaccgucgcccacgcccucaccaaggugcaggagguggucaacagccagggcgcggcccugacccagcugacggugcagcuccagcacaacuuccaggccaucuccagcuccaucgacgacaucuacagccggcuggacccgcccuccgccgacgcccagguggaccgccugaucaccgggcggcucagcgcccugaacgccuucgucgcccagacccugaccaaguacacggaggugcaggccucccgcaagcucgcgcagcagaaggugaacgagugcgucaagagccagucccagcgguacggcuucugcgggggcgacggcgagcacaucuucagccuggugcaggccgcgccccaggggcuccuguuccugcacaccgugcugguccccuccgacuucguggacgugaucgccaucgccggccucugcgucaacgacgagaucgcgcugacccugcgcgagcccgggcucgugcuguucacccacgagcugcagaaccacacggccaccgaguacuucgugagcucccggcgcauguucgagccgcggaagcccaccgucagcgacuucgugcagaucgagagcugcguggucaccuacgugaaccucacgcgcgaccagcugcccgacgugauccccgacuacaucgacgucaacaagacccuguacgagauccucgccucccugccgaaccggaccggccccagccugccccucgacguguucaacgccaccuaccugaaccugacgggggagaucgccgaccucgagcagcgcuccgagagccugcggaacaccaccgaggagcugcagucccucaucuacaacaucaacaacacccugguggaccuggaguggcucaaccgcgucgagacguacaucaaguggcccugguggguguggcugaucaucuucaucgugcugaucuucgucgugagccuccugguguucugcugcaucuccaccggcugcugcggcugcugcgggugcugcugcgcgugcuucagcggcugcugccgggggccgcgccugcagcccuacgaggucuucgagaaggugcacgugcagugaggacuaguuauaagacugacuagcccgaugggccucccaacgggcccuccuccccuccuugcaccgagauuaauaaaaaaaaaaaaaaaaaaaaaaaaaaaaaaaaaaaaaaaaaaaaaaaaaaaaaaaaaaaaaaaaugcaucccccccccccccccccccccccccccccccaaaggcucuuuucagagccaccagaauu

SEQ ID NO: 15170 - RNA, 4186 nt, Artificial Sequence
  PEDV/NPL-PEDv/2013/P10__AHZ94887.1 spike protein mRNA gc (variant)
aggagaaagcuuaccaugaagucccugaccuacuucuggcuguuccugcccgugcugagcacccucagccugccgcaggacgucacgcgcugcuccgccaacaccaacuuccggcgcuucuucagcaaguucaacgugcaggcccccgcgguggucgugcugggcggguaccuccccaucggcgagaaccagggggugaacuccaccugguacugcgccggccagcaccccaccgccagcgggguccacggcaucuucgugucccacauccggggcgggcacggcuucgagaucgggaucagccaggagccguucgaccccuccggcuaccagcuguaccugcacaaggccacgaacgggaacaccaacgccaccgcgcgccuccggaucugccaguuccccagcaucaagacccugggccccacggccaacaacgacgugaccaccggccgcaacugccuguucaacaaggccaucccggcccacauguccgagcacagcgucguggggaucaccugggacaacgaccgggugacggucuucuccgacaagaucuacuacuucuacuucaagaacgacuggagccgcguggcgaccaagugcuacaacuccggcgggugcgccaugcaguacguguacgagcccaccuacuacaugcucaacgucaccagcgccggcgaggacggcaucuccuaccagcccugcacggccaacugcaucggguacgccgcgaacguguucgccaccgagcccaacggccacaucccggagggguucagcuucaacaacugguuccugcuguccaacgacagcacccucgugcacggcaaggucgugagcaaccagccccugcuggugaacugccuccuggccauccccaagaucuacgggcugggccaguucuucuccuucaaccagaccaucgacggcgucugcaacggggccgccgugcagcgggcgcccgaggcccuccgcuucaacaucaacgacaucagcgugauccuggccgagggcuccaucguccugcacacggcccucgggaccaacuucagcuucgugugcuccaacagcuccaacccgcaccuggccaccuucgcgaucccccugggcgccacccagguccccuacuacugcuucuucaagguggacacguacaacagcaccguguacaaguuccucgccguccugcccccgaccgugcgggagaucgugaucaccaaguacggggacgucuacgugaacggcuucggcuaccugcaccucgggcugcuggacgccgugacgaucaacuucaccggccacgggaccgacgacgacgucuccggcuucuggaccaucgccagcacgaacuucguggacgcgcucaucgaggugcaggggaccgccauccagcgcauccuguacugcgacgaccccgucucccagcugaagugcagccagguggccuucgaccucgacgacggcuucuacaccaucuccagccggaaccugcugucccacgagcagcccaucagcuucgugacccuccccuccuucaacgaccacagcuucgucaacaucacgguguccgccagcuucggcgggcacagcggcgcgaaccugaucgccuccgacaccaccaucaacggguucagcuccuucugcguggacacccgccaguucaccaucagccuguucuacaacgucacgaacuccuacggcuacgugagcaagucccaggacagcaacugcccguucacccuccaguccgugaacgacuaccugagcuucuccaaguucugcgucagcaccucccugcucgccagcgccugcaccaucgaccuguucggcuaccccgaguucggguccggcgugaaguucacgagccuguacuuccaguucaccaagggggagcugaucaccggcacccccaagccccucgagggggugacggacgucuccuucaugacccuggacgugugcaccaaguacaccaucuacggcuucaagggcgaggggaucaucacgcugaccaacagcagcuuccucgccggcguguacuacaccuccgacagcgggcagcugcuggcguucaagaacgucaccuccggcgccguguacagcgugacgccgugcuccuucagcgagcaggccgccuacgucgacgacgacaucgugggggugaucuccagccucuccagcuccaccuucaacagcacccgggagcugcccggcuucuucuaccacuccaacgacggcagcaacugcaccgagcccguccugguguacuccaacaucggggugugcaagagcggcuccaucggguacgucccgagccaguccggccaggugaagaucgcccccacggugaccgggaacaucagcauccccaccaacuucagcauguccauccgcaccgaguaccuccagcuguacaacacgcccgucagcguggacugcgcgaccuacgugugcaacggcaacucccggugcaagcagcugcucacccaguacaccgccgccugcaagacgaucgagagcgcccugcagcuguccgcccgccucgagagcgucgaggugaacuccaugcugaccaucagcgacgaggcgcugcagcucgccaccaucuccagcuucaacggcgacggguacaacuucaccaacgugcugggcgucuccguguacgacccggccagccggcgcgugguccagaagcgguccuucaucgaggaccuccucuucaacaagguggugacgaacgggcugggcaccgucgacgaggacuacaagcgcugcagcaacgggcgcuccguggccgaccuggucugcgcgcaguacuacagcggcgugauggugcuccccggcgucguggacgccgagaagcugcacauguacuccgccagccugaucgggggcauggugcucgggggcuucaccuccgccgccgcgcugcccuucagcuacgccguccaggcccggcugaacuaccucgcccugcagaccgacgugcugcagcgcaaccagcagcuccuggccgagagcuucaacuccgcgaucggcaacaucacgagcgccuucgaguccgugaaggaggccaucagccagaccuccaaggggcugaacaccgucgcccacgcccucaccaaggugcaggagguggucaacagccagggcgcggcccugacccagcugacggugcagcuccagcacaacuuccaggccaucuccagcuccaucgacgacaucuacagccggcuggacccgcccuccgccgacgcccagguggaccgccugaucaccgggcggcucagcgcccugaacgccuucgucgcccagacccugaccaaguacacggaggugcaggccucccgcaagcucgcgcagcagaaggugaacgagugcgucaagagccagucccagcgguacggcuucugcgggggcgacggcgagcacaucuucagccuggugcaggccgcgccccaggggcuccuguuccugcacaccgugcugguccccuccgacuucguggacgugaucgccaucgccggccucugcgucaacgacgagaucgcgcugacccugcgcgagcccgggcucgugcuguucacccacgagcugcagaaccacacggccaccgaguacuucgugagcucccggcgcauguucgagccgcggaagcccaccgucagcgacuucgugcagaucgagagcugcguggucaccuacgugaaccucacgcgcgaccagcugcccgacgugauccccgacuacaucgacgucaacaagacccuguacgagauccucgccucccugccgaaccggaccggccccagccugccccucgacguguucaacgccaccuaccugaaccugacgggggagaucgccgaccucgagcagcgcuccgagagccugcggaacaccaccgaggagcugcagucccucaucuacaacaucaacaacacccugguggaccuggaguggcucaaccgcgucgagacgugaggacuaguuauaagacugacuagcccgaugggccucccaacgggcccuccuccccuccuugcaccgagauuaauaaaaaaaaaaaaaaaaaaaaaaaaaaaaaaaaaaaaaaaaaaaaaaaaaaaaaaaaaaaaaaaaugcaucccccccccccccccccccccccccccccccaaaggcucuuuucagagccaccagaauu

SEQ ID NO: 15171 - RNA, 4267 nt, Artificial Sequence
  PEDV/NPL-PEDv/2013/P10__AHZ94887.1 spike protein mRNA gc (variant)
aggagaaagcuuaccaugaagucccugaccuacuucuggcuguuccugcccgugcugagcacccucagccugccgcaggacgucacgcgcugcuccgccaacaccaacuuccggcgcuucuucagcaaguucaacgugcaggcccccgcgguggucgugcugggcggguaccuccccaucggcgagaaccagggggugaacuccaccugguacugcgccggccagcaccccaccgccagcgggguccacggcaucuucgugucccacauccggggcgggcacggcuucgagaucgggaucagccaggagccguucgaccccuccggcuaccagcuguaccugcacaaggccacgaacgggaacaccaacgccaccgcgcgccuccggaucugccaguuccccagcaucaagacccugggccccacggccaacaacgacgugaccaccggccgcaacugccuguucaacaaggccaucccggcccacauguccgagcacagcgucguggggaucaccugggacaacgaccgggugacggucuucuccgacaagaucuacuacuucuacuucaagaacgacuggagccgcguggcgaccaagugcuacaacuccggcgggugcgccaugcaguacguguacgagcccaccuacuacaugcucaacgucaccagcgccggcgaggacggcaucuccuaccagcccugcacggccaacugcaucggguacgccgcgaacguguucgccaccgagcccaacggccacaucccggagggguucagcuucaacaacugguuccugcuguccaacgacagcacccucgugcacggcaaggucgugagcaaccagccccugcuggugaacugccuccuggccauccccaagaucuacgggcugggccaguucuucuccuucaaccagaccaucgacggcgucugcaacggggccgccgugcagcgggcgcccgaggcccuccgcuucaacaucaacgacaucagcgugauccuggccgagggcuccaucguccugcacacggcccucgggaccaacuucagcuucgugugcuccaacagcuccaacccgcaccuggccaccuucgcgaucccccugggcgccacccagguccccuacuacugcuucuucaagguggacacguacaacagcaccguguacaaguuccucgccguccugcccccgaccgugcgggagaucgugaucaccaaguacggggacgucuacgugaacggcuucggcuaccugcaccucgggcugcuggacgccgugacgaucaacuucaccggccacgggaccgacgacgacgucuccggcuucuggaccaucgccagcacgaacuucguggacgcgcucaucgaggugcaggggaccgccauccagcgcauccuguacugcgacgaccccgucucccagcugaagugcagccagguggccuucgaccucgacgacggcuucuacaccaucuccagccggaaccugcugucccacgagcagcccaucagcuucgugacccuccccuccuucaacgaccacagcuucgucaacaucacgguguccgccagcuucggcgggcacagcggcgcgaaccugaucgccuccgacaccaccaucaacggguucagcuccuucugcguggacacccgccaguucaccaucagccuguucuacaacgucacgaacuccuacggcuacgugagcaagucccaggacagcaacugcccguucacccuccaguccgugaacgacuaccugagcuucuccaaguucugcgucagcaccucccugcucgccagcgccugcaccaucgaccuguucggcuaccccgaguucggguccggcgugaaguucacgagccuguacuuccaguucaccaagggggagcugaucaccggcacccccaagccccucgagggggugacggacgucuccuucaugacccuggacgugugcaccaaguacaccaucuacggcuucaagggcgaggggaucaucacgcugaccaacagcagcuuccucgccggcguguacuacaccuccgacagcgggcagcugcuggcguucaagaacgucaccuccggcgccguguacagcgugacgccgugcuccuucagcgagcaggccgccuacgucgacgacgacaucgugggggugaucuccagccucuccagcuccaccuucaacagcacccgggagcugcccggcuucuucuaccacuccaacgacggcagcaacugcaccgagcccguccugguguacuccaacaucggggugugcaagagcggcuccaucggguacgucccgagccaguccggccaggugaagaucgcccccacggugaccgggaacaucagcauccccaccaacuucagcauguccauccgcaccgaguaccuccagcuguacaacacgcccgucagcguggacugcgcgaccuacgugugcaacggcaacucccggugcaagcagcugcucacccaguacaccgccgccugcaagacgaucgagagcgcccugcagcuguccgcccgccucgagagcgucgaggugaacuccaugcugaccaucagcgacgaggcgcugcagcucgccaccaucuccagcuucaacggcgacggguacaacuucaccaacgugcugggcgucuccguguacgacccggccagccggcgcgugguccagaagcgguccuucaucgaggaccuccucuucaacaagguggugacgaacgggcugggcaccgucgacgaggacuacaagcgcugcagcaacgggcgcuccguggccgaccuggucugcgcgcaguacuacagcggcgugauggugcuccccggcgucguggacgccgagaagcugcacauguacuccgccagccugaucgggggcauggugcucgggggcuucaccuccgccgccgcgcugcccuucagcuacgccguccaggcccggcugaacuaccucgcccugcagaccgacgugcugcagcgcaaccagcagcuccuggccgagagcuucaacuccgcgaucggcaacaucacgagcgccuucgaguccgugaaggaggccaucagccagaccuccaaggggcugaacaccgucgcccacgcccucaccaaggugcaggagguggucaacagccagggcgcggcccugacccagcugacggugcagcuccagcacaacuuccaggccaucuccagcuccaucgacgacaucuacagccggcuggacccgcccuccgccgacgcccagguggaccgccugaucaccgggcggcucagcgcccugaacgccuucgucgcccagacccugaccaaguacacggaggugcaggccucccgcaagcucgcgcagcagaaggugaacgagugcgucaagagccagucccagcgguacggcuucugcgggggcgacggcgagcacaucuucagccuggugcaggccgcgccccaggggcuccuguuccugcacaccgugcugguccccuccgacuucguggacgugaucgccaucgccggccucugcgucaacgacgagaucgcgcugacccugcgcgagcccgggcucgugcuguucacccacgagcugcagaaccacacggccaccgaguacuucgugagcucccggcgcauguucgagccgcggaagcccaccgucagcgacuucgugcagaucgagagcugcguggucaccuacgugaaccucacgcgcgaccagcugcccgacgugauccccgacuacaucgacgucaacaagacccuguacgagauccucgccucccugccgaaccggaccggccccagccugccccucgacguguucaacgccaccuaccugaaccugacgggggagaucgccgaccucgagcagcgcuccgagagccugcggaacaccaccgaggagcugcagucccucaucuacaacaucaacaacacccugguggaccuggaguggcucaaccgcgucgagacgggcggcuacauccccgaggcgccgcgggacgggcaggccuacgugcgcaaggacggcgagugggugcugcugagcaccuucugaggacuaguuauaagacugacuagcccgaugggccucccaacgggcccuccuccccuccuugcaccgagauuaauaaaaaaaaaaaaaaaaaaaaaaaaaaaaaaaaaaaaaaaaaaaaaaaaaaaaaaaaaaaaaaaaugcaucccccccccccccccccccccccccccccccaaaggcucuuuucagagccaccagaauu

SEQ ID NO: 15172 - RNA, 4303 nt, Artificial Sequence
  MHV/S__BAK18575.1 spike protein mRNA gc (1-1361)
aggagaaagcuuaccaugcugagcguguucauccucuuccugcccuccugccugggcuacaucggggacuuccgcugcaucaaccucgucaacaccgacaccagcaacgccuccgccccgagcguguccacggagguggucgacgugagcaagggcaucgggaccuacuacgugcuggaccgggucuaccugaacgcgacccuccugcugaccggcuacuaccccguggacggguccaacuaccgcaaccucgcccugacgggcaccaacacccugagccucaacugguacaagccgcccuuccuguccgaguucaacgacggcaucuucgccaaggugaagaaccugaaggccagccuccccaaggacuccaccagcuacuuccccacgaucgucaucggguccaacuucgugaccaccagcuacaccgugguccuggagcccuacaacggcaucaucauggccuccaucugccaguacacgaucugccugcuccccuacaccgacugcaagccgaacaccgggggcaacaagcugaucggguucuggcacaucgaccugaagucccccgugugcauccucaagcggaacuucaccuucaacgugaacgcggacuggcuguacuuccacuucuaccagcagggcggcacguucuacgccuacuacgccgacgccggguccgcgaccaccuuccuguucagcuccuacaucggcgacguccucacccaguacuucgugcugcccuucgugugcacgcccaccaccaccggggucuucagcccgcaguacugggugacgccccuggugaagcgccaguaccucuucaacuucaaccagaagggcaccaucaccagcgccgucgacugcgccuccagcuacaccuccgagaucaagugcaagacgcagagcaugaaccccaacaccggcguguacgaccuguccggguacaccgugcagcccgucggccugguguaccggcgcguccggaaccucccggacugccgcaucgaggacuggcuggccgccaagaccgugcccagcccccugaacugggagcggaagacguuccagaacugcaacuucaaccucuccagccugcugcgccucgugcaggcggggucccugagcugcuccaacaucgacgccgccaaggucuacggcaugugcuucgggagcauguccaucgacaaguucgccauccccaacagccggcgcguggaccugcagcucggcaacuccggcuuccugcagagcuucaacuacaagaucgacacccgggccaccuccugccagcuguacuacagccucgcgcaguccaacgugaccgucaacaaccacaacccgagcagcuggaaccgccgguacggguucaacgacguggccacguucggccgcgggaagcacgacguggccuacgccgaggccugcuucaccgucggcgcguccuacugccccugcgccaaccccagcaucgugucccccugcaccaccgggaagccgaaguucgccaacugccccaccggcacgaccaaccgggagugcaacgugcuggcccugggcagcaaccucuucaagugcgacugcacgugcaaccccagcccccugaccaccuacgaccugcgcugccugcaggggcggagcaugcucggcgucggggaccacugcgagggccugggggugcuggaggacaagugcggcggcuccaacacgugcaacugcagcgccgacgcguucguggggugggccaaggacuccugccucagcaacggccgcugccacaucuucuccaaccugaugcugaacgggaucaacagcggcacgaccugcuccaccgaccuccagcugccgaacaccgaggucgugaccggcaucugcgugaaguacgaccuguacgggaucaccggccagggggucuucaaggaggugaaggccgacuacuacaacagcuggcagaaccuccuguacgacgugaacggcaaccugaacggguuccgggacaucgucaccaacaagaccuaccucacccgcuccugcuacagcggccgcguguccgccgcguaccaccaggacgcccccgagcccgcccugcuguaccggaaccucaagugcgacuacguguucaacaacaacaucuuccgcgaggagaccccgcugaacuacuucgacagcuaccugggcugcgucgugaacgccgacaacagcacggagcaggccguggacgcgugcgaccuccggaugggguccggccugugcgucaacuacagcaccgcccaccgcgcccggaccuccgugagcaccggguacaagcugacgaccuucgagcccuucaccguguccaucgucaacgacagcguggaguccgugggcgggcucuacgagaugcagauccccaccaacuucacgaucgccagccaccaggaguucauccagacccgcgcccccaaggucaccaucgacugcgcggccuucgugugcggcgacuacaccacgugccggcagcagcugguggaguacggcuccuucugcgacaacaucaacgccauccugggggaggucaacaaccucaucgacaccaugcagcuccagguggccagcgcccugauccagggcgugacccucuccagccgccuggcggacgggaucuccggccagaucgacgacaucaacuucagcccgcugcucgggugccugggcucccagugcagcgagggcaccauggccgcccaggggcgguccacggucgaggaccugcuguucgacaaggugaagcugagcgacgugggcuucgucgaggccuacaacaacugcaccgggggccaggaggugcgcgaccugcucugcgugcaguccuucaacgggaucaagguccugccgcccgugcugagcgagaaccaggugagcggcuacaccgcgggcgccaccgccuccagcauguucccgcccugguccgccgccgcggggguccccuucagccucuccgugcaguaccggaucaacggccugggggugacgaugaacguccugagcgagaaccagaagaugaucgccuccgccuucaacaacgccaucggcgccauccaggagggcuucgacgcgaccaacagcgcccucgccaagauccaguccguggucaacgccaacgccgaggcgcugaacaaccugcucaaccagcugagcaaccgcuucggggccaucuccgccagccugcaggagauccucucccggcuggacgcccuggaggcgcaggcccagaucgaccgccucaucaacggccggcugaccgcccugaacgccuacgugagcaagcagcucuccgacaugacccugaucaaggugagcgccgcgcaggccaucgagaaggucaacgagugcgugaagucccagagcccccgcaucaacuucugcgggaacggcaaccacauccugucccucgugcagaacgcccccuacgggcuguacuuccugcacuucagcuacguccccaccagcuucacgaccgccaacgugucccccggccucugcaucagcggcgaccgggggcuggcccccaaggcgggcuacuucgugcaggacgacggggaguggaaguucaccggcuccaacuacuacuaccccgagccgaucaccgacaagaacagcgucgugauguccagcugcgccgugaacuacacgaaggcccccgaggucuuccugaacaccuccaucagcaaccuccccgacuucaaggaggagcuggacaagugguucaagaaccagaccuccguggcccccgaccugagccucgacuucgagaagcugaacgugaccuuccuggaccucuccgacgagaugaaccgcauccaggaggccaucaagaagcugaacgagagcuacaucaaccugaaggagaucgggacguacgagauguacgucaaguggccgugguacguguggcuccugaucggccuggcgggcguggccgucugcgugcuccuguucuucaucugcugcugcaccgggugcggcuccugcugcuucaagaagugcgggaacugcugcgacgaguacggcgggcaccaggacagcaucgugauccacaacaucuccagccacgaggacugaggacuaguuauaagacugacuagcccgaugggccucccaacgggcccuccuccccuccuugcaccgagauuaauaaaaaaaaaaaaaaaaaaaaaaaaaaaaaaaaaaaaaaaaaaaaaaaaaaaaaaaaaaaaaaaaugcaucccccccccccccccccccccccccccccccaaaggcucuuuucagagccaccagaauu

SEQ ID NO: 15173 - RNA, 4303 nt, Artificial Sequence
  MHV/S__BAK18575.1 spike protein mRNA gc (1-1361)(A1073P_L1074P)
aggagaaagcuuaccaugcugagcguguucauccucuuccugcccuccugccugggcuacaucggggacuuccgcugcaucaaccucgucaacaccgacaccagcaacgccuccgccccgagcguguccacggagguggucgacgugagcaagggcaucgggaccuacuacgugcuggaccgggucuaccugaacgcgacccuccugcugaccggcuacuaccccguggacggguccaacuaccgcaaccucgcccugacgggcaccaacacccugagccucaacugguacaagccgcccuuccuguccgaguucaacgacggcaucuucgccaaggugaagaaccugaaggccagccuccccaaggacuccaccagcuacuuccccacgaucgucaucggguccaacuucgugaccaccagcuacaccgugguccuggagcccuacaacggcaucaucauggccuccaucugccaguacacgaucugccugcuccccuacaccgacugcaagccgaacaccgggggcaacaagcugaucggguucuggcacaucgaccucaagagccccgugugcauccucaagcggaacuucaccuucaacgugaacgcggacuggcuguacuuccacuucuaccagcagggcggcacguucuacgccuacuacgccgacgccggguccgcgaccaccuuccuguucagcuccuacaucggcgacguccucacccaguacuucgugcugcccuucgugugcacgcccaccaccaccggggucuucagcccgcaguacugggugacgccccuggugaagcgccaguaccucuucaacuucaaccagaagggcaccaucaccagcgccgucgacugcgccuccagcuacaccuccgagaucaagugcaagacgcagagcaugaaccccaacaccggcguguacgaccuguccggguacaccgugcagcccgucggccugguguaccggcgcguccggaaccucccggacugccgcaucgaggacuggcuggccgccaagaccgugcccagcccccugaacugggagcggaagacguuccagaacugcaacuucaaccucuccagccugcugcgccucgugcaggcggggucccugagcugcuccaacaucgacgccgccaaggucuacggcaugugcuucgggagcauguccaucgacaaguucgccauccccaacagccggcgcguggaccugcagcucggcaacuccggcuuccugcagagcuucaacuacaagaucgacacccgggccaccuccugccagcuguacuacagccucgcgcaguccaacgugaccgucaacaaccacaacccgagcagcuggaaccgccgguacggguucaacgacguggccacguucggccgcgggaagcacgacguggccuacgccgaggccugcuucaccgucggcgcguccuacugccccugcgccaaccccagcaucgugucccccugcaccaccgggaagccgaaguucgccaacugccccaccggcacgaccaaccgggagugcaacgugcuggcccugggcagcaaccucuucaagugcgacugcacgugcaaccccagcccccugaccaccuacgaccugcgcugccugcaggggcgguccaugcucggcgucggggaccacugcgagggccugggggugcuggaggacaagugcggcggcuccaacacgugcaacugcagcgccgacgcguucguggggugggccaaggacuccugccucagcaacggccgcugccacaucuucuccaaccugaugcugaacgggaucaacagcggcacgaccugcuccaccgaccuccagcugccgaacaccgaggucgugaccggcaucugcgugaaguacgaccuguacgggaucaccggccagggggucuucaaggaggugaaggccgacuacuacaacagcuggcagaaccuccuguacgacgugaacggcaaccugaacggguuccgggacaucgucaccaacaagaccuaccucacccgcuccugcuacagcggccgcguguccgccgcguaccaccaggacgcccccgagcccgcccugcuguaccggaaccucaagugcgacuacguguucaacaacaacaucuuccgcgaggagaccccgcugaacuacuucgacagcuaccugggcugcgucgugaacgccgacaacagcacggagcaggccguggacgcgugcgaccuccggaugggguccggccugugcgucaacuacagcaccgcccaccgcgcccggaccuccgugagcaccggguacaagcugacgaccuucgagcccuucaccguguccaucgucaacgacagcguggaguccgugggcgggcucuacgagaugcagauccccaccaacuucacgaucgccagccaccaggaguucauccagacccgcgcccccaaggucaccaucgacugcgcggccuucgugugcggcgacuacaccacgugccggcagcagcugguggaguacggcuccuucugcgacaacaucaacgccauccugggggaggucaacaaccucaucgacaccaugcagcuccagguggccagcgcccugauccagggcgugacccucuccagccgccuggcggacgggaucuccggccagaucgacgacaucaacuucagcccgcugcucgggugccugggcucccagugcagcgagggcaccauggccgcccaggggcgguccacggucgaggaccugcuguucgacaaggugaagcugagcgacgugggcuucgucgaggccuacaacaacugcaccgggggccaggaggugcgcgaccugcucugcgugcaguccuucaacgggaucaagguccugccgcccgugcugagcgagaaccaggugagcggcuacaccgcgggcgccaccgccuccagcauguucccgcccugguccgccgccgcggggguccccuucagccucuccgugcaguaccggaucaacggccugggggugacgaugaacguccugagcgagaaccagaagaugaucgccuccgccuucaacaacgccaucggcgccauccaggagggcuucgacgcgaccaacagcgcccucgccaagauccaguccguggucaacgccaacgccgaggcgcugaacaaccugcucaaccagcugagcaaccgcuucggggccaucuccgccagccugcaggagauccucucccggcuggacccgcccgaggcccaggcgcagaucgaccgccugaucaacggccggcucaccgcccugaacgccuacgugagcaagcagcuguccgacaugacccucaucaaggugagcgccgcccaggcgaucgagaaggucaacgagugcgugaagucccagagcccccgcaucaacuucugcgggaacggcaaccacauccugucccuggugcagaacgcccccuacgggcucuacuuccugcacuucagcuacguccccaccagcuucacgaccgccaacgugucccccggccugugcaucagcggcgaccgggggcucgcccccaaggccggcuacuucgugcaggacgacggggaguggaaguucaccggcuccaacuacuacuaccccgagcccaucaccgacaagaacagcgucgugauguccagcugcgcggugaacuacacgaaggcccccgaggucuuccugaacaccuccaucagcaaccugccggacuucaaggaggagcucgacaagugguucaagaaccagaccuccguggcccccgaccugagccuggacuucgagaagcucaacgugaccuuccuggaccuguccgacgagaugaaccgcauccaggaggccaucaagaagcucaacgagagcuacaucaaccugaaggagaucgggacguacgagauguacgucaaguggcccugguacguguggcugcucaucggccuggccggcguggcggucugcgugcugcuguucuucaucugcugcugcaccgggugcggcuccugcugcuucaagaagugcgggaacugcugcgacgaguacggcgggcaccaggacagcaucgugauccacaacaucuccagccacgaggacugaggacuaguuauaagacugacuagcccgaugggccucccaacgggcccuccuccccuccuugcaccgagauuaauaaaaaaaaaaaaaaaaaaaaaaaaaaaaaaaaaaaaaaaaaaaaaaaaaaaaaaaaaaaaaaaaugcaucccccccccccccccccccccccccccccccaaaggcucuuuucagagccaccagaauu

SEQ ID NO: 15174 - RNA, 4111 nt, Artificial Sequence
  MHV/S__BAK18575.1 spike protein mRNA gc (variant)
aggagaaagcuuaccaugcugagcguguucauccucuuccugcccuccugccugggcuacaucggggacuuccgcugcaucaaccucgucaacaccgacaccagcaacgccuccgccccgagcguguccacggagguggucgacgugagcaagggcaucgggaccuacuacgugcuggaccgggucuaccugaacgcgacccuccugcugaccggcuacuaccccguggacggguccaacuaccgcaaccucgcccugacgggcaccaacacccugagccucaacugguacaagccgcccuuccuguccgaguucaacgacggcaucuucgccaaggugaagaaccugaaggccagccuccccaaggacuccaccagcuacuuccccacgaucgucaucggguccaacuucgugaccaccagcuacaccgugguccuggagcccuacaacggcaucaucauggccuccaucugccaguacacgaucugccugcuccccuacaccgacugcaagccgaacaccgggggcaacaagcugaucggguucuggcacaucgaccugaagucccccgugugcauccucaagcggaacuucaccuucaacgugaacgcggacuggcuguacuuccacuucuaccagcagggcggcacguucuacgccuacuacgccgacgccggguccgcgaccaccuuccuguucagcuccuacaucggcgacguccucacccaguacuucgugcugcccuucgugugcacgcccaccaccaccggggucuucagcccgcaguacugggugacgccccuggugaagcgccaguaccucuucaacuucaaccagaagggcaccaucaccagcgccgucgacugcgccuccagcuacaccuccgagaucaagugcaagacgcagagcaugaaccccaacaccggcguguacgaccuguccggguacaccgugcagcccgucggccugguguaccggcgcguccggaaccucccggacugccgcaucgaggacuggcuggccgccaagaccgugcccagcccccugaacugggagcggaagacguuccagaacugcaacuucaaccucuccagccugcugcgccucgugcaggcggggucccugagcugcuccaacaucgacgccgccaaggucuacggcaugugcuucgggagcauguccaucgacaaguucgccauccccaacagccggcgcguggaccugcagcucggcaacuccggcuuccugcagagcuucaacuacaagaucgacacccgggccaccuccugccagcuguacuacagccucgcgcaguccaacgugaccgucaacaaccacaacccgagcagcuggaaccgccgguacggguucaacgacguggccacguucggccgcgggaagcacgacguggccuacgccgaggccugcuucaccgucggcgcguccuacugccccugcgccaaccccagcaucgugucccccugcaccaccgggaagccgaaguucgccaacugccccaccggcacgaccaaccgggagugcaacgugcuggcccugggcagcaaccucuucaagugcgacugcacgugcaaccccagcccccugaccaccuacgaccugcgcugccugcaggggcggagcaugcucggcgucggggaccacugcgagggccugggggugcuggaggacaagugcggcggcuccaacacgugcaacugcagcgccgacgcguucguggggugggccaaggacuccugccucagcaacggccgcugccacaucuucuccaaccugaugcugaacgggaucaacagcggcacgaccugcuccaccgaccuccagcugccgaacaccgaggucgugaccggcaucugcgugaaguacgaccuguacgggaucaccggccagggggucuucaaggaggugaaggccgacuacuacaacagcuggcagaaccuccuguacgacgugaacggcaaccugaacggguuccgggacaucgucaccaacaagaccuaccucacccgcuccugcuacagcggccgcguguccgccgcguaccaccaggacgcccccgagcccgcccugcuguaccggaaccucaagugcgacuacguguucaacaacaacaucuuccgcgaggagaccccgcugaacuacuucgacagcuaccugggcugcgucgugaacgccgacaacagcacggagcaggccguggacgcgugcgaccuccggaugggguccggccugugcgucaacuacagcaccgcccaccgcgcccggaccuccgugagcaccggguacaagcugacgaccuucgagcccuucaccguguccaucgucaacgacagcguggaguccgugggcgggcucuacgagaugcagauccccaccaacuucacgaucgccagccaccaggaguucauccagacccgcgcccccaaggucaccaucgacugcgcggccuucgugugcggcgacuacaccacgugccggcagcagcugguggaguacggcuccuucugcgacaacaucaacgccauccugggggaggucaacaaccucaucgacaccaugcagcuccagguggccagcgcccugauccagggcgugacccucuccagccgccuggcggacgggaucuccggccagaucgacgacaucaacuucagcccgcugcucgggugccugggcucccagugcagcgagggcaccauggccgcccaggggcgguccacggucgaggaccugcuguucgacaaggugaagcugagcgacgugggcuucgucgaggccuacaacaacugcaccgggggccaggaggugcgcgaccugcucugcgugcaguccuucaacgggaucaagguccugccgcccgugcugagcgagaaccaggugagcggcuacaccgcgggcgccaccgccuccagcauguucccgcccugguccgccgccgcggggguccccuucagccucuccgugcaguaccggaucaacggccugggggugacgaugaacguccugagcgagaaccagaagaugaucgccuccgccuucaacaacgccaucggcgccauccaggagggcuucgacgcgaccaacagcgcccucgccaagauccaguccguggucaacgccaacgccgaggcgcugaacaaccugcucaaccagcugagcaaccgcuucggggccaucuccgccagccugcaggagauccucucccggcuggacccgcccgaggcccaggcgcagaucgaccgccugaucaacggccggcucaccgcccugaacgccuacgugagcaagcagcuguccgacaugacccucaucaaggugagcgccgcccaggcgaucgagaaggucaacgagugcgugaagucccagagcccccgcaucaacuucugcgggaacggcaaccacauccugucccuggugcagaacgcccccuacgggcucuacuuccugcacuucagcuacguccccaccagcuucacgaccgccaacgugucccccggccugugcaucagcggcgaccgggggcucgcccccaaggccggcuacuucgugcaggacgacggggaguggaaguucaccggcuccaacuacuacuaccccgagcccaucaccgacaagaacagcgucgugauguccagcugcgcggugaacuacacgaaggcccccgaggucuuccugaacaccuccaucagcaaccugccggacuucaaggaggagcucgacaagugguucaagaaccagaccuccguggcccccgaccugagccuggacuucgagaagcucaacgugaccuuccuggaccuguccgacgagaugaaccgcauccaggaggccaucaagaagcucaacgagagcuacaucaaccugaaggagaucgggacguacgagaugugaggacuaguuauaagacugacuagcccgaugggccucccaacgggcccuccuccccuccuugcaccgagauuaauaaaaaaaaaaaaaaaaaaaaaaaaaaaaaaaaaaaaaaaaaaaaaaaaaaaaaaaaaaaaaaaaugcaucccccccccccccccccccccccccccccccaaaggcucuuuucagagccaccagaauu

SEQ ID NO: 15175 - RNA, 4192 nt, Artificial Sequence
  MHV/S__BAK18575.1 spike protein mRNA gc (variant)
aggagaaagcuuaccaugcugagcguguucauccucuuccugcccuccugccugggcuacaucggggacuuccgcugcaucaaccucgucaacaccgacaccagcaacgccuccgccccgagcguguccacggagguggucgacgugagcaagggcaucgggaccuacuacgugcuggaccgggucuaccugaacgcgacccuccugcugaccggcuacuaccccguggacggguccaacuaccgcaaccucgcccugacgggcaccaacacccugagccucaacugguacaagccgcccuuccuguccgaguucaacgacggcaucuucgccaaggugaagaaccugaaggccagccuccccaaggacuccaccagcuacuuccccacgaucgucaucggguccaacuucgugaccaccagcuacaccgugguccuggagcccuacaacggcaucaucauggccuccaucugccaguacacgaucugccugcuccccuacaccgacugcaagccgaacaccgggggcaacaagcugaucggguucuggcacaucgaccugaagucccccgugugcauccucaagcggaacuucaccuucaacgugaacgcggacuggcuguacuuccacuucuaccagcagggcggcacguucuacgccuacuacgccgacgccggguccgcgaccaccuuccuguucagcuccuacaucggcgacguccucacccaguacuucgugcugcccuucgugugcacgcccaccaccaccggggucuucagcccgcaguacugggugacgccccuggugaagcgccaguaccucuucaacuucaaccagaagggcaccaucaccagcgccgucgacugcgccuccagcuacaccuccgagaucaagugcaagacgcagagcaugaaccccaacaccggcguguacgaccuguccggguacaccgugcagcccgucggccugguguaccggcgcguccggaaccucccggacugccgcaucgaggacuggcuggccgccaagaccgugcccagcccccugaacugggagcggaagacguuccagaacugcaacuucaaccucuccagccugcugcgccucgugcaggcggggucccugagcugcuccaacaucgacgccgccaaggucuacggcaugugcuucgggagcauguccaucgacaaguucgccauccccaacagccggcgcguggaccugcagcucggcaacuccggcuuccugcagagcuucaacuacaagaucgacacccgggccaccuccugccagcuguacuacagccucgcgcaguccaacgugaccgucaacaaccacaacccgagcagcuggaaccgccgguacggguucaacgacguggccacguucggccgcgggaagcacgacguggccuacgccgaggccugcuucaccgucggcgcguccuacugccccugcgccaaccccagcaucgugucccccugcaccaccgggaagccgaaguucgccaacugccccaccggcacgaccaaccgggagugcaacgugcuggcccugggcagcaaccucuucaagugcgacugcacgugcaaccccagcccccugaccaccuacgaccugcgcugccugcaggggcggagcaugcucggcgucggggaccacugcgagggccugggggugcuggaggacaagugcggcggcuccaacacgugcaacugcagcgccgacgcguucguggggugggccaaggacuccugccucagcaacggccgcugccacaucuucuccaaccugaugcugaacgggaucaacagcggcacgaccugcuccaccgaccuccagcugccgaacaccgaggucgugaccggcaucugcgugaaguacgaccuguacgggaucaccggccagggggucuucaaggaggugaaggccgacuacuacaacagcuggcagaaccuccuguacgacgugaacggcaaccugaacggguuccgggacaucgucaccaacaagaccuaccucacccgcuccugcuacagcggccgcguguccgccgcguaccaccaggacgcccccgagcccgcccugcuguaccggaaccucaagugcgacuacguguucaacaacaacaucuuccgcgaggagaccccgcugaacuacuucgacagcuaccugggcugcgucgugaacgccgacaacagcacggagcaggccguggacgcgugcgaccuccggaugggguccggccugugcgucaacuacagcaccgcccaccgcgcccggaccuccgugagcaccggguacaagcugacgaccuucgagcccuucaccguguccaucgucaacgacagcguggaguccgugggcgggcucuacgagaugcagauccccaccaacuucacgaucgccagccaccaggaguucauccagacccgcgcccccaaggucaccaucgacugcgcggccuucgugugcggcgacuacaccacgugccggcagcagcugguggaguacggcuccuucugcgacaacaucaacgccauccugggggaggucaacaaccucaucgacaccaugcagcuccagguggccagcgcccugauccagggcgugacccucuccagccgccuggcggacgggaucuccggccagaucgacgacaucaacuucagcccgcugcucgggugccugggcucccagugcagcgagggcaccauggccgcccaggggcgguccacggucgaggaccugcuguucgacaaggugaagcugagcgacgugggcuucgucgaggccuacaacaacugcaccgggggccaggaggugcgcgaccugcucugcgugcaguccuucaacgggaucaagguccugccgcccgugcugagcgagaaccaggugagcggcuacaccgcgggcgccaccgccuccagcauguucccgcccugguccgccgccgcggggguccccuucagccucuccgugcaguaccggaucaacggccugggggugacgaugaacguccugagcgagaaccagaagaugaucgccuccgccuucaacaacgccaucggcgccauccaggagggcuucgacgcgaccaacagcgcccucgccaagauccaguccguggucaacgccaacgccgaggcgcugaacaaccugcucaaccagcugagcaaccgcuucggggccaucuccgccagccugcaggagauccucucccggcuggacccgcccgaggcccaggcgcagaucgaccgccugaucaacggccggcucaccgcccugaacgccuacgugagcaagcagcuguccgacaugacccucaucaaggugagcgccgcccaggcgaucgagaaggucaacgagugcgugaagucccagagcccccgcaucaacuucugcgggaacggcaaccacauccugucccuggugcagaacgcccccuacgggcucuacuuccugcacuucagcuacguccccaccagcuucacgaccgccaacgugucccccggccugugcaucagcggcgaccgggggcucgcccccaaggccggcuacuucgugcaggacgacggggaguggaaguucaccggcuccaacuacuacuaccccgagcccaucaccgacaagaacagcgucgugauguccagcugcgcggugaacuacacgaaggcccccgaggucuuccugaacaccuccaucagcaaccugccggacuucaaggaggagcucgacaagugguucaagaaccagaccuccguggcccccgaccugagccuggacuucgagaagcucaacgugaccuuccuggaccuguccgacgagaugaaccgcauccaggaggccaucaagaagcucaacgagagcuacaucaaccugaaggagaucgggacguacgagaugggcggcuacauccccgaggcgccccgggacgggcaggccuacguccgcaaggacggcgagugggugcugcucuccaccuucugaggacuaguuauaagacugacuagcccgaugggccucccaacgggcccuccuccccuccuugcaccgagauuaauaaaaaaaaaaaaaaaaaaaaaaaaaaaaaaaaaaaaaaaaaaaaaaaaaaaaaaaaaaaaaaaaugcaucccccccccccccccccccccccccccccccaaaggcucuuuucagagccaccagaauu

SEQ ID NO: 15176 - RNA, 3985 nt, Artificial Sequence
  SARS-CoV__P59594.1 spike protein mRNA human (1-1255)
aggagaaagcuuaccauguucaucuuucugcucuuucuuacccugacaagcggcuccgacuuggauagaugcacuacguuugacgaugugcaggcccccaacuacacccaacacacaucuucaaugagaggggucuauuacccugacgagauuuuccggagugauacuuuauaucugacccaggaccuauuucucccauucuacagcaauguuacaggauuucauaccauaaaccacacuuucgguaauccggugauccccuuuaaggauggcauuuauuucgcugcaacagaaaaauccaacguagugcgcgggugggucuuuggaucuaccaugaauaacaagucgcagucagugaucauuaucaauaacagcacgaauguugugauacgagccuguaacuucgagcugugcgacaauccuuucuucgcggucaguaaaccaaugggcacucagacccauacaaugaucuucgauaacgcuuuuaauuguacuuucgaauacauuuccgacgccuuuucucuugaugugagcgagaaguccgguaacuucaaacaucugcgugaauuuguauucaagaauaaggacggguuuuuguauguuuacaaaggauaccaacccaucgauguggucagagaccucccuucaggcuucaacacccugaagccaauuuuuaaacugccccucggcaucaacauaacaaauuucagggcaauuuuaaccgccuuuaguccugcucaggacaucugggggacgagcgcagccgcuuauuucgugggauaccugaagccaacuacauuuaugcuuaaauaugaugagaacgguaccauuacugacgccguggauugcucucagaauccguuggcggagcugaaguguuccgucaagucauucgaaaucgacaaaggcaucuaccagacaagcaacuuccggguugugcccaguggggauguagugcgcuuuccuaauauuaccaaccuaugcccauucggagaggucuuuaaugcaacgaaguuccccucuguguaugccugggaaaggaaaaagauauccaacuguguugcugacuacagcgugcucuauaauucgaccuuuuucucuacauuuaaaugcuacggcgucuccgccacuaagcugaacgaucuuuguuucucaaauguguacgcagacaguuuuguaguuaaaggugaugacgugaggcaaaucgcuccugggcagaccggagucauugccgauuauaacuacaagcugccagacgacuucaugggcugcguguuggcguggaauacacggaacaucgaugccacuagcaccggcaauuauaacuacaaguaucgcuaccuccgacacgggaaacugagacccuuugagagggacauauccaacgucccguucucuccugauggaaagcccuguacacccccugcauuaaauugcuauuggccccugaacgacuacgguuuuuacaccacuacgggcauuggguaucagccauaccgggugguugugcucagcuucgagcuucugaaugcucccgccacaguaugcggaccuaaauugucaaccgaucuaaucaagaaccagugugucaauuucaacuuuaauggccugacugguaccggggugcucacaccaaguuccaaacguuuccaaccguuucagcaguucggccgcgacguuagcgauuuuaccgacucugugagagaucccaagacuucagaaauccuggacauuaguccuugcagcuucggaggcgucuccgugaucacaccagggacgaacgcuucuucggagguagccgugcuuuaucaagauguuaauuguaccgacgucagcacugcaauucacgccgaucagcugacacccgcuuggaggauauacuccaccggaaacaauguguuucagacacaggcggguugcuugaucggcgcagaacacguggacacuucauaugagugugacauuccuaucggggccggaaucugcgcuaguuaccauaccgucucucuccugcggagcacgucccaaaagucaauuguugccuauaccaugagcuuaggcgcagauucuuccauagccuacaguaacaauacaaucgcuauuccaacuaacuucagcaucucuauuaccacagaagugaugcccguguccauggccaaaacuucaguagacuguaauauguacaucugcggugauaguaccgagugugcaaaccugcuacuccaguaugggagcuuuugcacgcagcugaaccgagcgcuuucgggcauagcugccgagcaggaccgcaauacaagagaagucuucgcacaagugaagcagauguacaaaaccccgacuuugaaguauuuuggaggcuucaacuucucccagauccugccugauccacucaaacccacaaagaggucuuuuauugaggaccugcuuuucaauaagguuacccuggccgaugcuggguuuaugaaacaguacggagaauguuugggugacaucaacgcccgggaucucauuugcgcacaaaaguucaauggccugacuguguuaccuccccugcuaaccgacgauaugaucgcugccuauacagcggcccucgucagcgggacggcuaccgcaggauggacuuuuggcgccggugcugcccugcagauaccauucgcaaugcagauggcguaccgcuuuaacgggauuggcgugacacagaauguucuuuaugagaaccaaaaacagaucgccaaucaguucaacaaggcuauuucacaaauccaggaaaguuugaccacaacuuccaccgcccugggaaaacuccaggacgugguaaaucagaacgcacaagcucugaauacguuagucaagcagcugucuagcaacuuuggcgccauauccucagugcuuaaugauaucuugagcagacucgacaagguggaggcagagguccagauugacaggcugaucacagggcgucuacagagucugcaaaccuacguuacucagcagcucauucgggccgcugaaauccgagcgucugccaaccuggcagcuaccaaaauguccgagugcgugcuuggacagagcaagagaguagauuucuguggcaaagguuaccacuugaugucguuuccucaagccgccccacaugggguggucuuccugcacgugacauauguuccaucacaggaaaggaacuuuacuaccgcuccggcaauaugccacgagggaaaggccuacuucccucgcgaaggcguguucgucuuuaaugguacaucuugguucauuacgcagcggaacuuuuucaguccccaaaucaucaccacugacaauacauuuguguccggcaacugugauguugugauugggaucauuaauaacaccgucuaugacccauuacagcccgagcucgauagcuucaaagaggaacuggacaaguacuuuaaaaaucauacuucuccugauguagaccuuggagauauaagcggcaucaacgcguccgugguuaauauucagaaggagaucgacagacugaacgaaguggcuaagaauuugaacgagucacucauugaucugcaggagcuagggaaauaugaacaauacaucaaguggccaugguaugucuggcugggauucauagccggccucaucgcaauugugaugguaacaauccugcuuugcuguaugaccaguugcuguagcugcuugaaaggugccuguucuugcggguccuguugcaaguuugacgaggacgauucagaacccgugcugaaaggagucaaguuacacuacacgugaggacuaguuauaagacugacuagcccgaugggccucccaacgggcccuccuccccuccuugcaccgagauuaauaaaaaaaaaaaaaaaaaaaaaaaaaaaaaaaaaaaaaaaaaaaaaaaaaaaaaaaaaaaaaaaaugcaucccccccccccccccccccccccccccccccaaaggcucuuuucagagccaccagaauu

SEQ ID NO: 15177 - RNA, 3985 nt, Artificial Sequence
  SARS-CoV__P59594.1 spike protein mRNA human (1-1255)(K968P_V969P)
aggagaaagcuuaccauguucaucuuucugcuguuccuuacccugacaagcggcuccgacuuggauagaugcacuacguuugacgaugugcaggcccccaacuacacccaacacacaucuucaaugagaggggucuauuacccugacgagauuuuccggagugauacuuuauaucugacccaggaccuauuucucccauucuacagcaauguuacaggauuucauaccauaaaccacacuuucgguaauccggugauccccuuuaaggauggcauuuauuucgcugcaacagaaaaauccaacguagugcgcgggugggucuuuggaucuaccaugaauaacaagucgcagucagugaucauuaucaauaacagcacgaauguugugauacgagccuguaacuucgagcugugcgacaauccauuuuucgcggucaguaaaccaaugggcacucagacccauacaaugaucuucgauaacgcuuuuaauuguacuuucgaauacauuuccgacgccuuuucucuugaugugagcgagaaguccgguaacuucaaacaccuccgugaauuuguauucaagaauaaggacggguuuuuguauguuuacaaaggauaccaacccaucgauguggucagagaccucccuucaggcuucaacacccugaagccaauuuuuaaacugccccucggcaucaacauaacaaauuucagggcaauuuuaaccgccuuuaguccugcucaggacaucugggggacgagcgcagccgcuuauuucgugggauaccugaagccaacuacauuuaugcuuaaauaugaugagaacgguaccauuacugacgccguggauugcucucagaauccguuggcggagcugaaguguuccgucaagucauucgaaaucgacaaaggcaucuaccagacaagcaacuuccggguugugcccaguggggauguagugcgcuuuccuaauauuaccaaccuaugcccauucggagaggucuuuaaugcaacgaaguuccccucuguguaugccugggaaaggaaaaagauauccaacuguguugcugacuacagcgugcucuauaauucgaccuuuuucucuacauuuaaaugcuacggcgucuccgccacuaagcugaacgaucuuuguuucucaaauguguacgcagacaguuuuguaguuaaaggugaugacgugaggcaaaucgcuccugggcagaccggagucauugccgauuauaacuacaagcugccagacgacuucaugggcugcguguuggcguggaauacacggaacaucgaugccacuagcaccggcaauuauaacuacaaguaucgcuaccuccgacaugggaaacugagacccuuugagagggacauauccaacgucccguucucuccugauggaaagcccuguacaccuccugcauuaaauugcuauuggccccugaacgacuacgguuuuuacaccacuacgggcauuggguaucagccauaccgggugguugugcucagcuucgagcuucugaaugcucccgccacaguaugcggaccuaaauugucaaccgaucuaaucaagaaccagugugucaauuucaacuuuaauggccugacugguaccggggugcucacaccaaguuccaaacguuuccaaccguuucagcaguucggccgcgacguuagcgauuuuaccgacucugugagagaucccaagacuucagaaauccuggacauuaguccuugcagcuucggaggcgucuccgugaucacaccagggacgaacgcuucuucggagguagccgugcuuuaucaagauguuaauuguaccgacgucagcacugcaauucacgccgaucagcugacacccgcuuggaggauauacuccaccggaaacaauguguuucagacacaggcggguugcuugaucggcgcagaacacguggacacuucauaugagugugacauuccuaucggggccggaaucugcgcuaguuaccauaccgucucucuccugcggagcacgucccaaaagucaauuguugccuauaccaugagcuuaggcgcagauucuuccauagccuacaguaacaauacaaucgcuauuccaacuaacuucagcaucucuauuaccacagaagugaugcccguguccauggccaaaacuucaguagacuguaauauguacaucugcggugauaguaccgagugugcaaaccugcuacuccaguaugggagcuuuugcacgcagcugaaccgagcgcuuucgggcauagcugccgagcaggaccgcaauacaagagaagucuucgcacaagugaagcagauguacaaaaccccgacuuugaaguauuuuggaggcuucaacuucucccagauccugccugauccacucaaacccacaaagaggucuuuuauugaggaccugcuuuucaauaagguuacccuggccgaugcuggguuuaugaaacaguacggagaauguuugggugacaucaacgcccgggaucucauuugcgcacaaaaguucaauggccugacuguguuaccuccccugcuaaccgacgauaugaucgcugccuauacagcggcccucgucagcgggacggcuaccgcaggauggacuuuuggcgccggugcugcccugcagauaccauucgcaaugcagauggcguaccgcuuuaacgggauuggcgugacacagaauguucuuuaugagaaccaaaaacagaucgccaaucaguucaacaaggcuauuucacaaauccaggaaaguuugaccacaacuuccaccgcccugggaaaacuccaggacgugguaaaucagaacgcacaagcucugaauacguuagucaagcagcugucuagcaacuuuggcgccauauccucagugcuuaaugauaucuugagcagacucgacccucccgaggcagaggugcagauugacaggcugaucacagggcgucuacagagucugcaaaccuacgucacucagcagcucauucgggccgcugaaauccgagcgucugccaaccuggcagcuaccaagauguccgagugcguucuuggacagagcaaaagaguggauuucuguggcaaggguuaccacuugaugucguuuccacaagccgccccgcaugggguaguguuccugcacgucacauaugugccuucacaggaaaggaacuuuacuaccgcucccgcaauaugccacgagggaaaagccuacuucccacgcgaaggcguuuucguguuuaaugguacaucuugguucauuacgcagcggaacuuuuucaguccccaaaucaucaccacugacaauacauuugucuccggcaacugugaugugguuauugggaucauuaauaacaccguguaugacccuuuacagccagagcucgauagcuucaaggaggaacuggacaaauacuuuaagaaucauacuucucccgaugucgaccuuggagauauaagcggcaucaacgcguccguagugaauauucagaaagagaucgacagacugaacgaaguugcuaagaauuugaacgagucacucauugaucugcaggagcuagggaaguaugaacaauacaucaaauggccuugguauguguggcugggauucauagccggccucaucgcaauugucauggugacaauccugcuuugcuguaugaccaguugcuguagcugcuugaagggugccuguucuugcggguccuguugcaaauuugacgaggacgauucagaaccgguacugaagggagugaaauuacacuacacgugaggacuaguuauaagacugacuagcccgaugggccucccaacgggcccuccuccccuccuugcaccgagauuaauaaaaaaaaaaaaaaaaaaaaaaaaaaaaaaaaaaaaaaaaaaaaaaaaaaaaaaaaaaaaaaaaugcaucccccccccccccccccccccccccccccccaaaggcucuuuucagagccaccagaauu

SEQ ID NO: 15178 - RNA, 1798 nt, Artificial Sequence
  SARS-CoV__P59594.1 spike protein mRNA human (1-17_747-1255)
aggagaaagcuuaccauguucaucuuucugcucuuucuuacccugacaagcggcuccgacuuggauagagccuuaucugggauugcugcagagcaggacaggaacacucgggaaguguuugcccaagucaagcagauguacaaaacgcccacccugaaguauuucggagguuuuaauuucucacagauacuaccugauccacucaaaccgacaaagcgcaguuuuaucgaggaccugcuuuucaacaaaguuacucuggcggaugcuggcuuuaugaagcaguacggggaaugcuugggagacauuaaugcccgagaucucaucugugcacaaaaguucaacggccugaccgugcugcccccucucuuaacagacgauaugauugccgcuuauaccgcagcccugguaagcgguacugcuacagccggguggaccuuuggagcgggcgcagcccuucagaucccauucgcuaugcagauggccuaccguuuuaauggcauaggggugacgcagaacgucuuguaugagaaucaaaaacagaucgcaaaccaguucaauaaggcuauuucccagauccaagaaucucugacuaccacaucgacugcccuaggaaaacuccaggacgugguuaaccagaaugcgcaagcccugaacacccuugugaagcagcugucaagcaauuucggugcaauuaguuccgucuugaacgauauccucucuagacuggacaaaguggaggcugagguacagauagauagguuaauuacaggccggcugcagagccuccaaaccuacguuacgcagcagcuuauccgcgccgcugaaauuagagccuccgcaaaucuggccgcuacuaagaugucagagugcguguuggggcagaguaagagggucgacuuuuguggaaaaggcuaucaccuaaugagcuucccccaagcggcaccucauggugugguguuucugcacgucacauacguuccaucucaggaacggaacuucaccacugcccccgcuaucugccaugaggggaaggccuacuuuccucgcgagggaguguucguauuuaacggcacauccugguucaucacccagcgaaauuucuucucaccacagauuauaacgaccgacaacacauuugugagcggcaauugugaugucgugaucgggauuaucaacaauacuguuuaugacccgcuccaacccgaacuggauaguuucaaagaggaacuugacaaguacuuuaaaaaccacaccucuccugauguggaccugggagauauauccgguauuaaugcaagcgucgugaacauccagaaggagaucgacagauugaaugaaguagccaaaaaccucaaugagucgcugauugauuuacaggagcugggcaaguaugaacaguacaucaaguggccaugguauguuuggcuaggguucauugcuggacucauagccaucgugauggucacaauucugcuuugcuguaugacuucuugcuguuccugcuugaaaggcgcauguucaugcgguaguugcuguaaguucgacgaggaugacagcgaacccgugcugaaaggggucaagcuccauuacaccugaggacuaguuauaagacugacuagcccgaugggccucccaacgggcccuccuccccuccuugcaccgagauuaauaaaaaaaaaaaaaaaaaaaaaaaaaaaaaaaaaaaaaaaaaaaaaaaaaaaaaaaaaaaaaaaaugcaucccccccccccccccccccccccccccccccaaaggcucuuuucagagccaccagaauu

SEQ ID NO: 15179 - RNA, 3985 nt, Artificial Sequence
  SARS-CoV/Tor2__NP_828851.1 spike protein mRNA human (1-1255)
aggagaaagcuuaccauguucaucuuucugcuguuccuuacccugacaagcggcuccgacuuggauagaugcacuacguuugacgaugugcaggcccccaacuacacccaacacacaucuucaaugagaggggucuauuacccugacgagauuuuccggagugauacuuuauaucugacccaggaccuauuucucccauucuacagcaauguuacaggauuucauaccauaaaccacacuuucgguaauccggugauccccuuuaaggauggcauuuauuucgcugcaacagaaaaauccaacguagugcgcgggugggucuuuggaucuaccaugaauaacaagucgcagucagugaucauuaucaauaacagcacgaauguugugauacgagccuguaacuucgagcugugcgacaauccauuuuucgcggucaguaaaccaaugggcacucagacccauacaaugaucuucgauaacgcuuuuaauuguacuuucgaauacauuuccgacgccuuuucucuugaugugagcgagaaguccgguaacuucaaacaccuccgugaauuuguauucaagaauaaggacggguuuuuguauguuuacaaaggauaccaacccaucgauguggucagagaccucccuucaggcuucaacacccugaagccaauuuuuaaacugccccucggcaucaacauaacaaauuucagggcaauuuuaaccgccuuuaguccugcucaggacaucugggggacgagcgcagccgcuuauuucgugggauaccugaagccaacuacauuuaugcuuaaauaugaugagaacgguaccauuacugacgccguggauugcucucagaauccguuggcggagcugaaguguuccgucaagucauucgaaaucgacaaaggcaucuaccagacaagcaacuuccggguugugcccaguggggauguagugcgcuuuccuaauauuaccaaccuaugcccauucggagaggucuuuaaugcaacgaaguuccccucuguguaugccugggaaaggaaaaagauauccaacuguguugcugacuacagcgugcucuauaauucgaccuuuuucucuacauuuaaaugcuacggcgucuccgccacuaagcugaacgaucuuuguuucucaaauguguacgcagacaguuuuguaguuaaaggugaugacgugaggcaaaucgcuccugggcagaccggagucauugccgauuauaacuacaagcugccagacgacuucaugggcugcguguuggcguggaauacacggaacaucgaugccacuagcaccggcaauuauaacuacaaguaucgcuaccuccgacaugggaaacugagacccuuugagagggacauauccaacgucccguucucuccugauggaaagcccuguacaccuccugcauuaaauugcuauuggccccugaacgacuacgguuuuuacaccacuacgggcauuggguaucagccauaccgggugguugugcucagcuucgagcuucugaaugcucccgccacaguaugcggaccuaaauugucaaccgaucuaaucaagaaccagugugucaauuucaacuuuaauggccugacugguaccggggugcucacaccaaguuccaaacguuuccaaccguuucagcaguucggccgcgacguuagcgauuuuaccgacucugugagagaucccaagacuucagaaauccuggacauuaguccuugcgcuuucggaggcgucagcgugaucacaccagggacgaacgccuccucugagguagcagugcuuuaucaagauguuaauuguaccgacgucucgacugccauucacgcugaucagcugacacccgcguggaggauauacagcaccggaaacaauguguuucagacacaggcagguugcuugaucggcgccgaacacguggacacuuccuaugagugugacauuccuaucggggcuggaaucugcgccucauaccauaccgucagucuccugcggucuacgagccaaaaguccauuguugcauauaccaugucauuaggcgccgauagcucuauagcuuacuccaacaauacaaucgccauuccaacuaacuucaguaucagcauuaccacagaagugaugcccgugucuauggcaaaaacuuccguagacuguaauauguacaucugcggugauucaaccgagugugcgaaccugcuacuccaguaugggaguuuuugcacgcagcugaaccgagcucuuagcggcauagccgcagagcaggaccgcaauacaagagaagucuucgcccaagugaagcagauguacaaaaccccgacuuugaaguauuuuggaggcuucaacuucucgcagauccugccugauccacucaaacccacaaagagguccuuuauugaggaccugcuuuucaauaagguuacccuggcugaugccggguuuaugaaacaguacggagaauguuugggugacaucaacgcacgggaucucauuugcgcucaaaaguucaauggccugacuguguuaccuccccugcuaaccgacgauaugaucgccgcguauacagccgcucucgucucugggacggcaaccgccggauggacuuuuggcgcuggugccgcacugcagauaccauucgcgaugcagauggccuaccgcuuuaacgggauuggcgugacacagaauguucuuuaugagaaccaaaaacagaucgcuaaucaguucaacaaggccauuagccaaauccaggaaucauugaccacaaccaguacugcacugggaaaacuccaggacgugguaaaucagaacgcucaagcccugaauacguuagucaagcagcuguccucuaacuuuggcgcaauaagcuccgugcuuaaugauaucuugucaagacucgacaagguggaggccgagguccagauugacaggcugaucacagggcgucuacagagccugcaaaccuacguuacucagcagcucauucgggcugcggaaauccgagccagugcaaaccuggcugccaccaaaaugucugagugcgugcuuggacaguccaagagaguagauuucuguggcaaagguuaccacuugaugagcuuuccucaagccgcuccccaugggguggucuuccugcacgugacauauguuccaucgcaggaaaggaacuuuacuaccgcaccggccauaugccacgagggaaaggcguacuucccucgcgaaggcguguucgucuuuaaugguacaucaugguucauuacgcagcggaacuuuuucucuccccaaaucaucaccacugacaauacauuugugaguggcaacugugauguugugauugggaucauuaauaacaccgucuaugacccauuacagcccgagcucgauuccuucaaagaggaacuggacaaguacuuuaaaaaucauacuagcccugauguagaccuuggagauauaucuggcaucaacgcuagcgugguuaauauucagaaggagaucgacagacugaacgaaguggccaagaauuugaacgagucccucauugaucugcaggagcuagggaaauaugaacaauacaucaaguggccaugguaugucuggcugggauucauagcaggccucaucgccauugugaugguaacaauccugcuuugcuguaugaccucaugcuguaguugcuugaaaggugcuuguagcugcgggucuuguugcaaguuugacgaggacgauuccgaacccgugcugaaaggagucaaguuacacuacacgugaggacuaguuauaagacugacuagcccgaugggccucccaacgggcccuccuccccuccuugcaccgagauuaauaaaaaaaaaaaaaaaaaaaaaaaaaaaaaaaaaaaaaaaaaaaaaaaaaaaaaaaaaaaaaaaaugcaucccccccccccccccccccccccccccccccaaaggcucuuuucagagccaccagaauu

SEQ ID NO: 15180 - RNA, 3985 nt, Artificial Sequence
  SARS-CoV/Tor2__NP_828851.1 spike protein mRNA human (1-1255)(K968P_V969P)
aggagaaagcuuaccauguucaucuuucugcuguuccuuacccugacaagcggcuccgacuuggauagaugcacuacguuugacgaugugcaggcccccaacuacacccaacacacaucuucaaugagaggggucuauuacccugacgagauuuuccggagugauacuuuauaucugacccaggaccuauuucucccauucuacagcaauguuacaggauuucauaccauaaaccacacuuucgguaauccggugauccccuuuaaggauggcauuuauuucgcugcaacagaaaaauccaacguagugcgcgggugggucuuuggaucuaccaugaauaacaagucgcagucagugaucauuaucaauaacagcacgaauguugugauacgagccuguaacuucgagcugugcgacaauccauuuuucgcggucaguaaaccaaugggcacucagacccauacaaugaucuucgauaacgcuuuuaauuguacuuucgaauacauuuccgacgccuuuucucuugaugugagcgagaaguccgguaacuucaaacaccuccgugaauuuguauucaagaauaaggacggguuuuuguauguuuacaaaggauaccaacccaucgauguggucagagaccucccuucaggcuucaacacccugaagccaauuuuuaaacugccccucggcaucaacauaacaaauuucagggcaauuuuaaccgccuuuaguccugcucaggacaucugggggacgagcgcagccgcuuauuucgugggauaccugaagccaacuacauuuaugcuuaaauaugaugagaacgguaccauuacugacgccguggauugcucucagaauccguuggcggagcugaaguguuccgucaagucauucgaaaucgacaaaggcaucuaccagacaagcaacuuccggguugugcccaguggggauguagugcgcuuuccuaauauuaccaaccuaugcccauucggagaggucuuuaaugcaacgaaguuccccucuguguaugccugggaaaggaaaaagauauccaacuguguugcugacuacagcgugcucuauaauucgaccuuuuucucuacauuuaaaugcuacggcgucuccgccacuaagcugaacgaucuuuguuucucaaauguguacgcagacaguuuuguaguuaaaggugaugacgugaggcaaaucgcuccugggcagaccggagucauugccgauuauaacuacaagcugccagacgacuucaugggcugcguguuggcguggaauacacggaacaucgaugccacuagcaccggcaauuauaacuacaaguaucgcuaccuccgacaugggaaacugagacccuuugagagggacauauccaacgucccguucucuccugauggaaagcccuguacaccuccugcauuaaauugcuauuggccccugaacgacuacgguuuuuacaccacuacgggcauuggguaucagccauaccgggugguugugcucagcuucgagcuucugaaugcucccgccacaguaugcggaccuaaauugucaaccgaucuaaucaagaaccagugugucaauuucaacuuuaauggccugacugguaccggggugcucacaccaaguuccaaacguuuccaaccguuucagcaguucggccgcgacguuagcgauuuuaccgacucugugagagaucccaagacuucagaaauccuggacauuaguccuugcgcuuucggaggcgucagcgugaucacaccagggacgaacgccuccucugagguagcagugcuuuaucaagauguuaauuguaccgacgucucgacugccauucacgcugaucagcugacacccgcguggaggauauacagcaccggaaacaauguguuucagacacaggcagguugcuugaucggcgccgaacacguggacacuuccuaugagugugacauuccuaucggggcuggaaucugcgccucauaccauaccgucagucuccugcggucuacgagccaaaaguccauuguugcauauaccaugucauuaggcgccgauagcucuauagcuuacuccaacaauacaaucgccauuccaacuaacuucaguaucagcauuaccacagaagugaugcccgugucuauggcaaaaacuuccguagacuguaauauguacaucugcggugauucaaccgagugugcgaaccugcuacuccaguaugggaguuuuugcacgcagcugaaccgagcucuuagcggcauagccgcagagcaggaccgcaauacaagagaagucuucgcccaagugaagcagauguacaaaaccccgacuuugaaguauuuuggaggcuucaacuucucgcagauccugccugauccacucaaacccacaaagagguccuuuauugaggaccugcuuuucaauaagguuacccuggcugaugccggguuuaugaaacaguacggagaauguuugggugacaucaacgcacgggaucucauuugcgcucaaaaguucaauggccugacuguguuaccuccccugcuaaccgacgauaugaucgccgcguauacagccgcucucgucucugggacggcaaccgccggauggacuuuuggcgcuggugccgcacugcagauaccauucgcgaugcagauggccuaccgcuuuaacgggauuggcgugacacagaauguucuuuaugagaaccaaaaacagaucgcuaaucaguucaacaaggccauuagccaaauccaggaaucauugaccacaaccaguacugcacugggaaaacuccaggacgugguaaaucagaacgcucaagcccugaauacguuagucaagcagcuguccucuaacuuuggcgcaauaagcuccgugcuuaaugauaucuugucaagacucgacccucccgaggccgaggugcagauugacaggcugaucacagggcgucuacagagccugcaaaccuacgucacucagcagcucauucgggcugcggaaauccgagccagugcaaaccuggcugccaccaagaugucugagugcguucuuggacaguccaaaagaguggauuucuguggcaaggguuaccacuugaugagcuuuccacaagccgcuccgcaugggguaguguuccugcacgucacauaugugccuucgcaggaaaggaacuuuacuaccgcacccgccauaugccacgagggaaaagcguacuucccacgcgaaggcguuuucguguuuaaugguacaucaugguucauuacgcagcggaacuuuuucucuccccaaaucaucaccacugacaauacauuugucaguggcaacugugaugugguuauugggaucauuaauaacaccguguaugacccuuuacagccagagcucgauuccuucaaggaggaacuggacaaauacuuuaagaaucauacuagccccgaugucgaccuuggagauauaucuggcaucaacgcuagcguagugaauauucagaaagagaucgacagacugaacgaaguugccaagaauuugaacgagucccucauugaucugcaggagcuagggaaguaugaacaauacaucaaauggccuugguauguguggcugggauucauagcaggccucaucgccauugucauggugacaauccugcuuugcuguaugaccucaugcuguaguugcuugaagggugcuuguagcugcgggucuuguugcaaauuugacgaggacgauuccgaaccgguacugaagggagugaaauuacacuacacgugaggacuaguuauaagacugacuagcccgaugggccucccaacgggcccuccuccccuccuugcaccgagauuaauaaaaaaaaaaaaaaaaaaaaaaaaaaaaaaaaaaaaaaaaaaaaaaaaaaaaaaaaaaaaaaaaugcaucccccccccccccccccccccccccccccccaaaggcucuuuucagagccaccagaauu

SEQ ID NO: 15181 - RNA, 3790 nt, Artificial Sequence
  SARS-CoV/Tor2__NP_828851.1 spike protein mRNA human (variant)
aggagaaagcuuaccauguucaucuuucugcuguuccuuacccugacaagcggcuccgacuuggauagaugcacuacguuugacgaugugcaggcccccaacuacacccaacacacaucuucaaugagaggggucuauuacccugacgagauuuuccggagugauacuuuauaucugacccaggaccuauuucucccauucuacagcaauguuacaggauuucauaccauaaaccacacuuucgguaauccggugauccccuuuaaggauggcauuuauuucgcugcaacagaaaaauccaacguagugcgcgggugggucuuuggaucuaccaugaauaacaagucgcagucagugaucauuaucaauaacagcacgaauguugugauacgagccuguaacuucgagcugugcgacaauccauuuuucgcggucaguaaaccaaugggcacucagacccauacaaugaucuucgauaacgcuuuuaauuguacuuucgaauacauuuccgacgccuuuucucuugaugugagcgagaaguccgguaacuucaaacaccuccgugaauuuguauucaagaauaaggacggguuuuuguauguuuacaaaggauaccaacccaucgauguggucagagaccucccuucaggcuucaacacccugaagccaauuuuuaaacugccccucggcaucaacauaacaaauuucagggcaauuuuaaccgccuuuaguccugcucaggacaucugggggacgagcgcagccgcuuauuucgugggauaccugaagccaacuacauuuaugcuuaaauaugaugagaacgguaccauuacugacgccguggauugcucucagaauccguuggcggagcugaaguguuccgucaagucauucgaaaucgacaaaggcaucuaccagacaagcaacuuccggguugugcccaguggggauguagugcgcuuuccuaauauuaccaaccuaugcccauucggagaggucuuuaaugcaacgaaguuccccucuguguaugccugggaaaggaaaaagauauccaacuguguugcugacuacagcgugcucuauaauucgaccuuuuucucuacauuuaaaugcuacggcgucuccgccacuaagcugaacgaucuuuguuucucaaauguguacgcagacaguuuuguaguuaaaggugaugacgugaggcaaaucgcuccugggcagaccggagucauugccgauuauaacuacaagcugccagacgacuucaugggcugcguguuggcguggaauacacggaacaucgaugccacuagcaccggcaauuauaacuacaaguaucgcuaccuccgacaugggaaacugagacccuuugagagggacauauccaacgucccguucucuccugauggaaagcccuguacaccuccugcauuaaauugcuauuggccccugaacgacuacgguuuuuacaccacuacgggcauuggguaucagccauaccgggugguugugcucagcuucgagcuucugaaugcucccgccacaguaugcggaccuaaauugucaaccgaucuaaucaagaaccagugugucaauuucaacuuuaauggccugacugguaccggggugcucacaccaaguuccaaacguuuccaaccguuucagcaguucggccgcgacguuagcgauuuuaccgacucugugagagaucccaagacuucagaaauccuggacauuaguccuugcgcuuucggaggcgucagcgugaucacaccagggacgaacgccuccucugagguagcagugcuuuaucaagauguuaauuguaccgacgucucgacugccauucacgcugaucagcugacacccgcguggaggauauacagcaccggaaacaauguguuucagacacaggcagguugcuugaucggcgccgaacacguggacacuuccuaugagugugacauuccuaucggggcuggaaucugcgccucauaccauaccgucagucuccugcggucuacgagccaaaaguccauuguugcauauaccaugucauuaggcgccgauagcucuauagcuuacuccaacaauacaaucgccauuccaacuaacuucaguaucagcauuaccacagaagugaugcccgugucuauggcaaaaacuuccguagacuguaauauguacaucugcggugauucaaccgagugugcgaaccugcuacuccaguaugggaguuuuugcacgcagcugaaccgagcucuuagcggcauagccgcagagcaggaccgcaauacaagagaagucuucgcccaagugaagcagauguacaaaaccccgacuuugaaguauuuuggaggcuucaacuucucgcagauccugccugauccacucaaacccacaaagagguccuuuauugaggaccugcuuuucaauaagguuacccuggcugaugccggguuuaugaaacaguacggagaauguuugggugacaucaacgcacgggaucucauuugcgcucaaaaguucaauggccugacuguguuaccuccccugcuaaccgacgauaugaucgccgcguauacagccgcucucgucucugggacggcaaccgccggauggacuuuuggcgcuggugccgcacugcagauaccauucgcgaugcagauggccuaccgcuuuaacgggauuggcgugacacagaauguucuuuaugagaaccaaaaacagaucgcuaaucaguucaacaaggccauuagccaaauccaggaaucauugaccacaaccaguacugcacugggaaaacuccaggacgugguaaaucagaacgcucaagcccugaauacguuagucaagcagcuguccucuaacuuuggcgcaauaagcuccgugcuuaaugauaucuugucaagacucgacccucccgaggccgaggugcagauugacaggcugaucacagggcgucuacagagccugcaaaccuacgucacucagcagcucauucgggcugcggaaauccgagccagugcaaaccuggcugccaccaagaugucugagugcguucuuggacaguccaaaagaguggauuucuguggcaaggguuaccacuugaugagcuuuccacaagccgcuccgcaugggguaguguuccugcacgucacauaugugccuucgcaggaaaggaacuuuacuaccgcacccgccauaugccacgagggaaaagcguacuucccacgcgaaggcguuuucguguuuaaugguacaucaugguucauuacgcagcggaacuuuuucucuccccaaaucaucaccacugacaauacauuugucaguggcaacugugaugugguuauugggaucauuaauaacaccguguaugacccuuuacagccagagcucgauuccuucaaggaggaacuggacaaauacuuuaagaaucauacuagccccgaugucgaccuuggagauauaucuggcaucaacgcuagcguagugaauauucagaaagagaucgacagacugaacgaaguugccaagaauuugaacgagucccucauugaucugcaggagcuagggaaguaugaacaaugaggacuaguuauaagacugacuagcccgaugggccucccaacgggcccuccuccccuccuugcaccgagauuaauaaaaaaaaaaaaaaaaaaaaaaaaaaaaaaaaaaaaaaaaaaaaaaaaaaaaaaaaaaaaaaaaugcaucccccccccccccccccccccccccccccccaaaggcucuuuucagagccaccagaauu

SEQ ID NO: 15182 - RNA, 3871 nt, Artificial Sequence
  SARS-CoV/Tor2__NP_828851.1 spike protein mRNA human (variant)
aggagaaagcuuaccauguucaucuuucugcuguuccuuacccugacaagcggcuccgacuuggauagaugcacuacguuugacgaugugcaggcccccaacuacacccaacacacaucuucaaugagaggggucuauuacccugacgagauuuuccggagugauacuuuauaucugacccaggaccuauuucucccauucuacagcaauguuacaggauuucauaccauaaaccacacuuucgguaauccggugauccccuuuaaggauggcauuuauuucgcugcaacagaaaaauccaacguagugcgcgggugggucuuuggaucuaccaugaauaacaagucgcagucagugaucauuaucaauaacagcacgaauguugugauacgagccuguaacuucgagcugugcgacaauccauuuuucgcggucaguaaaccaaugggcacucagacccauacaaugaucuucgauaacgcuuuuaauuguacuuucgaauacauuuccgacgccuuuucucuugaugugagcgagaaguccgguaacuucaaacaccuccgugaauuuguauucaagaauaaggacggguuuuuguauguuuacaaaggauaccaacccaucgauguggucagagaccucccuucaggcuucaacacccugaagccaauuuuuaaacugccccucggcaucaacauaacaaauuucagggcaauuuuaaccgccuuuaguccugcucaggacaucugggggacgagcgcagccgcuuauuucgugggauaccugaagccaacuacauuuaugcuuaaauaugaugagaacgguaccauuacugacgccguggauugcucucagaauccguuggcggagcugaaguguuccgucaagucauucgaaaucgacaaaggcaucuaccagacaagcaacuuccggguugugcccaguggggauguagugcgcuuuccuaauauuaccaaccuaugcccauucggagaggucuuuaaugcaacgaaguuccccucuguguaugccugggaaaggaaaaagauauccaacuguguugcugacuacagcgugcucuauaauucgaccuuuuucucuacauuuaaaugcuacggcgucuccgccacuaagcugaacgaucuuuguuucucaaauguguacgcagacaguuuuguaguuaaaggugaugacgugaggcaaaucgcuccugggcagaccggagucauugccgauuauaacuacaagcugccagacgacuucaugggcugcguguuggcguggaauacacggaacaucgaugccacuagcaccggcaauuauaacuacaaguaucgcuaccuccgacaugggaaacugagacccuuugagagggacauauccaacgucccguucucuccugauggaaagcccuguacaccuccugcauuaaauugcuauuggccccugaacgacuacgguuuuuacaccacuacgggcauuggguaucagccauaccgggugguugugcucagcuucgagcuucugaaugcucccgccacaguaugcggaccuaaauugucaaccgaucuaaucaagaaccagugugucaauuucaacuuuaauggccugacugguaccggggugcucacaccaaguuccaaacguuuccaaccguuucagcaguucggccgcgacguuagcgauuuuaccgacucugugagagaucccaagacuucagaaauccuggacauuaguccuugcgcuuucggaggcgucagcgugaucacaccagggacgaacgccuccucugagguagcagugcuuuaucaagauguuaauuguaccgacgucucgacugccauucacgcugaucagcugacacccgcguggaggauauacagcaccggaaacaauguguuucagacacaggcagguugcuugaucggcgccgaacacguggacacuuccuaugagugugacauuccuaucggggcuggaaucugcgccucauaccauaccgucagucuccugcggucuacgagccaaaaguccauuguugcauauaccaugucauuaggcgccgauagcucuauagcuuacuccaacaauacaaucgccauuccaacuaacuucaguaucagcauuaccacagaagugaugcccgugucuauggcaaaaacuuccguagacuguaauauguacaucugcggugauucaaccgagugugcgaaccugcuacuccaguaugggaguuuuugcacgcagcugaaccgagcucuuagcggcauagccgcagagcaggaccgcaauacaagagaagucuucgcccaagugaagcagauguacaaaaccccgacuuugaaguauuuuggaggcuucaacuucucgcagauccugccugauccacucaaacccacaaagagguccuuuauugaggaccugcuuuucaauaagguuacccuggcugaugccggguuuaugaaacaguacggagaauguuugggugacaucaacgcacgggaucucauuugcgcucaaaaguucaauggccugacuguguuaccuccccugcuaaccgacgauaugaucgccgcguauacagccgcucucgucucugggacggcaaccgccggauggacuuuuggcgcuggugccgcacugcagauaccauucgcgaugcagauggccuaccgcuuuaacgggauuggcgugacacagaauguucuuuaugagaaccaaaaacagaucgcuaaucaguucaacaaggccauuagccaaauccaggaaucauugaccacaaccaguacugcacugggaaaacuccaggacgugguaaaucagaacgcucaagcccugaauacguuagucaagcagcuguccucuaacuuuggcgcaauaagcuccgugcuuaaugauaucuugucaagacucgacccucccgaggccgaggugcagauugacaggcugaucacagggcgucuacagagccugcaaaccuacgucacucagcagcucauucgggcugcggaaauccgagccagugcaaaccuggcugccaccaagaugucugagugcguucuuggacaguccaaaagaguggauuucuguggcaaggguuaccacuugaugagcuuuccacaagccgcuccgcaugggguaguguuccugcacgucacauaugugccuucgcaggaaaggaacuuuacuaccgcacccgccauaugccacgagggaaaagcguacuucccacgcgaaggcguuuucguguuuaaugguacaucaugguucauuacgcagcggaacuuuuucucuccccaaaucaucaccacugacaauacauuugucaguggcaacugugaugugguuauugggaucauuaauaacaccguguaugacccuuuacagccagagcucgauuccuucaaggaggaacuggacaaauacuuuaagaaucauacuagccccgaugucgaccuuggagauauaucuggcaucaacgcuagcguagugaauauucagaaagagaucgacagacugaacgaaguugccaagaauuugaacgagucccucauugaucugcaggagcuagggaaguaugaacaaggaggcuacaucccugaggcaccgagggacggucaggccuaugugcgcaaagacggggaauggguccugcucucaacauucugaggacuaguuauaagacugacuagcccgaugggccucccaacgggcccuccuccccuccuugcaccgagauuaauaaaaaaaaaaaaaaaaaaaaaaaaaaaaaaaaaaaaaaaaaaaaaaaaaaaaaaaaaaaaaaaaugcaucccccccccccccccccccccccccccccccaaaggcucuuuucagagccaccagaauu

SEQ ID NO: 15183 - RNA, 4279 nt, Artificial Sequence
  HCoV/OC43__P36334.1 spike protein mRNA human (1-1353)
aggagaaagcuuaccauguuccugauccuccuuauuagccugcccaccgccuuugcugugauaggcgacuugaagugcacauccgauaacaucaaugacaaagauacugggccuccaccgauuucuacggacaccgucgauguuacaaacggauuagguacuuacuaugugcuggacagaguauaccuaaauaccacacucuuccugaacggcuauuaccccaccucagggaguacuuauaggaauauggcacuuaagggaagcgugcuguugucccggcucugguuuaaaccuccauuccugucugauuuuaucaacggcauuuucgccaaggucaaaaauacaaaggugaucaaggaccgcguuauguacucggaguuucccgcgauaaccaucgguucaacguucgugaacacuagcuauagugucgugguacagccucgaaccauuaauuccacacaagauggggacaacaaacugcagggacucuuagaaguuucugugugucaguacaauaugugcgaguacccacagacuaucugucaccccaaccugggcaaucaucguaaggaacuuuggcacuuggauaccggcgucgugagcugccuguauaaaagaaacuuuacauacgacgugaaugcugauuaucuauacuuccauuuuuaucaagaagggggaaccuucuacgccuauuuuacggacacuggugucguuacaaaguuccucuucaacguguaccugggcauggcacuuucccacuacuauguaaugccucugaccuguaacucaaaauugacucucgaguacugggugacaccacugaccaguaggcaguauuuacuggccuuuaaucaggacgggauuaucuucaacgcugaggauugcaugagcgacuuuaugucugagauaaaguguaagacgcaguccauugcaccgcccaccggagucuacgaacucaauggcuauacagugcaaccuaucgccgauguuuaccggcgcaaaccaaaccuucccaauugcaacauugaggcuuggcugaaugacaagucagugccuagcccauugaacugggaaagaaaaacuuucaguaauuguaacuuuaauaugucuucccuaaugagcuucauccaggccgauucguuuaccugcaacaauaucgacgcggcaaagauuuaugguauguguuucucuuccauaacaaucgauaaauuugccauucccaacgggaggaaggucgaccugcagcucggaaaucugggcuaccuucagucauucaacuaccggaucgauacuaccgcuacaaguugccaacuguauuacaacuugccggccgcaaaugugagcguaucccgcuuuaacccuucuaccuggaauaaacgauucggcuuuauagaggacagcguuuucaagcccagaccagcuggggugcucacuaaccaugaugucguguaugcccagcacugcuucaaggcgccuaaaaauuuuugucccugcaagcugaacggaucaugugucgguaguggcccagggaaaaauaacggaauuggcacgugccccgccgguacaaauuacuuaaccugugacaaccugugcacuccugacccaaucaccuucacagggaccuauaaguguccgcagacuaaaucccuagugggcaucggagagcacugcagcggccucgcaguuaagucugauuacugugggggaaauucaugcacauguaggccccaagcguuucuggguuggagugccgacagcugccuucagggcgauaagugcaacauuuucgcuaauuuuaucuugcaugacgugaacuccgggcugacguguucuaccgaucuccagaaagccaauacugacauuauacugggaguaugcgucaacuaugaucuuuacggcauccugggucaggggauuuucguggaaguuaacgcaacauacuauaauucguggcaaaacuugcucuacgacagcaauggcaaccuguauggauuucgggauuacaucaucaaucguaccuucaugauucgcuccuguuauucaggcagagugagugccgcuuuucacgcgaacucuagcgagccugcauuacuguucaggaauauaaagugcaacuacgucuuuaauaacucccuaacacggcagcuccagccaaucaauuauuucgacucauaccuggggugugugguaaacgccuacaauagcacugcuauuucugugcagaccugcgaucuuacgguuggauccgguuauugugucgacuacaguaaaaaccgacgcagcagaggcgccaucaccacaggguauagguuuacuaauuucgaacccuucaccgugaacucugugaacgauuccuuggagccugucggaggccuguacgaaauucaaaucccaucagaguuuacaauagguaauaugguugaguucauccagacuucuagccccaaggugaccauugacugcgcagccuuuguguguggggacuaugcugccugcaaaucgcagcucguagaauacggcuccuucugugauaacaucaaugcaauucugacggaggucaacgaauuacuggacacaacccagcuucaaguggcuaauucuuugaugaacggaguuacucucagcacaaagcugaaggauggcgugaauuuuaacgucgacgauaucaauuucucaccggugcuagggugccugggaagugagugcuccaaagcuaguagccgguccgccauagaagaccuccuguuugauaagguuaaacuuucagacgugggcuucguagaggcauauaacaauuguaccgguggggccgagauucgcgauuugaucugcguccagagcuacaagggaauuaaagugcugccuccauuacucagugaaaaccagaucucuggcuacacucuggcugccaccuccgcaagccuuuuucccccuuggacagcugccgcgggugugcccuucuaucugaauguccaguacagaauaaacggcuuggggguuacgauggacgugcucucgcaaaaucagaagcugaucgccaacgcuuuuaauaacgcacuauaugccauucaggagggauucgaugcuaccaacucagcccugguaaagauccaagcaguggucaaugcgaacgccgaagcucucaauaaccugcuucagcaguugucuaauagguucggcgccauuagugcaucccugcaggagaucuuaagccgucucgacgcucuggaagccgaggcacaaauagaucggcuuauuaacgggcgacugacugcccuaaaugcuuacgugucucagcagcucagcgacuccacacugguuaaauuuucagcggcccaggcaauggagaaggugaacgaaugugucaaaagucaaagcucuagaaucaauuucugcggaaacggcaaucauaucauuuccuuggugcagaacgcuccauauggucuguacuuuauccacuucucauauguuccuaccaaguacgugacagccagggucagucccggguuauguauugccggagaccgcggcauagcuccaaaaagcgguuacuuuguaaaugugaacaauacuuggauguauaccggcuccggguacuauuacccggagccuaucacggaaaacaacguuguggucaugucuacaugcgcagugaauuauaccaaggcccccuacguaaugcucaacacuucgauuccaaaucugcccgauuucaaagaggagcuugaccagugguuuaagaaccagaccagcguggcgccugaucugucauuggacuauaucaaugucacauuccucgaucugcaaguugaaaugaaccggcuacaggaggcuauuaaggugcugaaucaguccuacaucaaccuuaaagacauaggaacuuacgaauauuacgugaaguggccaugguaugucuggcuccugaucuguuuggccggcguggcaaugcugguuuuacucuuuuucauuugcuguugcaccggguguggaacaaguugcuuuaaaaagugcggcgguuguugcgaugacuacacgggguaucaagagcugguaaucaaaaccucucacgaugacugaggacuaguuauaagacugacuagcccgaugggccucccaacgggcccuccuccccuccuugcaccgagauuaauaaaaaaaaaaaaaaaaaaaaaaaaaaaaaaaaaaaaaaaaaaaaaaaaaaaaaaaaaaaaaaaaugcaucccccccccccccccccccccccccccccccaaaggcucuuuucagagccaccagaauu

SEQ ID NO: 15184 - RNA, 4279 nt, Artificial Sequence
  HCoV/OC43__P36334.1 spike protein mRNA human (1-1353)(A1070P_L1071P)
aggagaaagcuuaccauguuccugauccuccuuauuagccugcccaccgccuuugcugugauaggcgacuugaagugcacauccgauaacaucaaugacaaagauacugggccuccaccgauuucuacggacaccgucgauguuacaaacggauuagguacuuacuaugugcuggacagaguauaccuaaauaccacacucuuccugaacggcuauuaccccaccucagggaguacuuauaggaauauggcacuuaagggaagcgugcuguugucccggcucugguuuaaaccuccauuccugucugauuuuaucaacggcauuuucgccaaggucaaaaauacaaaggugaucaaggaccgcguuauguacucggaguuucccgcgauaaccaucgguucaacguucgugaacacuagcuauagugucgugguacagccucgaaccauuaauuccacacaagauggggacaacaaacugcagggacucuuagaaguuucugugugucaguacaauaugugcgaguacccacagacuaucugucaccccaaccugggcaaucaucguaaggaacuuuggcacuuggauaccggcgucgugagcugccuguauaaaagaaacuuuacauacgacgugaaugcugauuaucuauacuuccauuuuuaucaagaagggggaaccuucuacgccuauuuuacggacacuggugucguuacaaaguuccucuucaacguguaccugggcauggcacuuucccacuacuauguaaugccucugaccuguaacucaaaauugacucucgaguacugggugacaccacugaccaguaggcaguauuuacuggccuuuaaucaggacgggauuaucuucaacgcugaggauugcaugagcgacuuuaugucugagauaaaguguaagacgcaguccauugcaccgcccaccggagucuacgaacucaauggcuauacagugcaaccuaucgccgauguuuaccggcgcaaaccaaaccuucccaauugcaacauugaggcuuggcugaaugacaagucagugccuagcccauugaacugggaaagaaaaacuuucaguaauuguaacuuuaauaugucuucccuaaugagcuucauccaggccgauucguuuaccugcaacaauaucgacgcggcaaagauuuaugguauguguuucucuuccauaacaaucgauaaauuugccauucccaacgggaggaaggucgaccugcagcucggaaaucugggcuaccuucagucauucaacuaccggaucgauacuaccgcuacaaguugccaacuguauuacaacuugccggccgcaaaugugagcguaucccgcuuuaacccuucuaccuggaauaaacgauucggcuuuauagaggacagcguuuucaagcccagaccagcuggggugcucacuaaccaugaugucguguaugcccagcacugcuucaaggcgccuaaaaauuuuugucccugcaagcugaacggaucaugugucgguaguggcccagggaaaaauaacggaauuggcacgugccccgccgguacaaauuacuuaaccugugacaaccugugcacuccugacccaaucaccuucacagggaccuauaaguguccgcagacuaaaucccuagugggcaucggagagcacugcagcggccucgcaguuaagucugauuacugugggggaaauucaugcacauguaggccccaagcguuucuggguuggagugccgacagcugccuucagggcgauaagugcaacauuuucgcuaauuuuaucuugcaugacgugaacuccgggcugacguguucuaccgaucuccagaaagccaauacugacauuauacugggaguaugcgucaacuaugaucuuuacggcauccugggucaggggauuuucguggaaguuaacgcaacauacuauaauucguggcaaaacuugcucuacgacagcaauggcaaccuguauggauuucgggauuacaucaucaaucguaccuucaugauucgcuccuguuauucaggcagagugagugccgcuuuucacgcgaacucuagcgagccugcauuacuguucaggaauauaaagugcaacuacgucuuuaauaacucccuaacacggcagcuccagccaaucaauuauuucgacucauaccuggggugugugguaaacgccuacaauagcacugcuauuucugugcagaccugcgaucuuacgguuggauccgguuauugugucgacuacaguaaaaaccgacgcagcagaggcgccaucaccacaggguauagguuuacuaauuucgaacccuucaccgugaacucugugaacgauuccuuggagccugucggaggccuguacgaaauucaaaucccaucagaguuuacaauagguaauaugguugaguucauccagacuucuagccccaaggugaccauugacugcgcagccuuuguguguggggacuaugcugccugcaaaucgcagcucguagaauacggcuccuucugugauaacaucaaugcaauucugacggaggucaacgaauuacuggacacaacccagcuucaaguggcuaauucuuugaugaacggaguuacucucagcacaaagcugaaggauggcgugaauuuuaacgucgacgauaucaauuucucaccggugcuagggugccugggaagugagugcuccaaagcuaguagccgguccgccauagaagaccuccuguuugauaagguuaaacuuucagacgugggcuucguagaggcauauaacaauuguaccgguggggccgagauucgcgauuugaucugcguccagagcuacaagggaauuaaagugcugccuccauuacucagugaaaaccagaucucuggcuacacucuggcugccaccuccgcaagccuuuuucccccuuggacagcugccgcgggugugcccuucuaucugaauguccaguacagaauaaacggcuuggggguuacgauggacgugcucucgcaaaaucagaagcugaucgccaacgcuuuuaauaacgcacuauaugccauucaggagggauucgaugcuaccaacucagcccugguaaagauccaagcaguggucaaugcgaacgccgaagcucucaauaaccugcuucagcaguugucuaauagguucggcgccauuagugcaucccugcaggagaucuuaagccgucucgacccaccugaagcugaggcccaaauagaucggcugauuaacgggcgacuuacugcacugaaugccuacgugucucagcagcuaagcgacuccacacucguuaaauuuucagcugcgcaggccauggagaaggugaacgaaugugucaaaagucaaagcucuagaaucaauuucugcggaaacggcaaucauaucauuucccuggugcagaacgcacccuaugguuuguacuuuauccacuucucauauguuccaaccaaguacgugacagcuagggucaguccggggcuguguauugccggagaccgcggcauagccccuaaaagcgguuacuuuguaaaugugaacaauacuuggauguauaccggcuccggguacuauuaccccgagccaaucacggaaaacaacguuguggucaugucuacaugcgcugugaauuauaccaaggcacccuacguaauguuaaacacuucgauuccuaaucucccagauuucaaagaggagcuggaccagugguuuaagaaccagaccagcguggcccccgaucuuucacuggacuauaucaaugucacauucuuggaucuccaaguugaaaugaaccggcugcaggaggcgauuaaggugcuaaaucaguccuacaucaaccugaaagacauaggaacuuacgaauauuacgugaaguggccuugguaugucuggcuucucaucugucuggcuggcguggccauguugguucuguuauuuuucauuugcuguugcaccggguguggaacaaguugcuuuaaaaagugcggcgguuguugcgaugacuacacgggguaucaagagcucguaaucaaaaccucucacgaugacugaggacuaguuauaagacugacuagcccgaugggccucccaacgggcccuccuccccuccuugcaccgagauuaauaaaaaaaaaaaaaaaaaaaaaaaaaaaaaaaaaaaaaaaaaaaaaaaaaaaaaaaaaaaaaaaaugcaucccccccccccccccccccccccccccccccaaaggcucuuuucagagccaccagaauu

SEQ ID NO: 15185 - RNA, 4306 nt, Artificial Sequence
  HCoV/OC43/1783A_10__AIL49484.1 spike protein mRNA human (1-1362)
aggagaaagcuuaccauguuccugauccuccuuauuagccugcccaccgccuuugcugugauaggcgacuugaagugcccuuuagauuccagaacagggucucugaacaauaucgacacuggaccaccgucaauuaguacggcaaccgucgauguuacaaacggucuaggcacuuacuaugugcucgacaggguauaccugaauaccacacuuuuccugaacggguauuaccccaccagcggauccacuuaucggaauauggccuugaaaggcacagauaagcucucuacccugugguuuaaaccuccauuccugucggacuuuaucaacgguauuuucgcgaaggugaaaaauacgaaggucuuuaaggauggggugauguacucagaguuccccgcuaucacuauaggaagcaccuuuguuaacacaaguuauuccguggucgugcagccucgcacuaucaauucuacccaagacggcguaaacaaacuccagggcuuacuggaaguuagcgugugucaguacaauaugugcgaguacccacacacaauuugucaucccaaacuugggaaccacuucaaggaauuguggcauauggauaccggagucguguccugccuguauaagcgaaauuuuacguacgacgugaacgccacuuaucuauacuuccacuuuuaucaggaggguggcacauucuacgcauauuucaccgauacuggggucguuacaaaauuucucuucaauguguaccugggaauggcccuuucacauuacuauguaaugccucugaccuguaucagucguagagacauuggcuuuacguuggaauacugggugaccccacucacaagcaggcaauaucuguuagcuuucaaccaggaugguaucauauuuaacgcagucgacugcaugucugacuucauguccgagauuaaguguaagacucagucaaucgccccgcccaccgggguguacgagcugaauggauauacaguucagccuauugcugauguguaccggcgcaaaccagaccuccccaacugcaauaucgaagccuggcuuaacgauaagagcgucccuaguccacugaauugggagagaaaaacuuuuucuaacuguaauuucaacauguccagcuugaugucguuuauccaagcggacucuuuuaccugcaauaacauugaugcagccaagauauauggcauguguuucuccucaaucacaauugacaaauucgcuauccccaauggcaggaagguggaucuacagcuggggaaccucggauaccugcagaguuuuaauuaccggauagacaccacugccacgagcugccagcuuuauuacaaccugccggcagcuaauguauccguuucucgcuucaacccuagcacauggaacaaacgauucgguuuuauugaaaauucaguguucaagccccaaccagccggcgucuugaccaaccacgauguggucuaugcgcagcacugcuuuaaggccccuaaaaauuucugucccugcaagcucaacaguucccuguguguggggagcggaccaggcaaaaauaacgguaucgggacuugccccgcaggcaccaauuacuuaacaugucauaaccugugcaauccugacccaaucaccuuuacuggaccguauaaguguccccagacaaaaucucuaguuggcauuggggagcacugcucaggacucgcugugaagagugauuacugugguggcaacccuugcacgugucaaccacaggccuuccugggguggagcgcugacuccugccuucagggagacaagugcaauaucuuugccaacuugauucugcaugauguaaauucuggccucaccuguucgacugaccugcagaaagcaaacacagauauaaaacuuggugucugcgugaauuaugaccuguacgggaucagcggccaaggaauuuucguugaggugaacgccaccuacuauaacuccuggcagaauuugcucuacgauucaaacggcaaucuguauggguuuagagacuacaucacaaacaggacuuucaugauccggaguuguuauucuggacgugucagcgcugcguuucacgcaaauuccucagaacccgccuuacuguuccgcaacauuaagugcaauuacguguuuaacaauagccuaauaagacagcuccagccuaucaacuauuucgauucuuaccuggguuguguagugaaugcuuacaacuccaccgccauuaguguucaaacgugcgaccuuaccgucggcagcggguauuguguggauuacucuaagaauaggcggucccgacgcgcaaucacaacuggauauagauucaccaacuuugagccauucacagugaauagcgucaacgacaguuuggaacccguuggcggucuguacgagauucagaucccgagcgaauuuacuauagggaacauggaggaguucauccagaccucguccccuaaagugacgauugauugcgccgcuuuuguguguggcgacuaugccgcaugcaagucucagcucguagaauacggaucauucugugauaauaucaacgcgauucugacagaggucaaugaauuacuggacaccacucaacuucagguggcuaacucauugaugaauggcguuacacucaguaccaagcugaaagacggggugaacuuuaaugucgaugacaucaacuucuccucugugcuaggaugccugggcagcgagugcuccaaggccucaagcaggagugcaauagaagaucuccuguuugacaaaguuaaacuuucugauguggguuucguagccgcuuauaauaacuguacugggggagccgagauucgggacuugaucugcguccaguccuacaagggcauuaaggugcugccacccuuacucagcgagaaucagaucucggguuacacccuggcagcuacaucagccucucuuuuuccucccuggacggcggccgcuggcgugccauucuaucugaacguccaauaccgcauaaauggguugggaguuaccauggaugugcucagucagaaccagaagcugaucgcaaaugccuucaacaaugcucuagacgccauucaagaaggcuuugaugcaacuaacuccgcgcugguaaaaauccaggccguggucaacgcuaaugccgaggcacucaacaaucugcuucagcaguugagcaacagauucggggcuauuucuagcucccugcaagaaaucuuaucaaggcucgacgcccuggaggcagaagcccagauagaucgucuuauuaauggacggcugacagcucuaaacgcguaugugagucagcagcucagcgacucuacccugguuaaguuuuccgccgcacaagcuauggagaaagugaaugagugugucaagucacagaguagccgaaucaacuucugcggcaaugguaaccacaucauuuccuuggugcagaaugccccuuacgggcuguauuuuauccauuucucuuacguucccacaaaauaugugacugccaaggucucgccaggauuauguauugcuggcgauagagguauagcaccgaaaagcggcuacuuuguaaacgugaauaacaccuggauguacacggggucaggauauuacuauccugaacccaucacagagaauaacguuguggucaugaguaccugcgccgugaacuacacuaaggcgccauauguaaugcucaauaccuccacacccaaccugccugacuucagggaggaacuugaccagugguuuaagaaucaaacuucuguggcuccagaucugagcuuggacuacauuaacgucaccuuccucgaucugcagguugagaugaaucgccuacaggaagccaucaaagugcugaaccaauccuauauuaaucuuaaggacaucggcacauacgaguacuaugugaaauggcccugguacgucuggcuccugauaggguuggcaggaguggccaugcugguuuuacucuuuuucaucuguugcuguacgggcugcgguaccucauguuuuaagaaaugcgggggaugcugugaugacuauacuggcuaccaggaacugguaauuaagacaucucacgaugacugaggacuaguuauaagacugacuagcccgaugggccucccaacgggcccuccuccccuccuugcaccgagauuaauaaaaaaaaaaaaaaaaaaaaaaaaaaaaaaaaaaaaaaaaaaaaaaaaaaaaaaaaaaaaaaaaugcaucccccccccccccccccccccccccccccccaaaggcucuuuucagagccaccagaauu

SEQ ID NO: 15186 - RNA, 4306 nt, Artificial Sequence
  HCoV/OC43/1783A_10__AIL49484.1 spike protein mRNA human (1-1362)(A1079P_L1080P)
aggagaaagcuuaccauguuccugauccuccuuauuagccugcccaccgccuuugcugugauaggcgacuugaagugcccuuuagauuccagaacagggucucugaacaauaucgacacuggaccaccgucaauuaguacggcaaccgucgauguuacaaacggucuaggcacuuacuaugugcucgacaggguauaccugaauaccacacuuuuccugaacggguauuaccccaccagcggauccacuuaucggaauauggccuugaaaggcacagauaagcucucuacccugugguuuaaaccuccauuccugucggacuuuaucaacgguauuuucgcgaaggugaaaaauacgaaggucuuuaaggauggggugauguacucagaguuccccgcuaucacuauaggaagcaccuuuguuaacacaaguuauuccguggucgugcagccucgcacuaucaauucuacccaagacggcguaaacaaacuccagggcuuacuggaaguuagcgugugucaguacaauaugugcgaguacccacacacaauuugucaucccaaacuugggaaccacuucaaggaauuguggcauauggauaccggagucguguccugccuguauaagcgaaauuuuacguacgacgugaacgccacuuaucuauacuuccacuuuuaucaggaggguggcacauucuacgcauauuucaccgauacuggggucguuacaaaauuucucuucaauguguaccugggaauggcccuuucacauuacuauguaaugccucugaccuguaucagucguagagacauuggcuuuacguuggaauacugggugaccccacucacaagcaggcaauaucuguuagcuuucaaccaggaugguaucauauuuaacgcagucgacugcaugucugacuucauguccgagauuaaguguaagacucagucaaucgccccgcccaccgggguguacgagcugaauggauauacaguucagccuauugcugauguguaccggcgcaaaccagaccuccccaacugcaauaucgaagccuggcuuaacgauaagagcgucccuaguccacugaauugggagagaaaaacuuuuucuaacuguaauuucaacauguccagcuugaugucguuuauccaagcggacucuuuuaccugcaauaacauugaugcagccaagauauauggcauguguuucuccucaaucacaauugacaaauucgcuauccccaauggcaggaagguggaucuacagcuggggaaccucggauaccugcagaguuuuaauuaccggauagacaccacugccacgagcugccagcuuuauuacaaccugccggcagcuaauguauccguuucucgcuucaacccuagcacauggaacaaacgauucgguuuuauugaaaauucaguguucaagccccaaccagccggcgucuugaccaaccacgauguggucuaugcgcagcacugcuuuaaggccccuaaaaauuucugucccugcaagcucaacaguucccuguguguggggagcggaccaggcaaaaauaacgguaucgggacuugccccgcaggcaccaauuacuuaacaugucauaaccugugcaauccugacccaaucaccuuuacuggaccguauaaguguccccagacaaaaucucuaguuggcauuggggagcacugcucaggacucgcugugaagagugauuacugugguggcaacccuugcacgugucaaccacaggccuuccugggguggagcgcugacuccugccuucagggagacaagugcaauaucuuugccaacuugauucugcaugauguaaauucuggccucaccuguucgacugaccugcagaaagcaaacacagauauaaaacuuggugucugcgugaauuaugaccuguacgggaucagcggccaaggaauuuucguugaggugaacgccaccuacuauaacuccuggcagaauuugcucuacgauucaaacggcaaucuguauggguuuagagacuacaucacaaacaggacuuucaugauccggaguuguuauucuggacgugucagcgcugcguuucacgcaaauuccucagaacccgccuuacuguuccgcaacauuaagugcaauuacguguuuaacaauagccuaauaagacagcuccagccuaucaacuauuucgauucuuaccuggguuguguagugaaugcuuacaacuccaccgccauuaguguucaaacgugcgaccuuaccgucggcagcggguauuguguggauuacucuaagaauaggcggucccgacgcgcaaucacaacuggauauagauucaccaacuuugagccauucacagugaauagcgucaacgacaguuuggaacccguuggcggucuguacgagauucagaucccgagcgaauuuacuauagggaacauggaggaguucauccagaccucguccccuaaagugacgauugauugcgccgcuuuuguguguggcgacuaugccgcaugcaagucucagcucguagaauacggaucauucugugauaauaucaacgcgauucugacagaggucaaugaauuacuggacaccacucaacuucagguggcuaacucauugaugaauggcguuacacucaguaccaagcugaaagacggggugaacuuuaaugucgaugacaucaacuucuccucugugcuaggaugccugggcagcgagugcuccaaggccucaagcaggagugcaauagaagaucuccuguuugacaaaguuaaacuuucugauguggguuucguagccgcuuauaauaacuguacugggggagccgagauucgggacuugaucugcguccaguccuacaagggcauuaaggugcugccacccuuacucagcgagaaucagaucucggguuacacccuggcagcuacaucagccucucuuuuuccucccuggacggcggccgcuggcgugccauucuaucugaacguccaauaccgcauaaauggguugggaguuaccauggaugugcucagucagaaccagaagcugaucgcaaaugccuucaacaaugcucuagacgccauucaagaaggcuuugaugcaacuaacuccgcgcugguaaaaauccaggccguggucaacgcuaaugccgaggcacucaacaaucugcuucagcaguugagcaacagauucggggcuauuucuagcucccugcaagaaaucuuaucaaggcucgacccucccgaggccgaagcacagauagaucgucugauuaauggacggcuuacagcccugaacgcuuaugugagucagcagcuaagcgacucuacccucguuaaguuuuccgcggcccaagcaauggagaaagugaaugagugugucaagucacagaguagccgaaucaacuucugcggcaaugguaaccacaucauuucccuggugcagaaugcuccauacggguuguauuuuauccauuucucuuacguuccgacaaaauaugugacugccaaggucucgccuggacuguguauugccggcgauagagguauagcucccaaaagcggcuacuuuguaaacgugaauaacaccuggauguacacggggucaggauauuacuauccagaacccaucacagagaauaacguuguggucaugaguaccugcgcagugaacuacacuaaggccccuuauguaauguuaaauaccuccacaccaaaccuccccgacuucagggaggaacuggaccagugguuuaagaaucaaacuucuguggcgccugaucuuagccuggacuacauuaacgucaccuucuuggaucuccagguugagaugaaucgccugcaggaagcuaucaaagugcuaaaccaauccuauauuaaucugaaggacaucggcacauacgaguacuaugugaaauggccgugguacgucuggcuucucauagggcuggccggaguggcaauguugguucuguuauuuuucaucuguugcuguacgggcugcgguaccucauguuuuaagaaaugcgggggaugcugugaugacuauacuggcuaccaggaacucguaauuaagacaucucacgaugacugaggacuaguuauaagacugacuagcccgaugggccucccaacgggcccuccuccccuccuugcaccgagauuaauaaaaaaaaaaaaaaaaaaaaaaaaaaaaaaaaaaaaaaaaaaaaaaaaaaaaaaaaaaaaaaaaugcaucccccccccccccccccccccccccccccccaaaggcucuuuucagagccaccagaauu

SEQ ID NO: 15187 - RNA, 4081 nt, Artificial Sequence
  HCoV/OC43/1783A_10__AIL49484.1 spike protein mRNA human (variant)
aggagaaagcuuaccauguuccugauccuccuuauuagccugcccaccgccuuugcugugauaggcgacuugaagugcccuuuagauuccagaacagggucucugaacaauaucgacacuggaccaccgucaauuaguacggcaaccgucgauguuacaaacggucuaggcacuuacuaugugcucgacaggguauaccugaauaccacacuuuuccugaacggguauuaccccaccagcggauccacuuaucggaauauggccuugaaaggcacagauaagcucucuacccugugguuuaaaccuccauuccugucggacuuuaucaacgguauuuucgcgaaggugaaaaauacgaaggucuuuaaggauggggugauguacucagaguuccccgcuaucacuauaggaagcaccuuuguuaacacaaguuauuccguggucgugcagccucgcacuaucaauucuacccaagacggcguaaacaaacuccagggcuuacuggaaguuagcgugugucaguacaauaugugcgaguacccacacacaauuugucaucccaaacuugggaaccacuucaaggaauuguggcauauggauaccggagucguguccugccuguauaagcgaaauuuuacguacgacgugaacgccacuuaucuauacuuccacuuuuaucaggaggguggcacauucuacgcauauuucaccgauacuggggucguuacaaaauuucucuucaauguguaccugggaauggcccuuucacauuacuauguaaugccucugaccuguaucagucguagagacauuggcuuuacguuggaauacugggugaccccacucacaagcaggcaauaucuguuagcuuucaaccaggaugguaucauauuuaacgcagucgacugcaugucugacuucauguccgagauuaaguguaagacucagucaaucgccccgcccaccgggguguacgagcugaauggauauacaguucagccuauugcugauguguaccggcgcaaaccagaccuccccaacugcaauaucgaagccuggcuuaacgauaagagcgucccuaguccacugaauugggagagaaaaacuuuuucuaacuguaauuucaacauguccagcuugaugucguuuauccaagcggacucuuuuaccugcaauaacauugaugcagccaagauauauggcauguguuucuccucaaucacaauugacaaauucgcuauccccaauggcaggaagguggaucuacagcuggggaaccucggauaccugcagaguuuuaauuaccggauagacaccacugccacgagcugccagcuuuauuacaaccugccggcagcuaauguauccguuucucgcuucaacccuagcacauggaacaaacgauucgguuuuauugaaaauucaguguucaagccccaaccagccggcgucuugaccaaccacgauguggucuaugcgcagcacugcuuuaaggccccuaaaaauuucugucccugcaagcucaacaguucccuguguguggggagcggaccaggcaaaaauaacgguaucgggacuugccccgcaggcaccaauuacuuaacaugucauaaccugugcaauccugacccaaucaccuuuacuggaccguauaaguguccccagacaaaaucucuaguuggcauuggggagcacugcucaggacucgcugugaagagugauuacugugguggcaacccuugcacgugucaaccacaggccuuccugggguggagcgcugacuccugccuucagggagacaagugcaauaucuuugccaacuugauucugcaugauguaaauucuggccucaccuguucgacugaccugcagaaagcaaacacagauauaaaacuuggugucugcgugaauuaugaccuguacgggaucagcggccaaggaauuuucguugaggugaacgccaccuacuauaacuccuggcagaauuugcucuacgauucaaacggcaaucuguauggguuuagagacuacaucacaaacaggacuuucaugauccggaguuguuauucuggacgugucagcgcugcguuucacgcaaauuccucagaacccgccuuacuguuccgcaacauuaagugcaauuacguguuuaacaauagccuaauaagacagcuccagccuaucaacuauuucgauucuuaccuggguuguguagugaaugcuuacaacuccaccgccauuaguguucaaacgugcgaccuuaccgucggcagcggguauuguguggauuacucuaagaauggaggcuccgguucagcaaucacaacuggguauagguucaccaacuuugagccauucacagugaauagugucaacgacagcuuggaacccguuggcggacuguacgagauucagaucccgucggaauuuacuauaggcaacauggaggaguucauccagaccuccucuccuaaagugacgauugauugcgccgcuuuuguguguggggacuaugccgcaugcaagagccagcucguagaauacggaucauucugugauaauaucaacgcgauucugacagaggucaaugaauuacuggacaccacucaacuucagguggcuaacaguuugaugaauggcguuacacucuccaccaagcugaaagacggugugaacuuuaaugucgaugacaucaacuucucuagcgugcuagggugccugggauccgagugcucaaaggccagcagucggucugcaauagaagaucuccuguuugacaaaguuaaacuuuccgaugugggcuucguagccgcuuauaauaacuguacugguggcgccgagauucgagacuugaucugcguccagagcuacaaggggauuaaggugcugccacccuuacucucggagaaucagaucucaggauacacccuggcagcuacaucugccagucuuuuuccucccuggacggcggccgcuggcgugccauucuaucugaacguccaauaccgcauaaauggguugggaguuaccauggaugugcucucccagaaccagaagcugaucgcaaaugccuucaacaaugcucuagacgccauucaagaaggcuuugaugcaacuaacagcgcgcugguaaaaauccaggccguggucaacgcuaaugccgaggcacucaacaaucugcuucagcaguugucuaacagauucggugcuauuagcuccucacugcaagaaaucuuaaguaggcucgacccucccgaggccgaagcacagauagaucggcugauuaaugggcgccuuacagcccugaacgcuuaugugagccagcagcuaucugacuccacccucguuaaguuuucagcggcccaagcaauggagaaagugaaugagugugucaagagucagagcuccagaaucaacuucugcggaaauggcaaccacaucauuucucuggugcagaaugcuccauacgguuuguauuuuauccauuucucguacguuccgacaaaauaugugacugccaaggucagcccuggccuguguauugccggggauaggggaauagcucccaaaucaggcuacuuuguaaacgugaauaacaccuggauguacacgggguccggauauuacuauccagaacccaucacagagaauaacguuguggucaugaguaccugcgcagugaacuacacuaaggccccuuauguaauguuaaauaccucuacaccaaaccuccccgacuuccgugaggaacuggaccagugguuuaagaaucaaacuagcguggcgccugaucuuucccuggacuacauuaacgucaccuucuuggaucuccagguugagaugaaucggcugcaggaagcuaucaaagugcuaaacugaggacuaguuauaagacugacuagcccgaugggccucccaacgggcccuccuccccuccuugcaccgagauuaauaaaaaaaaaaaaaaaaaaaaaaaaaaaaaaaaaaaaaaaaaaaaaaaaaaaaaaaaaaaaaaaaugcaucccccccccccccccccccccccccccccccaaaggcucuuuucagagccaccagaauu

SEQ ID NO: 15188 - RNA, 4162 nt, Artificial Sequence
  HCoV/OC43/1783A_10__AIL49484.1 spike protein mRNA human (variant)
aggagaaagcuuaccauguuccugauccuccuuauuagccugcccaccgccuuugcugugauaggcgacuugaagugcccuuuagauuccagaacagggucucugaacaauaucgacacuggaccaccgucaauuaguacggcaaccgucgauguuacaaacggucuaggcacuuacuaugugcucgacaggguauaccugaauaccacacuuuuccugaacggguauuaccccaccagcggauccacuuaucggaauauggccuugaaaggcacagauaagcucucuacccugugguuuaaaccuccauuccugucggacuuuaucaacgguauuuucgcgaaggugaaaaauacgaaggucuuuaaggauggggugauguacucagaguuccccgcuaucacuauaggaagcaccuuuguuaacacaaguuauuccguggucgugcagccucgcacuaucaauucuacccaagacggcguaaacaaacuccagggcuuacuggaaguuagcgugugucaguacaauaugugcgaguacccacacacaauuugucaucccaaacuugggaaccacuucaaggaauuguggcauauggauaccggagucguguccugccuguauaagcgaaauuuuacguacgacgugaacgccacuuaucuauacuuccacuuuuaucaggaggguggcacauucuacgcauauuucaccgauacuggggucguuacaaaauuucucuucaauguguaccugggaauggcccuuucacauuacuauguaaugccucugaccuguaucagucguagagacauuggcuuuacguuggaauacugggugaccccacucacaagcaggcaauaucuguuagcuuucaaccaggaugguaucauauuuaacgcagucgacugcaugucugacuucauguccgagauuaaguguaagacucagucaaucgccccgcccaccgggguguacgagcugaauggauauacaguucagccuauugcugauguguaccggcgcaaaccagaccuccccaacugcaauaucgaagccuggcuuaacgauaagagcgucccuaguccacugaauugggagagaaaaacuuuuucuaacuguaauuucaacauguccagcuugaugucguuuauccaagcggacucuuuuaccugcaauaacauugaugcagccaagauauauggcauguguuucuccucaaucacaauugacaaauucgcuauccccaauggcaggaagguggaucuacagcuggggaaccucggauaccugcagaguuuuaauuaccggauagacaccacugccacgagcugccagcuuuauuacaaccugccggcagcuaauguauccguuucucgcuucaacccuagcacauggaacaaacgauucgguuuuauugaaaauucaguguucaagccccaaccagccggcgucuugaccaaccacgauguggucuaugcgcagcacugcuuuaaggccccuaaaaauuucugucccugcaagcucaacaguucccuguguguggggagcggaccaggcaaaaauaacgguaucgggacuugccccgcaggcaccaauuacuuaacaugucauaaccugugcaauccugacccaaucaccuuuacuggaccguauaaguguccccagacaaaaucucuaguuggcauuggggagcacugcucaggacucgcugugaagagugauuacugugguggcaacccuugcacgugucaaccacaggccuuccugggguggagcgcugacuccugccuucagggagacaagugcaauaucuuugccaacuugauucugcaugauguaaauucuggccucaccuguucgacugaccugcagaaagcaaacacagauauaaaacuuggugucugcgugaauuaugaccuguacgggaucagcggccaaggaauuuucguugaggugaacgccaccuacuauaacuccuggcagaauuugcucuacgauucaaacggcaaucuguauggguuuagagacuacaucacaaacaggacuuucaugauccggaguuguuauucuggacgugucagcgcugcguuucacgcaaauuccucagaacccgccuuacuguuccgcaacauuaagugcaauuacguguuuaacaauagccuaauaagacagcuccagccuaucaacuauuucgauucuuaccuggguuguguagugaaugcuuacaacuccaccgccauuaguguucaaacgugcgaccuuaccgucggcagcggguauuguguggauuacucuaagaauggaggcuccgguucagcaaucacaacuggguauagguucaccaacuuugagccauucacagugaauagugucaacgacagcuuggaacccguuggcggacuguacgagauucagaucccgucggaauuuacuauaggcaacauggaggaguucauccagaccuccucuccuaaagugacgauugauugcgccgcuuuuguguguggggacuaugccgcaugcaagagccagcucguagaauacggaucauucugugauaauaucaacgcgauucugacagaggucaaugaauuacuggacaccacucaacuucagguggcuaacaguuugaugaauggcguuacacucuccaccaagcugaaagacggugugaacuuuaaugucgaugacaucaacuucucuagcgugcuagggugccugggauccgagugcucaaaggccagcagucggucugcaauagaagaucuccuguuugacaaaguuaaacuuuccgaugugggcuucguagccgcuuauaauaacuguacugguggcgccgagauucgagacuugaucugcguccagagcuacaaggggauuaaggugcugccacccuuacucucggagaaucagaucucaggauacacccuggcagcuacaucugccagucuuuuuccucccuggacggcggccgcuggcgugccauucuaucugaacguccaauaccgcauaaauggguugggaguuaccauggaugugcucucccagaaccagaagcugaucgcaaaugccuucaacaaugcucuagacgccauucaagaaggcuuugaugcaacuaacagcgcgcugguaaaaauccaggccguggucaacgcuaaugccgaggcacucaacaaucugcuucagcaguugucuaacagauucggugcuauuagcuccucacugcaagaaaucuuaaguaggcucgacccucccgaggccgaagcacagauagaucggcugauuaaugggcgccuuacagcccugaacgcuuaugugagccagcagcuaucugacuccacccucguuaaguuuucagcggcccaagcaauggagaaagugaaugagugugucaagagucagagcuccagaaucaacuucugcggaaauggcaaccacaucauuucucuggugcagaaugcuccauacgguuuguauuuuauccauuucucguacguuccgacaaaauaugugacugccaaggucagcccuggccuguguauugccggggauaggggaauagcucccaaaucaggcuacuuuguaaacgugaauaacaccuggauguacacgggguccggauauuacuauccagaacccaucacagagaauaacguuguggucaugaguaccugcgcagugaacuacacuaaggccccuuauguaauguuaaauaccucuacaccaaaccuccccgacuuccgugaggaacuggaccagugguuuaagaaucaaacuagcguggcgccugaucuuucccuggacuacauuaacgucaccuucuuggaucuccagguugagaugaaucggcugcaggaagcuaucaaagugcuaaacggcgguuauauuccggaggccccacgagacgggcaagcauacgugagaaaggauggagaauggguccugcuuucaacauuuugaggacuaguuauaagacugacuagcccgaugggccucccaacgggcccuccuccccuccuugcaccgagauuaauaaaaaaaaaaaaaaaaaaaaaaaaaaaaaaaaaaaaaaaaaaaaaaaaaaaaaaaaaaaaaaaaugcaucccccccccccccccccccccccccccccccaaaggcucuuuucagagccaccagaauu

SEQ ID NO: 15189 - RNA, 4273 nt, Artificial Sequence
  HCoV/HKU1/N5__Q0ZME7.1 spike protein mRNA human (1-1351)
aggagaaagcuuaccauguuccugaucauuuuuauacuccccaccacacuugccgugaucggcgacuucaacugcacuaauagcuuuauuaacgauuacaauaagacgaucccuagaauuuccgaggacgucguugaugugucucugggguugggaaccuauuacguauuaaacaggguguaucugaauacaacucuacucuucaccgguuacuuuccaaaaucaggcgcuaacuuccgggaccuggcacuuaaggggaguaucuaucugagcacauugugguacaaaccgcccuuucucuccgauuucaauaacggaauauuuucuaaggucaaaaauaccaagcuguaugugaacaauacucuguacucggaguucucaacaaucguuauuggcagcguguuugucaacaccaguuacacgaucgugguacagccucacaaugguauucucgaaaucacugccugucaauauaccaugugcgaauacccacauacaguuuguaaguccaaagggucuauacgcaacgagagcuggcacauugacuccucagaacccuuaugccuguucaagaaaaauuuuacuuauaacgugagugcggauuggcuuuacuuccauuucuaucaggagcgaggagucuuuuacgcuuauuacgccgacgugggcaugccuaccacauucuuguuuagccuguaccuaggcaccauccucucucacuauuacgugaugccacugacguguaacgcaauuuccucaaauacugauaacgagacacuugaauauugggucacuccccugagccguagacaguacuugcucaauuucgacgagcaugggguuaucaccaacgccguggauugcaguucuuccuuucugagcgaaauccaguguaagacacaaucguucgcuccuaauaccggaguauaugacuuaucugguuuuacggugaaaccagucgcaaccguguacaggcggauuccgaaccugcccgauugcgacauagacaauuggcucaacaauguuuccgugccuucaccacuuaacugggagcgcagaaucuucaguaauuguaacuuuaaucugagcacauugcuaaggcugguccacguggauuccuucucuugcaacaaucucgacaagagcaagauuuuuggcucauguuucaacaguaucacuguagauaaauuugccauacccaaccggcgccgagacgaucugcagcuuggguccagcggauuccugcagucuucaaauuauaagauugacaucaguagcuccucuugccaguuguacuacucgcucccucugguuaacgugaccaucaauaacuucaauccaagcuccuggaacagaagguauggcuuugguucauucaauuuaaguucuuacgaugucguguauagcgaccacugcuuuuccgucaacucagauuucugucccugcgcugacccgagcgugguuaauucuugugccaaauccaagccucccagugcgauuugcccagcagggacaaaauaccggcauugugaucuggacacuacccuauaugugaagaacuggugccguuguagcugccucccugaccccaucucuacauacuccccaaauaccuguccccaaaagaagguagucgugggaauuggcgagcacugcccuggccuggggauaaacgaagagaaguguggaacucagcuuaaucauucaaguugcuuuugcagcccagaugccuucuuggguuggucguuugacuccuguaucucuaacaaucgcugcaacauuuucagcaacuuuaucuucaauggcaucaacucagggacgacauguaguaaugaucugcucuauuccaacaccgaaauuucuacuggaguuugcgugaauuacgaccuguacggcauaaccggucaggggaucuuuaaagaggucagcgcugccuauuacaacaauuggcagaaccuucuguaugauuccaauggcaacauuaucggauucaaggacuuuuugacaaauaaaaccuacacuauucucccguguuauucaggcagagugagcgcagcuuucuaccaaaacaguucuucccccgcccuguuauauaggaaucugaagugcagcuacguacuaaacaauaucucguucauaucacagccuuuuuacuucgauucuuaucucgggugugugcugaacgcgguuaaccuuacaaguuacuccgucagcucuugcgacuugcggaugggaagcgguuuuuguaucgauuaugcccugccauccucacgacgcaaaagaaggggcauuaguagccccuaccgguucgugacguuugaaccuuucaaugugucuuuugucaacgacuccguugagaccguagggggacucuucgagauccagauuccaacuaauuuuacaaucgcaggccacgaagaguucauacaaaccucaagucccaaggugacaauugauugcagcgcuuuuguguguuccaacuaugccgcuugccacgaccuguuaucugaauacgguacuuucugcgauaauaucaacucgauucugaaugaggucaacgaccuuuuggacaucacccagcuccagguggccaaugcacugaugcaggggguuacgcuaagcucaaaccugaauaccaaccuccauuccgauguggacaauauagauuucaagagucugcuuggcuguuugggaucucaaugcggcagcuccucacgcucucuguuagaagaccuccuguuuaacaaagucaaacuuagcgaugugggguucguugaggccuauaauaacuguacaggagguagugagaucagagaccuguugugcgugcaguccuuuaauggcauuaaaguacucccgccuauccugagcgaaacucagauuucuggguacaccacagcugcgacugucgcagccauguucccacccuggucagcugccgcaggagugccuuuuucccuaaacgugcaguacaggaucaacggccugggugucaccauggauguucucaauaagaaccaaaaacugauagccaaugcuuucaacaaggcccuuuugaguauucagaauggguuuacggcaacaaacagcgcgcuggcuaagauccagucggugguaaaugccaacgcacaggccuuaaauucucuccugcaacagcuuuucaacaaauuuggcgcuaucuccagcucacugcaggagauucuaagucgucucgacaaucuggaagcccaggugcaaaucgaucgguugauuaacggacgacugaccgcauuaaaugcuuaugucucucagcagcucuccgacauaacucugaucaaggccggcgcgagcagagccauugagaaagugaacgaauguguuaagucacaaagucccaggaucaauuucugcgggaacggaaaccacauucuuagccuggugcagaaugcuccauacggcuugcucuuuauccauuucuccuauaaaccuacaucuuuuaagaccguccuggugagccccggucuaugucuguccggggaucgcggaauagcaccaaagcagggcuacuucaucaaacagaacgacucauggauguucacugguucuaguuauuacuauccggagccuauuucggauaagaauguuguguuuaugaacagcugcuccgucaauuucaccaaagcccccuuuaucuaccuuaacaauucuauuccaaaccucucagacuucgaggcugaacugagcuugugguuuaagaaucacacauccaucgcccccaaccugacguucaauagucauauaaacgcaaccuuuuuagaccucuacuaugagaugaauguaauucaagaaucuaucaaaagccugaacucauccuucaucaaucuuaaggagauuggcacuuacgagauguaugugaaauggccuugguacauauggcuguugaucguuauucucuuuaucauuuuccugaugauccuauuuuucauauguugcuguacagggugcggaagugcgugcuuuagcaagugucacaacugcugugaugaauauggcgggcacaacgacuucgugaucaaggccucucaugaugacugaggacuaguuauaagacugacuagcccgaugggccucccaacgggcccuccuccccuccuugcaccgagauuaauaaaaaaaaaaaaaaaaaaaaaaaaaaaaaaaaaaaaaaaaaaaaaaaaaaaaaaaaaaaaaaaaugcaucccccccccccccccccccccccccccccccaaaggcucuuuucagagccaccagaauu

SEQ ID NO: 15190 - RNA, 4273 nt, Artificial Sequence
  HCoV/HKU1/N5__Q0ZME7.1 spike protein mRNA human (1-1351)(N1067P_L1068P)
aggagaaagcuuaccauguuccugaucauuuuuauacuccccaccacacuugccgugaucggcgacuucaacugcacuaauagcuuuauuaacgauuacaauaagacgaucccuagaauuuccgaggacgucguugaugugucucugggguugggaaccuauuacguauuaaacaggguguaucugaauacaacucuacucuucaccgguuacuuuccaaaaucaggcgcuaacuuccgggaccuggcacuuaaggggaguaucuaucugagcacauugugguacaaaccgcccuuucucuccgauuucaauaacggaauauuuucuaaggucaaaaauaccaagcuguaugugaacaauacucuguacucggaguucucaacaaucguuauuggcagcguguuugucaacaccaguuacacgaucgugguacagccucacaaugguauucucgaaaucacugccugucaauauaccaugugcgaauacccacauacaguuuguaaguccaaagggucuauacgcaacgagagcuggcacauugacuccucagaacccuuaugccuguucaagaaaaauuuuacuuauaacgugagugcggauuggcuuuacuuccauuucuaucaggagcgaggagucuuuuacgcuuauuacgccgacgugggcaugccuaccacauucuuguuuagccuguaccuaggcaccauccucucucacuauuacgugaugccacugacguguaacgcaauuuccucaaauacugauaacgagacacuugaauauugggucacuccccugagccguagacaguacuugcucaauuucgacgagcaugggguuaucaccaacgccguggauugcaguucuuccuuucugagcgaaauccaguguaagacacaaucguucgcuccuaauaccggaguauaugacuuaucugguuuuacggugaaaccagucgcaaccguguacaggcggauuccgaaccugcccgauugcgacauagacaauuggcucaacaauguuuccgugccuucaccacuuaacugggagcgcagaaucuucaguaauuguaacuuuaaucugagcacauugcuaaggcugguccacguggauuccuucucuugcaacaaucucgacaagagcaagauuuuuggcucauguuucaacaguaucacuguagauaaauuugccauacccaaccggcgccgagacgaucugcagcuuggguccagcggauuccugcagucuucaaauuauaagauugacaucaguagcuccucuugccaguuguacuacucgcucccucugguuaacgugaccaucaauaacuucaauccaagcuccuggaacagaagguauggcuuugguucauucaauuuaaguucuuacgaugucguguauagcgaccacugcuuuuccgucaacucagauuucugucccugcgcugacccgagcgugguuaauucuugugccaaauccaagccucccagugcgauuugcccagcagggacaaaauaccggcauugugaucuggacacuacccuauaugugaagaacuggugccguuguagcugccucccugaccccaucucuacauacuccccaaauaccuguccccaaaagaagguagucgugggaauuggcgagcacugcccuggccuggggauaaacgaagagaaguguggaacucagcuuaaucauucaaguugcuuuugcagcccagaugccuucuuggguuggucguuugacuccuguaucucuaacaaucgcugcaacauuuucagcaacuuuaucuucaauggcaucaacucagggacgacauguaguaaugaucugcucuauuccaacaccgaaauuucuacuggaguuugcgugaauuacgaccuguacggcauaaccggucaggggaucuuuaaagaggucagcgcugccuauuacaacaauuggcagaaccuucuguaugauuccaauggcaacauuaucggauucaaggacuuuuugacaaauaaaaccuacacuauucucccguguuauucaggcagagugagcgcagcuuucuaccaaaacaguucuucccccgcccuguuauauaggaaucugaagugcagcuacguacuaaacaauaucucguucauaucacagccuuuuuacuucgauucuuaucucgggugugugcugaacgcgguuaaccuuacaaguuacuccgucagcucuugcgacuugcggaugggaagcgguuuuuguaucgauuaugcccugccauccucacgacgcaaaagaaggggcauuaguagccccuaccgguucgugacguuugaaccuuucaaugugucuuuugucaacgacuccguugagaccguagggggacucuucgagauccagauuccaacuaauuuuacaaucgcaggccacgaagaguucauacaaaccucaagucccaaggugacaauugauugcagcgcuuuuguguguuccaacuaugccgcuugccacgaccuguuaucugaauacgguacuuucugcgauaauaucaacucgauucugaaugaggucaacgaccuuuuggacaucacccagcuccagguggccaaugcacugaugcaggggguuacgcuaagcucaaaccugaauaccaaccuccauuccgauguggacaauauagauuucaagagucugcuuggcuguuugggaucucaaugcggcagcuccucacgcucucuguuagaagaccuccuguuuaacaaagucaaacuuagcgaugugggguucguugaggccuauaauaacuguacaggagguagugagaucagagaccuguugugcgugcaguccuuuaauggcauuaaaguacucccgccuauccugagcgaaacucagauuucuggguacaccacagcugcgacugucgcagccauguucccacccuggucagcugccgcaggagugccuuuuucccuaaacgugcaguacaggaucaacggccugggugucaccauggauguucucaauaagaaccaaaaacugauagccaaugcuuucaacaaggcccuuuugaguauucagaauggguuuacggcaacaaacagcgcgcuggcuaagauccagucggugguaaaugccaacgcacaggccuuaaauucucuccugcaacagcuuuucaacaaauuuggcgcuaucuccagcucacugcaggagauucuaagucgucucgaucccccagaagcccaggugcaaaucgaccggcugauuaauggacgauugaccgcacugaacgcuuaugucucucagcaguuauccgacauaacucucaucaaggccggcgcgagcagagccauugagaaagugaaugaauguguuaagucacaaaguccuaggaucaacuucugcgggaauggaaaccacauucugagccuugugcagaacgcucccuacggccuguuguuuauccauuucuccuauaaaccaacaucuuuuaagaccguccucgugagcccgggucugugucuauccggggaucgcggaauagcaccuaagcagggcuacuucaucaaacagaaugacucauggauguucacugguucuaguuauuacuaucccgagccaauuucggauaagaacguuguguuuaugaauagcugcuccgucaacuucaccaaagcccccuuuaucuaccugaauaacucuauuccuaaucuuucagacuucgaggcugaacucagccugugguuuaagaaccacacauccaucgccccaaauuugacguucaacagucauauaaaugcaaccuuucuggacuuauacuaugagaugaacguaauucaagaaucuaucaaaagccucaauucauccuucaucaaccugaaggagauuggcacuuacgagauguaugugaaauggcccugguacauauggcuucugaucguuauuuuguuuaucauuuuccucaugauccuguuuuucauauguugcuguacagggugcggaagugcgugcuuuagcaagugucacaauugcugugaugaauauggcgggcacaacgacuucgugaucaaggccucucaugaugacugaggacuaguuauaagacugacuagcccgaugggccucccaacgggcccuccuccccuccuugcaccgagauuaauaaaaaaaaaaaaaaaaaaaaaaaaaaaaaaaaaaaaaaaaaaaaaaaaaaaaaaaaaaaaaaaaugcaucccccccccccccccccccccccccccccccaaaggcucuuuucagagccaccagaauu

SEQ ID NO: 15191 - RNA, 4048 nt, Artificial Sequence
  HCoV/HKU1/N5__Q0ZME7.1 spike protein mRNA human (variant)
aggagaaagcuuaccauguuccugaucauuuuuauacuccccaccacacuugccgugaucggcgacuucaacugcacuaauagcuuuauuaacgauuacaauaagacgaucccuagaauuuccgaggacgucguugaugugucucugggguugggaaccuauuacguauuaaacaggguguaucugaauacaacucuacucuucaccgguuacuuuccaaaaucaggcgcuaacuuccgggaccuggcacuuaaggggaguaucuaucugagcacauugugguacaaaccgcccuuucucuccgauuucaauaacggaauauuuucuaaggucaaaaauaccaagcuguaugugaacaauacucuguacucggaguucucaacaaucguuauuggcagcguguuugucaacaccaguuacacgaucgugguacagccucacaaugguauucucgaaaucacugccugucaauauaccaugugcgaauacccacauacaguuuguaaguccaaagggucuauacgcaacgagagcuggcacauugacuccucagaacccuuaugccuguucaagaaaaauuuuacuuauaacgugagugcggauuggcuuuacuuccauuucuaucaggagcgaggagucuuuuacgcuuauuacgccgacgugggcaugccuaccacauucuuguuuagccuguaccuaggcaccauccucucucacuauuacgugaugccacugacguguaacgcaauuuccucaaauacugauaacgagacacuugaauauugggucacuccccugagccguagacaguacuugcucaauuucgacgagcaugggguuaucaccaacgccguggauugcaguucuuccuuucugagcgaaauccaguguaagacacaaucguucgcuccuaauaccggaguauaugacuuaucugguuuuacggugaaaccagucgcaaccguguacaggcggauuccgaaccugcccgauugcgacauagacaauuggcucaacaauguuuccgugccuucaccacuuaacugggagcgcagaaucuucaguaauuguaacuuuaaucugagcacauugcuaaggcugguccacguggauuccuucucuugcaacaaucucgacaagagcaagauuuuuggcucauguuucaacaguaucacuguagauaaauuugccauacccaaccggcgccgagacgaucugcagcuuggguccagcggauuccugcagucuucaaauuauaagauugacaucaguagcuccucuugccaguuguacuacucgcucccucugguuaacgugaccaucaauaacuucaauccaagcuccuggaacagaagguauggcuuugguucauucaauuuaaguucuuacgaugucguguauagcgaccacugcuuuuccgucaacucagauuucugucccugcgcugacccgagcgugguuaauucuugugccaaauccaagccucccagugcgauuugcccagcagggacaaaauaccggcauugugaucuggacacuacccuauaugugaagaacuggugccguuguagcugccucccugaccccaucucuacauacuccccaaauaccuguccccagaaaaagguagucgugggaauuggcgagcacugcccuggccuggggauaaacgaagagaaguguggaacucaacuuaaucauucaaguugcuuuugcagcccagaugccuucuuggguuggucguuugacuccuguaucucuaacaaucgcugcaacauuuucagcaacuuuaucuucaauggcaucaacucagggacgacauguaguaaugaucugcucuauuccaacaccgaaauuucuacuggaguuugcgugaauuacgaccuguacggcauaaccggucaggggaucuuuaaagaggucagcgcugccuauuacaacaauuggcagaaccuucuguaugauuccaauggcaacauuaucggauucaaggacuuuuugacaaauaaaaccuacacuauucucccguguuauucaggcagagugagcgcagcuuucuaccaaaacaguucuucccccgcccuguuauauaggaaucugaagugcagcuacguacuaaacaauaucucguucauaucacagccuuuuuacuucgauucuuaucucgggugugugcugaacgcgguuaaccuuacaaguuacuccgucagcucuugcgacuugcggaugggaagcgguuuuuguaucgauuaugcccugccauccucaggcgggaguggaagcggcauuucuucccccuaccgauucgugacguuugaaccuuucaaugugucauuugucaacgacaguguugagaccguggguggccucuucgagauccagauuccaacuaauuuuacaaucgcagggcacgaagaguucauacaaaccagcucccccaaagugacaauugauugcucugcuuuuguauguucgaacuaugccgcuugccacgaccuguuaagcgaauacggaacuuucugcgauaauaucaacucaauucugaaugaggucaacgaccuuuuggacaucacccagcuccagguggccaaugcacugaugcagggcguuacgcuauccaguaaccugaauaccaaccuccauucugauguggacaauauagauuucaagagccugcuuggguguuugggaucccaaugcgguucaucuagccgcagucuguuagaagaccuccuguuuaacaaggucaaacuuuccgaugugggcuucguugaggccuauaauaacuguacagggggaagcgagaucagagaccuguugugcgugcagucuuuuaauggcauuaagguacucccgccuauccugucagaaacucagauuuccgguuacaccacagcugcgacugucgcagccauguucccacccuggagugcugccgcaggggugccuuuuagccuaaacgugcaguacaggaucaacggccugggagucaccauggauguucucaauaaaaaccaaaagcugauagccaaugcuuucaacaaagcccuuuugucgauucagaauggcuuuacggcaacaaacucugcgcuggcuaagauccaguccgugguaaaugccaacgcacaggccuuaaauagccuccugcaacagcuuuucaacaaguuuggggcuaucucaaguucucugcaggagauucuaucccggcucgaucccccagaagcccaggugcaaaucgaccgccugauuaauggaagauugaccgcacugaacgcuuaugucagccagcaguuaucagacauaacucucaucaaagccggcgcgaguagggccauugagaaggugaaugaauguguuaaaagccaauccccucguaucaacuucugcgguaaugggaaccacauucugucucuugugcagaacgcucccuacggacuguuguuuauccauuucagcuauaagccaacauccuuuaaaaccguccucgugucaccgggccugugucuaucuggugaucggggcauagcaccuaagcagggguacuucaucaagcagaaugacaguuggauguucacuggaucgagcuauuacuaucccgagccaauuuccgauaaaaacguuguguuuaugaacucuugcucagucaauuucaccaaggcccccuuuaucuaccugaauaacagcauuccuaaucuuuccgacuucgaggcugaacucagucugugguuuaaaaaccacacaucuaucgccccaaauuugacguucaacagccauauaaaugcaaccuuucuggacuuauacuaugagaugaacguaauucaagaaucaaucaagucccucaauugaggacuaguuauaagacugacuagcccgaugggccucccaacgggcccuccuccccuccuugcaccgagauuaauaaaaaaaaaaaaaaaaaaaaaaaaaaaaaaaaaaaaaaaaaaaaaaaaaaaaaaaaaaaaaaaaugcaucccccccccccccccccccccccccccccccaaaggcucuuuucagagccaccagaauu

SEQ ID NO: 15192 - RNA, 4129 nt, Artificial Sequence
  HCoV/HKU1/N5__Q0ZME7.1 spike protein mRNA human (variant)
aggagaaagcuuaccauguuccugaucauuuuuauacuccccaccacacuugccgugaucggcgacuucaacugcacuaauagcuuuauuaacgauuacaauaagacgaucccuagaauuuccgaggacgucguugaugugucucugggguugggaaccuauuacguauuaaacaggguguaucugaauacaacucuacucuucaccgguuacuuuccaaaaucaggcgcuaacuuccgggaccuggcacuuaaggggaguaucuaucugagcacauugugguacaaaccgcccuuucucuccgauuucaauaacggaauauuuucuaaggucaaaaauaccaagcuguaugugaacaauacucuguacucggaguucucaacaaucguuauuggcagcguguuugucaacaccaguuacacgaucgugguacagccucacaaugguauucucgaaaucacugccugucaauauaccaugugcgaauacccacauacaguuuguaaguccaaagggucuauacgcaacgagagcuggcacauugacuccucagaacccuuaugccuguucaagaaaaauuuuacuuauaacgugagugcggauuggcuuuacuuccauuucuaucaggagcgaggagucuuuuacgcuuauuacgccgacgugggcaugccuaccacauucuuguuuagccuguaccuaggcaccauccucucucacuauuacgugaugccacugacguguaacgcaauuuccucaaauacugauaacgagacacuugaauauugggucacuccccugagccguagacaguacuugcucaauuucgacgagcaugggguuaucaccaacgccguggauugcaguucuuccuuucugagcgaaauccaguguaagacacaaucguucgcuccuaauaccggaguauaugacuuaucugguuuuacggugaaaccagucgcaaccguguacaggcggauuccgaaccugcccgauugcgacauagacaauuggcucaacaauguuuccgugccuucaccacuuaacugggagcgcagaaucuucaguaauuguaacuuuaaucugagcacauugcuaaggcugguccacguggauuccuucucuugcaacaaucucgacaagagcaagauuuuuggcucauguuucaacaguaucacuguagauaaauuugccauacccaaccggcgccgagacgaucugcagcuuggguccagcggauuccugcagucuucaaauuauaagauugacaucaguagcuccucuugccaguuguacuacucgcucccucugguuaacgugaccaucaauaacuucaauccaagcuccuggaacagaagguauggcuuugguucauucaauuuaaguucuuacgaugucguguauagcgaccacugcuuuuccgucaacucagauuucugucccugcgcugacccgagcgugguuaauucuugugccaaauccaagccucccagugcgauuugcccagcagggacaaaauaccggcauugugaucuggacacuacccuauaugugaagaacuggugccguuguagcugccucccugaccccaucucuacauacuccccaaauaccuguccccagaaaaagguagucgugggaauuggcgagcacugcccuggccuggggauaaacgaagagaaguguggaacucaacuuaaucauucaaguugcuuuugcagcccagaugccuucuuggguuggucguuugacuccuguaucucuaacaaucgcugcaacauuuucagcaacuuuaucuucaauggcaucaacucagggacgacauguaguaaugaucugcucuauuccaacaccgaaauuucuacuggaguuugcgugaauuacgaccuguacggcauaaccggucaggggaucuuuaaagaggucagcgcugccuauuacaacaauuggcagaaccuucuguaugauuccaauggcaacauuaucggauucaaggacuuuuugacaaauaaaaccuacacuauucucccguguuauucaggcagagugagcgcagcuuucuaccaaaacaguucuucccccgcccuguuauauaggaaucugaagugcagcuacguacuaaacaauaucucguucauaucacagccuuuuuacuucgauucuuaucucgggugugugcugaacgcgguuaaccuuacaaguuacuccgucagcucuugcgacuugcggaugggaagcgguuuuuguaucgauuaugcccugccauccucaggcgggaguggaagcggcauuucuucccccuaccgauucgugacguuugaaccuuucaaugugucauuugucaacgacaguguugagaccguggguggccucuucgagauccagauuccaacuaauuuuacaaucgcagggcacgaagaguucauacaaaccagcucccccaaagugacaauugauugcucugcuuuuguauguucgaacuaugccgcuugccacgaccuguuaagcgaauacggaacuuucugcgauaauaucaacucaauucugaaugaggucaacgaccuuuuggacaucacccagcuccagguggccaaugcacugaugcagggcguuacgcuauccaguaaccugaauaccaaccuccauucugauguggacaauauagauuucaagagccugcuuggguguuugggaucccaaugcgguucaucuagccgcagucuguuagaagaccuccuguuuaacaaggucaaacuuuccgaugugggcuucguugaggccuauaauaacuguacagggggaagcgagaucagagaccuguugugcgugcagucuuuuaauggcauuaagguacucccgccuauccugucagaaacucagauuuccgguuacaccacagcugcgacugucgcagccauguucccacccuggagugcugccgcaggggugccuuuuagccuaaacgugcaguacaggaucaacggccugggagucaccauggauguucucaauaaaaaccaaaagcugauagccaaugcuuucaacaaagcccuuuugucgauucagaauggcuuuacggcaacaaacucugcgcuggcuaagauccaguccgugguaaaugccaacgcacaggccuuaaauagccuccugcaacagcuuuucaacaaguuuggggcuaucucaaguucucugcaggagauucuaucccggcucgaucccccagaagcccaggugcaaaucgaccgccugauuaauggaagauugaccgcacugaacgcuuaugucagccagcaguuaucagacauaacucucaucaaagccggcgcgaguagggccauugagaaggugaaugaauguguuaaaagccaauccccucguaucaacuucugcgguaaugggaaccacauucugucucuugugcagaacgcucccuacggacuguuguuuauccauuucagcuauaagccaacauccuuuaaaaccguccucgugucaccgggccugugucuaucuggugaucggggcauagcaccuaagcagggguacuucaucaagcagaaugacaguuggauguucacuggaucgagcuauuacuaucccgagccaauuuccgauaaaaacguuguguuuaugaacucuugcucagucaauuucaccaaggcccccuuuaucuaccugaauaacagcauuccuaaucuuuccgacuucgaggcugaacucagucugugguuuaaaaaccacacaucuaucgccccaaauuugacguucaacagccauauaaaugcaaccuuucuggacuuauacuaugagaugaacguaauucaagaaucaaucaagucccucaauggcggguacauccccgaggcgccucgagauggacaggccuaugugagaaaagacggcgaguggguucugcuuaguacuuucugaggacuaguuauaagacugacuagcccgaugggccucccaacgggcccuccuccccuccuugcaccgagauuaauaaaaaaaaaaaaaaaaaaaaaaaaaaaaaaaaaaaaaaaaaaaaaaaaaaaaaaaaaaaaaaaaugcaucccccccccccccccccccccccccccccccaaaggcucuuuucagagccaccagaauu

SEQ ID NO: 15193 - RNA, 3733 nt, Artificial Sequence
  HCoV/229E/BN1/GER/2015__AOG74783.1 spike protein mRNA human (1-1171)
aggagaaagcuuaccauguucgugcugcucgucgccuacgcacuucugcacaucgcuggcugccagaccacaaacgggacuaauacgagccauuccguuuguaacggaugcgugggucacucugagaauguauuugccguggaaucaggcggguauauucccaguaacuucgcguuuaauaacugguucuuguuaaccaauacaagcuccgucguggacggaguugugagaucuuuucaaccucugcuacucaacugucuguggucggucucaggcagccaguucacuaccgguuuuguguacuucaaugggacaggaaggggcgcuugcaagggcuuuuauaguaacgccuccucugauguaauacgguacaauaucaacuucgaggaaaaucuucgccgagggaccauucuguuuaaaacuagcuauggagcaguuguguucuacuguacaaacaauaccuuggucuccggugacgcccauaucccaucaggcacggugcucgggaacuuuuauugcuucgugaacacuaccauuggaaaugagacaacuagcgcuuucgucggcgcacugccgaagaccguucgugaauuugugaucagcagaacaggucacuucuacauaaacggguacagguauuuuucucugggagauguagaggccgugaauuucaacgucaccaaugcugccacgacuguguguacaguugcgcucgcauccuacgccgacguguuagucaacgugucacagaccgcuaucgccaauauuaucuauugcaacagcguaauuaaucggcugcgcugugaucagcuuaguuuugacguucccgauggcuucuacucuacuuccccuauccaaccaguggaguugcccgucagcauagugucgcugccugucuaucauaaacacacauuuauugugcuauacguuaacuucgaacacagaaggggcccagggaagugcuauaauugucggcccgcagugaucaacauuacccucgcuaauuuuaacgagacgaaaggaccucugugcguagacaccucucauuucacaacucaguuugucgauaaugugaaguuggcccgcugguccgcgucaaucaacaccgguaacugcccauucaguuuuggcaagguuaauaacuucgugaaauucgggagcgucuguuuuucccugaaggacaucccgggaggcugcgccaugcccauuauggcaaauuuggugaacucuaaaagccacaauauagguucacucuacguaaguugguccgauggggacgugaucacaggcguuccuaagccagucgaaggagugagcucuuucaugaacgugacucugaauaaauguaccaaguacaacauuuaugaugucucaggcguuggggugauccgaauaaguaaugacacauuuuuaaacggaauuaccuacacuagcacguccgguaaucugcucggcuucaaggacgugacaaacgggaccaucuauucuaucacucccugcaauccuccagaucagcuuguagucuaccagcaagcugugguuggagccaugcugucggagaacuuuaccagcuauggcuucuccaauguggucgagaugcccaaauuuuucuacgcuucaaacgguacauauaacuguaccgacgccguguugacuuacaguucuuuugggguuugcgcagauggcagcauuaucgccgugcagccgagaaauguauccuacgacucagucagcgcuauugugacagcgaaccuaucuauaccuuucaauuggacgaccuccgugcaggucgaauaucugcagaucacaaguacucccauuguuguggauuguagcaccuacguaugcaacggaaaugugaggugugucgagcuccugaagcaauauacaucugcaugcaaaacuaucgaagacgcccuucggaacuccgcuaugcuggagucagccgaugugagugaaauguugaccuuugacaagaaagcauucacgcucgccaauguuagcucguuuggcgauuacaaccuguccucugugaucccaaguuuaccucguucagggagucgcgucgcuggaagauccgccauugaggacauacuguucucuaagcuagugaccagcggucucggcacaguugaugcagacuauaaaaaguguacuaaggggcuguccaucgcggaccuugcuugcgcccaguacuauaauggaauuaugguguugcccggcgucgcagaugccgagaggauggcuauguacaccgguucacugaucgggggcauugcccucggaggccugacaagcgcagcuaguaucccauucucucuugccauacagucccggcugaacuacguagcguugcaaacugacgugcuccaggaaaaucagcgaauccuggccgcuagcuuuaacaaagcaaugaccaauauuguugaugccuucacgggggugaacgacgcuaucacacagaccucgcaagccuuacagacugucgcaacagcgcugaauaagauucaggaugugguaaaccagcaaggaaacucacuaaaucaucucaccucucagcugcgccagaacuuucaggccaucaguuccagcauacaagcuauuuaugacagacuugauaucauucaggccgaccaacagguggauagguugaucacuggccggcuggcagcucucaaugucuucguuucucacacccugacaaaauacacggaggugcgcgccagcagacaguuagcacagcagaaggugaacgaaugcgucaaaucccaaucaaagagguaugguuuuugugggaauggaacccacauauucagucuggugaacgccgcucccgagggccuuguuuuucuucauacuguacuccugccuacacaguacaaggacguggaagcguggagcggucuaugcgucgauggcaucaauggguaugugcugcgucagccaaaccucgcccuguacaaagagggaaauuauuaccggauuaccucucgaaucauguucgagccgaggauucccacaaucgcagacuuuguucagauagaaaacuguaaugugacuuucgucaacauuuccagaucagagcuucaaaccaucgugccugaauacaucgauguaaauaagacguugcaggagcugaguuauaaauuaccaaacuacacaguccccgaccucgugguugaacaguauaaucagaccauucugaaccuuacuagcgagaucuccacccuggagaauaagucugcugaauugaacuacacagugcaaaaacuccagacucugauugacaacauaaauucgacccuagucgaucugaaguggcucaaccgcguggagacauauaucaaguggccuugguggguuuggcugugcauuagcgugguccuuaucuuugugguaucaauguugcuguuauguugcuguuccacgggcugcuguggguucuucaguugcuuugccucuagcauucggggauguugcgaauccaccaaacucccauacuaugacguggagaagauccacauacagugaggacuaguuauaagacugacuagcccgaugggccucccaacgggcccuccuccccuccuugcaccgagauuaauaaaaaaaaaaaaaaaaaaaaaaaaaaaaaaaaaaaaaaaaaaaaaaaaaaaaaaaaaaaaaaaaugcaucccccccccccccccccccccccccccccccaaaggcucuuuucagagccaccagaauu

SEQ ID NO: 15194 - RNA, 3733 nt, Artificial Sequence
  HCoV/229E/BN1/GER/2015__AOG74783.1 spike protein mRNA human (1-1171)(I869P_I870P)
aggagaaagcuuaccauguucgugcugcucgucgccuacgcacuucugcacaucgcuggcugccagaccacaaacgggacuaauacgagccauuccguuuguaacggaugcgugggucacucugagaauguauuugccguggaaucaggcggguauauucccaguaacuucgcguuuaauaacugguucuuguuaaccaauacaagcuccgucguggacggaguugugagaucuuuucaaccucugcuacucaacugucuguggucggucucaggcagccaguucacuaccgguuuuguguacuucaaugggacaggaaggggcgcuugcaagggcuuuuauaguaacgccuccucugauguaauacgguacaauaucaacuucgaggaaaaucuucgccgagggaccauucuguuuaaaacuagcuauggagcaguuguguucuacuguacaaacaauaccuuggucuccggugacgcccauaucccaucaggcacggugcucgggaacuuuuauugcuucgugaacacuaccauuggaaaugagacaacuagcgcuuucgucggcgcacugccgaagaccguucgugaauuugugaucagcagaacaggucacuucuacauaaacggguacagguauuuuucucugggagauguagaggccgugaauuucaacgucaccaaugcugccacgacuguguguacaguugcgcucgcauccuacgccgacguguuagucaacgugucacagaccgcuaucgccaauauuaucuauugcaacagcguaauuaaucggcugcgcugugaucagcuuaguuuugacguucccgauggcuucuacucuacuuccccuauccaaccaguggaguugcccgucagcauagugucgcugccugucuaucauaaacacacauuuauugugcuauacguuaacuucgaacacagaaggggcccagggaagugcuauaauugucggcccgcagugaucaacauuacccucgcuaauuuuaacgagacgaaaggaccucugugcguagacaccucucauuucacaacucaguuugucgauaaugugaaguuggcccgcugguccgcgucaaucaacaccgguaacugcccauucaguuuuggcaagguuaauaacuucgugaaauucgggagcgucuguuuuucccugaaggacaucccgggaggcugcgccaugcccauuauggcaaauuuggugaacucuaaaagccacaauauagguucacucuacguaaguugguccgauggggacgugaucacaggcguuccuaagccagucgaaggagugagcucuuucaugaacgugacucugaauaaauguaccaaguacaacauuuaugaugucucaggcguuggggugauccgaauaaguaaugacacauuuuuaaacggaauuaccuacacuagcacguccgguaaucugcucggcuucaaggacgugacaaacgggaccaucuauucuaucacucccugcaauccuccagaucagcuuguagucuaccagcaagcugugguuggagccaugcugucggagaacuuuaccagcuauggcuucuccaauguggucgagaugcccaaauuuuucuacgcuucaaacgguacauauaacuguaccgacgccguguugacuuacaguucuuuugggguuugcgcagauggcagcauuaucgccgugcagccgagaaauguauccuacgacucagucagcgcuauugugacagcgaaccuaucuauaccuuucaauuggacgaccuccgugcaggucgaauaucugcagaucacaaguacucccauuguuguggauuguagcaccuacguaugcaacggaaaugugaggugugucgagcuccugaagcaauauacaucugcaugcaaaacuaucgaagacgcccuucggaacuccgcuaugcuggagucagccgaugugagugaaauguugaccuuugacaagaaagcauucacgcucgccaauguuagcucguuuggcgauuacaaccuguccucugugaucccaaguuuaccucguucagggagucgcgucgcuggaagauccgccauugaggacauacuguucucuaagcuagugaccagcggucucggcacaguugaugcagacuauaaaaaguguacuaaggggcuguccaucgcggaccuugcuugcgcccaguacuauaauggaauuaugguguugcccggcgucgcagaugccgagaggauggcuauguacaccgguucacugaucgggggcauugcccucggaggccugacaagcgcagcuaguaucccauucucucuugccauacagucccggcugaacuacguagcguugcaaacugacgugcuccaggaaaaucagcgaauccuggccgcuagcuuuaacaaagcaaugaccaauauuguugaugccuucacgggggugaacgacgcuaucacacagaccucgcaagccuuacagacugucgcaacagcgcugaauaagauucaggaugugguaaaccagcaaggaaacucacuaaaucaucucaccucucagcugcgccagaacuuucaggccaucaguuccagcauacaagcuauuuaugacagacuugaucccccucaggccgaccaacagguggauagguugaucacuggccggcuggcagcucucaaugucuucguuucucacacccugacaaaauacacggaggugcgcgccagcagacaguuagcacagcagaaggugaacgaaugcgucaaaucccaaucaaagagguaugguuuuugugggaauggaacccacauuuucagucuggugaacgccgcuccagagggccuuguuuuucuucauacuguacuccugccgacacaguacaaggacguggaagcguggagcggucuaugcgucgauggcaucaauggguaugugcugcgucagcccaaccucgcccuguacaaagagggaaauuauuaccggauaaccucucgaaucauguucgagccuaggauuccaacaaucgcagacuuuguucagauugaaaacuguaaugugacuuucgucaacaucuccagaucagagcuucaaaccauagugcccgaauacauugauguaaauaagacguugcaggagcugaguuauaaauuaccuaacuacacagucccagaccucgugguugaacaguauaaucagaccauccugaaccuuacuagcgagaucuccacccuggagaauaagucugcugaauugaacuacacagugcaaaaacuccagacucugauugacaacaucaauucgacccuagucgaucugaaguggcucaaccgcguggagacauauauuaaguggcccugguggguuuggcugugcauaagcgugguccuuaucuuugugguaucaauguugcuguuauguugcuguuccacgggcugcuguggguucuucaguugcuuugccucuagcauucggggauguugcgaauccaccaaacucccguacuaugacguggagaagauccacauucagugaggacuaguuauaagacugacuagcccgaugggccucccaacgggcccuccuccccuccuugcaccgagauuaauaaaaaaaaaaaaaaaaaaaaaaaaaaaaaaaaaaaaaaaaaaaaaaaaaaaaaaaaaaaaaaaaugcaucccccccccccccccccccccccccccccccaaaggcucuuuucagagccaccagaauu

SEQ ID NO: 15195 - RNA, 3544 nt, Artificial Sequence
  HCoV/229E/BN1/GER/2015__AOG74783.1 spike protein mRNA human (variant)
aggagaaagcuuaccauguucgugcugcucgucgccuacgcacuucugcacaucgcuggcugccagaccacaaacgggacuaauacgagccauuccguuuguaacggaugcgugggucacucugagaauguauuugccguggaaucaggcggguauauucccaguaacuucgcguuuaauaacugguucuuguuaaccaauacaagcuccgucguggacggaguugugagaucuuuucaaccucugcuacucaacugucuguggucggucucaggcagccaguucacuaccgguuuuguguacuucaaugggacaggaaggggcgcuugcaagggcuuuuauaguaacgccuccucugauguaauacgguacaauaucaacuucgaggaaaaucuucgccgagggaccauucuguuuaaaacuagcuauggagcaguuguguucuacuguacaaacaauaccuuggucuccggugacgcccauaucccaucaggcacggugcucgggaacuuuuauugcuucgugaacacuaccauuggaaaugagacaacuagcgcuuucgucggcgcacugccgaagaccguucgugaauuugugaucagcagaacaggucacuucuacauaaacggguacagguauuuuucucugggagauguagaggccgugaauuucaacgucaccaaugcugccacgacuguguguacaguugcgcucgcauccuacgccgacguguuagucaacgugucacagaccgcuaucgccaauauuaucuauugcaacagcguaauuaaucggcugcgcugugaucagcuuaguuuugacguucccgauggcuucuacucuacuuccccuauccaaccaguggaguugcccgucagcauagugucgcugccugucuaucauaaacacacauuuauugugcuauacguuaacuucgaacacagaaggggcccagggaagugcuauaauugucggcccgcagugaucaacauuacccucgcuaauuuuaacgagacgaaaggaccucugugcguagacaccucucauuucacaacucaguuugucgauaaugugaaguuggcccgcugguccgcgucaaucaacaccgguaacugcccauucaguuuuggcaagguuaauaacuucgugaaauucgggagcgucuguuuuucccugaaggacaucccgggaggcugcgccaugcccauuauggcaaauuuggugaacucuaaaagccacaauauagguucacucuacguaaguugguccgauggggacgugaucacaggcguuccuaagccagucgaaggagugagcucuuucaugaacgugacucugaauaaauguaccaaguacaacauuuaugaugucucaggcguuggggugauccgaauaaguaaugacacauuuuuaaacggaauuaccuacacuagcacguccgguaaucugcucggcuucaaggacgugacaaacgggaccaucuauucuaucacucccugcaauccuccagaucagcuuguagucuaccagcaagcugugguuggagccaugcugucggagaacuuuaccagcuauggcuucuccaauguggucgagaugcccaaauuuuucuacgcuucaaacgguacauauaacuguaccgacgccguguugacuuacaguucuuuugggguuugcgcagauggcagcauuaucgccgugcagccgagaaauguauccuacgacucagucagcgcuauugugacagcgaaccuaucuauaccuuucaauuggacgaccuccgugcaggucgaauaucugcagaucacaaguacucccauuguuguggauuguagcaccuacguaugcaacggaaaugugaggugugucgagcuccugaagcaauauacaucugcaugcaaaacuaucgaagacgcccuucggaacuccgcuaugcuggagucagccgaugugagugaaauguugaccuuugacaagaaagcauucacgcucgccaauguuagcucguuuggcgauuacaaccuguccucugugaucccaaguuuaccucguucagggagucgcgucgcuggaagauccgccauugaggacauacuguucucuaagcuagugaccagcggucucggcacaguugaugcagacuauaaaaaguguacuaaggggcuguccaucgcggaccuugcuugcgcccaguacuauaauggaauuaugguguugcccggcgucgcagaugccgagaggauggcuauguacaccgguucacugaucgggggcauugcccucggaggccugacaagcgcagcuaguaucccauucucucuugccauacagucccggcugaacuacguagcguugcaaacugacgugcuccaggaaaaucagcgaauccuggccgcuagcuuuaacaaagcaaugaccaauauuguugaugccuucacgggggugaacgacgcuaucacacagaccucgcaagccuuacagacugucgcaacagcgcugaauaagauucaggaugugguaaaccagcaaggaaacucacuaaaucaucucaccucucagcugcgccagaacuuucaggccaucaguuccagcauacaagcuauuuaugacagacuugaucccccucaggccgaccaacagguggauagguugaucacuggccggcuggcagcucucaaugucuucguuucucacacccugacaaaauacacggaggugcgcgccagcagacaguuagcacagcagaaggugaacgaaugcgucaaaucccaaucaaagagguaugguuuuugugggaauggaacccacauuuucagucuggugaacgccgcuccagagggccuuguuuuucuucauacuguacuccugccgacacaguacaaggacguggaagcguggagcggucuaugcgucgauggcaucaauggguaugugcugcgucagcccaaccucgcccuguacaaagagggaaauuauuaccggauaaccucucgaaucauguucgagccuaggauuccaacaaucgcagacuuuguucagauugaaaacuguaaugugacuuucgucaacaucuccagaucagagcuucaaaccauagugcccgaauacauugauguaaauaagacguugcaggagcugaguuauaaauuaccuaacuacacagucccagaccucgugguugaacaguauaaucagaccauccugaaccuuacuagcgagaucuccacccuggagaauaagucugcugaauugaacuacacagugcaaaaacuccagacucugauugacaacaucaauucgacccuagucgaucugaaguggcucaaccgcguggagacaugaggacuaguuauaagacugacuagcccgaugggccucccaacgggcccuccuccccuccuugcaccgagauuaauaaaaaaaaaaaaaaaaaaaaaaaaaaaaaaaaaaaaaaaaaaaaaaaaaaaaaaaaaaaaaaaaugcaucccccccccccccccccccccccccccccccaaaggcucuuuucagagccaccagaauu

SEQ ID NO: 15196 - RNA, 3625 nt, Artificial Sequence
  HCoV/229E/BN1/GER/2015__AOG74783.1 spike protein mRNA human (variant)
aggagaaagcuuaccauguucgugcugcucgucgccuacgcacuucugcacaucgcuggcugccagaccacaaacgggacuaauacgagccauuccguuuguaacggaugcgugggucacucugagaauguauuugccguggaaucaggcggguauauucccaguaacuucgcguuuaauaacugguucuuguuaaccaauacaagcuccgucguggacggaguugugagaucuuuucaaccucugcuacucaacugucuguggucggucucaggcagccaguucacuaccgguuuuguguacuucaaugggacaggaaggggcgcuugcaagggcuuuuauaguaacgccuccucugauguaauacgguacaauaucaacuucgaggaaaaucuucgccgagggaccauucuguuuaaaacuagcuauggagcaguuguguucuacuguacaaacaauaccuuggucuccggugacgcccauaucccaucaggcacggugcucgggaacuuuuauugcuucgugaacacuaccauuggaaaugagacaacuagcgcuuucgucggcgcacugccgaagaccguucgugaauuugugaucagcagaacaggucacuucuacauaaacggguacagguauuuuucucugggagauguagaggccgugaauuucaacgucaccaaugcugccacgacuguguguacaguugcgcucgcauccuacgccgacguguuagucaacgugucacagaccgcuaucgccaauauuaucuauugcaacagcguaauuaaucggcugcgcugugaucagcuuaguuuugacguucccgauggcuucuacucuacuuccccuauccaaccaguggaguugcccgucagcauagugucgcugccugucuaucauaaacacacauuuauugugcuauacguuaacuucgaacacagaaggggcccagggaagugcuauaauugucggcccgcagugaucaacauuacccucgcuaauuuuaacgagacgaaaggaccucugugcguagacaccucucauuucacaacucaguuugucgauaaugugaaguuggcccgcugguccgcgucaaucaacaccgguaacugcccauucaguuuuggcaagguuaauaacuucgugaaauucgggagcgucuguuuuucccugaaggacaucccgggaggcugcgccaugcccauuauggcaaauuuggugaacucuaaaagccacaauauagguucacucuacguaaguugguccgauggggacgugaucacaggcguuccuaagccagucgaaggagugagcucuuucaugaacgugacucugaauaaauguaccaaguacaacauuuaugaugucucaggcguuggggugauccgaauaaguaaugacacauuuuuaaacggaauuaccuacacuagcacguccgguaaucugcucggcuucaaggacgugacaaacgggaccaucuauucuaucacucccugcaauccuccagaucagcuuguagucuaccagcaagcugugguuggagccaugcugucggagaacuuuaccagcuauggcuucuccaauguggucgagaugcccaaauuuuucuacgcuucaaacgguacauauaacuguaccgacgccguguugacuuacaguucuuuugggguuugcgcagauggcagcauuaucgccgugcagccgagaaauguauccuacgacucagucagcgcuauugugacagcgaaccuaucuauaccuuucaauuggacgaccuccgugcaggucgaauaucugcagaucacaaguacucccauuguuguggauuguagcaccuacguaugcaacggaaaugugaggugugucgagcuccugaagcaauauacaucugcaugcaaaacuaucgaagacgcccuucggaacuccgcuaugcuggagucagccgaugugagugaaauguugaccuuugacaagaaagcauucacgcucgccaauguuagcucguuuggcgauuacaaccuguccucugugaucccaaguuuaccucguucagggagucgcgucgcuggaagauccgccauugaggacauacuguucucuaagcuagugaccagcggucucggcacaguugaugcagacuauaaaaaguguacuaaggggcuguccaucgcggaccuugcuugcgcccaguacuauaauggaauuaugguguugcccggcgucgcagaugccgagaggauggcuauguacaccgguucacugaucgggggcauugcccucggaggccugacaagcgcagcuaguaucccauucucucuugccauacagucccggcugaacuacguagcguugcaaacugacgugcuccaggaaaaucagcgaauccuggccgcuagcuuuaacaaagcaaugaccaauauuguugaugccuucacgggggugaacgacgcuaucacacagaccucgcaagccuuacagacugucgcaacagcgcugaauaagauucaggaugugguaaaccagcaaggaaacucacuaaaucaucucaccucucagcugcgccagaacuuucaggccaucaguuccagcauacaagcuauuuaugacagacuugaucccccucaggccgaccaacagguggauagguugaucacuggccggcuggcagcucucaaugucuucguuucucacacccugacaaaauacacggaggugcgcgccagcagacaguuagcacagcagaaggugaacgaaugcgucaaaucccaaucaaagagguaugguuuuugugggaauggaacccacauuuucagucuggugaacgccgcuccagagggccuuguuuuucuucauacuguacuccugccgacacaguacaaggacguggaagcguggagcggucuaugcgucgauggcaucaauggguaugugcugcgucagcccaaccucgcccuguacaaagagggaaauuauuaccggauaaccucucgaaucauguucgagccuaggauuccaacaaucgcagacuuuguucagauugaaaacuguaaugugacuuucgucaacaucuccagaucagagcuucaaaccauagugcccgaauacauugauguaaauaagacguugcaggagcugaguuauaaauuaccuaacuacacagucccagaccucgugguugaacaguauaaucagaccauccugaaccuuacuagcgagaucuccacccuggagaauaagucugcugaauugaacuacacagugcaaaaacuccagacucugauugacaacaucaauucgacccuagucgaucugaaguggcucaaccgcguggagacaggcggguauauucccgaagccccgcgggacggacaggccuacguuagaaaggauggcgagugggugcugcuuagcacguuuugaggacuaguuauaagacugacuagcccgaugggccucccaacgggcccuccuccccuccuugcaccgagauuaauaaaaaaaaaaaaaaaaaaaaaaaaaaaaaaaaaaaaaaaaaaaaaaaaaaaaaaaaaaaaaaaaugcaucccccccccccccccccccccccccccccccaaaggcucuuuucagagccaccagaauu

SEQ ID NO: 15197 - RNA, 4288 nt, Artificial Sequence
  HCoV/NL63/RPTEC/2004__AFV53148.1 spike protein mRNA human (1-1356)
aggagaaagcuuaccaugaagcuguuccucauccuucugguguugcccuuagccagcugcuuuuucaccuguaacuccaaugcuaaccugucuaugcuacagcucggcgucccugacaauucaaguacaauuguuacugggcugcuuccaacgcacugguuuugcgcaaaccaaagcaccuccguguacucugccaauggauucuuuuauauagauguagguaaccauagaucggcguucgcucugcacacaggcuacuaugacgccaaucaguacuauaucuacgugacuaacgagauuggguugaaugcaucagucacccucaaaaucuguaaguuuagcaggaacacaaccuucgauuuucugaguaaugccuccucuagcuucgacugcauugugaaccugcucuuuacugaacaguuaggagcuccgcugggcaucacaauauccggugagaccguucggcuucauuuguauaaugugacgcgcacuuucuacguccccgcagccuacaaacugaccaagcuaucagugaaauguuauuuuaacuacaguugcguauucagcguugugaaugcuacagucacugugaacgugaccacacacaacgggcgagucguuaauuauaccgugugugaugacugcaacggauacacggauaauaucuucucuguacagcaagacggccguauuccuaacggcuuuccauucaauaacugguuucuccugacuaauggguccacacuuguggauggagucucaagacuguaucagcccuugaggcucaccugucuguggccugugccagguuuaaagagcaguacuggcuucguuuacuuuaacgccacagggucugacgugaauugcaacggauaucagcauaauuccgucguggauguaaugcgguacaaccugaauuucagcgcgaacucgcucgacaaucuuaagucuggcguuaucguguuuaaaacccugcaguacgaugucuuguucuauuguuccaacucaaguagcggugugcuagacacgaccauucccuuugggccuuccucucaaccauacuauugcuucaucaacagcacaauaaauacuacccacgucucaacauuugugggcauucugccgcccacuguucgcgaaaucgugguagcaagaaccggacaguucuacauuaacggcuuuaaguauuucgaccucggguucaucgaggccgucaauuuuaacgugacaaccgcuagugccacugauuucuggacgguugcauuugcuacauucguggacguccuggugaauguauccgccaccaacauccagaaucuucuguacugcgauagcccuuuugaaaaauugcagugugagcaccuccaauucggacugcaggacgguuuuuauucugcgaacuucuuagaugacaaugugcugccagagacuuacguugcccuacccauuuacuaucagcauaccgauauaaacuuuacagcaaccgcuucauucggcgggaguugcuacgucuguaagccucaccaagugaauaucagccucaacggaaauacuuccgugugcgucaggacaucucauuuuucgauucgguauaucuacaaccgcguuaaaagcggcuccccaggugacucaaguuggcacauauaucugaagucugggacgugucccuucagcuuuuccaaacuuaauaacuuccagaaguucaagaccauuugcuuuucaacuguggaagugccgggcagcuguaacuucccuuuggaggccacauggcacuacaccucuuauacaaucguaggagcucuguacgucacuugguccgaaggcaauaguaucaccggggugcccuacccaguuagcgguauucgagaguuuucuaaccucgugcugaauaacugcacgaaauauaauaucuacgauuaugucggaaccggcauuauaagauccucaaaccagagucuugccgggggaaucacauacgugagcaauucgggcaaccuguuggguuucaagaauguuuccacugggaacauuuuuaucgugaccccuuguaaucagcccgaccaaguagcagucuaucagcagucuaucauuggcgccaugacagcugugaacgagagcagguacggacuccagaaucuguuacaacugccaaacuucuauuacgugucaaauggcgggaacaacugcacuaccgcggucaugacguacaguaauuuuggaauaugugcagaugguucccuaauccccguucggccucguaacucuagcgacaauggcauuuccgccaucauuacagcuaaccucucaaucccaagcaauuggaccacaagugugcagguagaauaucugcagauaacuucuaccccgaucguggucgacugcgccacuuacgugugcaacgggaauccccgcuguaaaaaccuuuugaagcaguauaccuccgcaugcaaaacaauugaggaugcccugagacucagcgcucaucuggaaacgaaugacguuucgucaauguuaaccuucgauucuaacgccuuuagucuggcaaaugugacuuccuucggagacuacaaccuuagcucugucuugccucaaaggaauauccggagcucccgaauugcgggccgcucagcucucgaggaucugcuauuuaguaaggugguuacaagcggucuggggaccguggacgucgauuauaagucuuguacaaaaggccucuccaucgccgaccuggcaugcgcccaguacuauaacggaauaaugguacuuccaggcguggcugaugccgaaagaauggcaauguacacugggucauugauuggaggcaugguucuggguggguuaaccagugcugccgcgauccccuucagccucgcccugcaggcuaggcuuaauuacguggcacugcagacggacgucuugcaagagaaccagaagauucucgccgcuuccuucaauaaagccaucaacaacauaguggcaucuuuuucgagcguaaaugaugcgaucacacagaccgccgaggcuauucacacugugaccaucgcccugaacaagauucaagacgucguuaaucagcagggaucagcacuaaaccaucugacaucccagcuccggcacaauuuccaagcuaucaguaacucuauacaggccauuuaugaucgccuggacagcauccaggcagaccagcaaguggauagacuuaucacuggcagguuggccgcucugaaugcguuugugucccaggucuuaaacaaauacaccgaagugcgugguucacggcgacucgcccagcagaagauuaaugaguguguuaagucucaaagcaacagauauggcuucugcgggaauggaacacauaucuuuaguauuguaaacuccgcaccugacggccugcuuuuccugcacacggugcuacucccaaccgauuacaaaaaugucaaggcuuggagcgggauauguguggacggaaucuauggcuacguucugaggcagcccaacuuggugcuguauucugauaauggugucuuucgcgugacuucacggauuauguuccagccgagauuaccuguacucuccgacuuuguccaaaucuacaacugcaacgugacauucguuaauauuaguaggguggaacugcacaccgucaucccagauuacguggacguuaacaaaacucuucaggaguuugcccagaaucugcccaaguaugugaaaccuaacuucgauuugacacccuuuaaucucaccuaccugaaccuaagcucggaacugaagcagcuugaggccaagacggcuucucucuuccaaacuaccgucgagcugcagggguugauagaccagaucaauuccacauauguggaucugaaauuacucaaccgcuucgaaaauuacauuaaguggccaugguggguauggcugaucauuagcgugguuuuugucgugcuucugucauugcucguguucuguugccugaguaccggauguugcggcugcuguaacugccuaacuucuuccaugcgagguuguugcgacuguggcagcacaaaacugccuuauuacgaguuugaaaagguccauguacagugaggacuaguuauaagacugacuagcccgaugggccucccaacgggcccuccuccccuccuugcaccgagauuaauaaaaaaaaaaaaaaaaaaaaaaaaaaaaaaaaaaaaaaaaaaaaaaaaaaaaaaaaaaaaaaaaugcaucccccccccccccccccccccccccccccccaaaggcucuuuucagagccaccagaauu

SEQ ID NO: 15198 - RNA, 4288 nt, Artificial Sequence
  HCoV/NL63/RPTEC/2004__AFV53148.1 spike protein mRNA human (1-1356)(S1052P_I1053P)
aggagaaagcuuaccaugaagcuguuccucauccuucugguguugcccuuagccagcugcuuuuucaccuguaacuccaaugcuaaccugucuaugcuacagcucggcgucccugacaauucaaguacaauuguuacugggcugcuuccaacgcacugguuuugcgcaaaccaaagcaccuccguguacucugccaauggauucuuuuauauagauguagguaaccauagaucggcguucgcucugcacacaggcuacuaugacgccaaucaguacuauaucuacgugacuaacgagauuggguugaaugcaucagucacccucaaaaucuguaaguuuagcaggaacacaaccuucgauuuucugaguaaugccuccucuagcuucgacugcauugugaaccugcucuuuacugaacaguuaggagcuccgcugggcaucacaauauccggugagaccguucggcuucauuuguauaaugugacgcgcacuuucuacguccccgcagccuacaaacugaccaagcuaucagugaaauguuauuuuaacuacaguugcguauucagcguugugaaugcuacagucacugugaacgugaccacacacaacgggcgagucguuaauuauaccgugugugaugacugcaacggauacacggauaauaucuucucuguacagcaagacggccguauuccuaacggcuuuccauucaauaacugguuucuccugacuaauggguccacacuuguggauggagucucaagacuguaucagcccuugaggcucaccugucuguggccugugccagguuuaaagagcaguacuggcuucguuuacuuuaacgccacagggucugacgugaauugcaacggauaucagcauaauuccgucguggauguaaugcgguacaaccugaauuucagcgcgaacucgcucgacaaucuuaagucuggcguuaucguguuuaaaacccugcaguacgaugucuuguucuauuguuccaacucaaguagcggugugcuagacacgaccauucccuuugggccuuccucucaaccauacuauugcuucaucaacagcacaauaaauacuacccacgucucaacauuugugggcauucugccgcccacuguucgcgaaaucgugguagcaagaaccggacaguucuacauuaacggcuuuaaguauuucgaccucggguucaucgaggccgucaauuuuaacgugacaaccgcuagugccacugauuucuggacgguugcauuugcuacauucguggacguccuggugaauguauccgccaccaacauccagaaucuucuguacugcgauagcccuuuugaaaaauugcagugugagcaccuccaauucggacugcaggacgguuuuuauucugcgaacuucuuagaugacaaugugcugccagagacuuacguugcccuacccauuuacuaucagcauaccgauauaaacuuuacagcaaccgcuucauucggcgggaguugcuacgucuguaagccucaccaagugaauaucagccucaacggaaauacuuccgugugcgucaggacaucucauuuuucgauucgguauaucuacaaccgcguuaaaagcggcuccccaggugacucaaguuggcacauauaucugaagucugggacgugucccuucagcuuuuccaaacuuaauaacuuccagaaguucaagaccauuugcuuuucaacuguggaagugccgggcagcuguaacuucccuuuggaggccacauggcacuacaccucuuauacaaucguaggagcucuguacgucacuugguccgaaggcaauaguaucaccggggugcccuacccaguuagcgguauucgagaguuuucuaaccucgugcugaauaacugcacgaaauauaauaucuacgauuaugucggaaccggcauuauaagauccucaaaccagagucuugccgggggaaucacauacgugagcaauucgggcaaccuguuggguuucaagaauguuuccacugggaacauuuuuaucgugaccccuuguaaucagcccgaccaaguagcagucuaucagcagucuaucauuggcgccaugacagcugugaacgagagcagguacggacuccagaaucuguuacaacugccaaacuucuauuacgugucaaauggcgggaacaacugcacuaccgcggucaugacguacaguaauuuuggaauaugugcagaugguucccuaauccccguucggccucguaacucuagcgacaauggcauuuccgccaucauuacagcuaaccucucaaucccaagcaauuggaccacuucggugcagguagaauaucugcagauaacaucuaccccgaucguggucgacugcgccacuuacgugugcaacgggaauccccgcuguaaaaaccuuuugaagcaguauaccuccgcaugcaaaacaauugaggaugcccugagacucagcgcucaucuggaaacgaaugacguuucgucaauguuaaccuucgauucuaacgccuuuagucuggcaaaugugacuuccuucggagacuacaaccuuagcucugucuugccucaaaggaauauccggagcucccgaauugcgggccgcucagcucucgaggaucugcuauuuaguaaggugguuacaagcggucuggggaccguggacgucgauuauaagucuuguacaaaaggccucuccaucgccgaccuggcaugcgcccaguacuauaacggaauaaugguacuuccaggcguggcugaugccgaaagaauggcaauguacacugggucauugauuggaggcaugguucuggguggguuaaccagugcugccgcgauccccuucagccucgcccugcaggcuaggcuuaauuacguggcacugcagacggacgucuugcaagagaaccagaagauucucgccgcuuccuucaauaaagccaucaacaacauaguggcaucuuuuucgagcguaaaugaugcgaucacacagaccgccgaggcuauucacacugugaccaucgcccugaacaagauucaagacgucguuaaucagcagggaucagcacuaaaccaucugacaucccagcuccggcacaauuuccaagcuaucaguaacucuauacaggccauuuaugaucgccuggacccuccacaggcagaccagcaaguggauagacuuaucacuggcagguuggccgcucugaaugcguuugugagccaggucuuaaacaaauacaccgaagugcgugguucccggcgacucgcccagcagaagaucaaugaguguguuaagucacaaucuaacagauauggcuucugcgggaauggaacacauauuuuuagcaucguaaacagugcacccgacggccugcuuuuccugcacacggugcuacucccgaccgauuacaaaaaugucaaggcuugguccgggauuuguguggacggaauauauggcuacguucugaggcagccuaacuuggugcuguauagcgauaauggugucuuucgcgugacuucucggaucauguuccagccaagauuacccguacucucagacuuuguccaaauuuacaacugcaacgugacauucguuaauaucuccaggguggaacugcacaccgucauuccugauuacguggacguuaacaaaacucuucaggaguuugcccagaaucugcccaaguaugugaaaccaaacuucgauuugacaccuuuuaaucucaccuaccugaaccuaaguagcgaacugaagcagcuugaggccaagacggcuagucucuuccaaacuaccgucgagcugcagggguugaucgaccagauaaauucuacauauguggaucugaaauuacucaaccgcuucgaaaauuacaucaaguggcccugguggguauggcugauuaucuccgugguuuuugucgugcuucugagcuugcucguguucuguugccugucaaccggauguugcggcugcuguaacugccuaacaaguucuaugcgagguuguugcgacuguggcuccacuaaacugccauauuacgaguuugaaaagguccauguacagugaggacuaguuauaagacugacuagcccgaugggccucccaacgggcccuccuccccuccuugcaccgagauuaauaaaaaaaaaaaaaaaaaaaaaaaaaaaaaaaaaaaaaaaaaaaaaaaaaaaaaaaaaaaaaaaaugcaucccccccccccccccccccccccccccccccaaaggcucuuuucagagccaccagaauu

SEQ ID NO: 15199 - RNA, 4093 nt, Artificial Sequence
  HCoV/NL63/RPTEC/2004__AFV53148.1 spike protein mRNA human (variant)
aggagaaagcuuaccaugaagcuguuccucauccuucugguguugcccuuagccagcugcuuuuucaccuguaacuccaaugcuaaccugucuaugcuacagcucggcgucccugacaauucaaguacaauuguuacugggcugcuuccaacgcacugguuuugcgcaaaccaaagcaccuccguguacucugccaauggauucuuuuauauagauguagguaaccauagaucggcguucgcucugcacacaggcuacuaugacgccaaucaguacuauaucuacgugacuaacgagauuggguugaaugcaucagucacccucaaaaucuguaaguuuagcaggaacacaaccuucgauuuucugaguaaugccuccucuagcuucgacugcauugugaaccugcucuuuacugaacaguuaggagcuccgcugggcaucacaauauccggugagaccguucggcuucauuuguauaaugugacgcgcacuuucuacguccccgcagccuacaaacugaccaagcuaucagugaaauguuauuuuaacuacaguugcguauucagcguugugaaugcuacagucacugugaacgugaccacacacaacgggcgagucguuaauuauaccgugugugaugacugcaacggauacacggauaauaucuucucuguacagcaagacggccguauuccuaacggcuuuccauucaauaacugguuucuccugacuaauggguccacacuuguggauggagucucaagacuguaucagcccuugaggcucaccugucuguggccugugccagguuuaaagagcaguacuggcuucguuuacuuuaacgccacagggucugacgugaauugcaacggauaucagcauaauuccgucguggauguaaugcgguacaaccugaauuucagcgcgaacucgcucgacaaucuuaagucuggcguuaucguguuuaaaacccugcaguacgaugucuuguucuauuguuccaacucaaguagcggugugcuagacacgaccauucccuuugggccuuccucucaaccauacuauugcuucaucaacagcacaauaaauacuacccacgucucaacauuugugggcauucugccgcccacuguucgcgaaaucgugguagcaagaaccggacaguucuacauuaacggcuuuaaguauuucgaccucggguucaucgaggccgucaauuuuaacgugacaaccgcuagugccacugauuucuggacgguugcauuugcuacauucguggacguccuggugaauguauccgccaccaacauccagaaucuucuguacugcgauagcccuuuugaaaaauugcagugugagcaccuccaauucggacugcaggacgguuuuuauucugcgaacuucuuagaugacaaugugcugccagagacuuacguugcccuacccauuuacuaucagcauaccgauauaaacuuuacagcaaccgcuucauucggcgggaguugcuacgucuguaagccucaccaagugaauaucagccucaacggaaauacuuccgugugcgucaggacaucucauuuuucgauucgguauaucuacaaccgcguuaaaagcggcuccccaggugacucaaguuggcacauauaucugaagucugggacgugucccuucagcuuuuccaaacuuaauaacuuccagaaguucaagaccauuugcuuuucaacuguggaagugccgggcagcuguaacuucccuuuggaggccacauggcacuacaccucuuauacaaucguaggagcucuguacgucacuugguccgaaggcaauaguaucaccggggugcccuacccaguuagcgguauucgagaguuuucuaaccucgugcugaauaacugcacgaaauauaauaucuacgauuaugucggaaccggcauuauaagauccucaaaccagagucuugccgggggaaucacauacgugagcaauucgggcaaccuguuggguuucaagaauguuuccacugggaacauuuuuaucgugaccccuuguaaucagcccgaccaaguagcagucuaucagcagucuaucauuggcgccaugacagcugugaacgagagcagguacggacuccagaaucuguuacaacugccaaacuucuauuacgugucaaauggcgggaacaacugcacuaccgcggucaugacguacaguaauuuuggaauaugugcagaugguucccuaauccccguucggccucguaacucuagcgacaauggcauuuccgccaucauuacagcuaaccucucaaucccaagcaauuggaccacuucggugcagguagaauaucugcagauaacaucuaccccgaucguggucgacugcgccacuuacgugugcaacgggaauccccgcuguaaaaaccuuuugaagcaguauaccuccgcaugcaaaacaauugaggaugcccugagacucagcgcucaucuggaaacgaaugacguuucgucaauguuaaccuucgauucuaacgccuuuagucuggcaaaugugacuuccuucggagacuacaaccuuagcucugucuugccucaaaggaauauccggagcucccgaauugcgggccgcucagcucucgaggaucugcuauuuaguaaggugguuacaagcggucuggggaccguggacgucgauuauaagucuuguacaaaaggccucuccaucgccgaccuggcaugcgcccaguacuauaacggaauaaugguacuuccaggcguggcugaugccgaaagaauggcaauguacacugggucauugauuggaggcaugguucuggguggguuaaccagugcugccgcgauccccuucagccucgcccugcaggcuaggcuuaauuacguggcacugcagacggacgucuugcaagagaaccagaagauucucgccgcuuccuucaauaaagccaucaacaacauaguggcaucuuuuucgagcguaaaugaugcgaucacacagaccgccgaggcuauucacacugugaccaucgcccugaacaagauucaagacgucguuaaucagcagggaucagcacuaaaccaucugacaucccagcuccggcacaauuuccaagcuaucaguaacucuauacaggccauuuaugaucgccuggacccuccacaggcagaccagcaaguggauagacuuaucacuggcagguuggccgcucugaaugcguuugugagccaggucuuaaacaaauacaccgaagugcgugguucccggcgacucgcccagcagaagaucaaugaguguguuaagucacaaucuaacagauauggcuucugcgggaauggaacacauauuuuuagcaucguaaacagugcacccgacggccugcuuuuccugcacacggugcuacucccgaccgauuacaaaaaugucaaggcuugguccgggauuuguguggacggaauauauggcuacguucugaggcagccuaacuuggugcuguauagcgauaauggugucuuucgcgugacuucucggaucauguuccagccaagauuacccguacucucagacuuuguccaaauuuacaacugcaacgugacauucguuaauaucuccaggguggaacugcacaccgucauuccugauuacguggacguuaacaaaacucuucaggaguuugcccagaaucugcccaaguaugugaaaccaaacuucgauuugacaccuuuuaaucucaccuaccugaaccuaaguagcgaacugaagcagcuugaggccaagacggcuagucucuuccaaacuaccgucgagcugcagggguugaucgaccagauaaauucuacauauguggaucugaaauuacucaaccgcuucgaaaauugaggacuaguuauaagacugacuagcccgaugggccucccaacgggcccuccuccccuccuugcaccgagauuaauaaaaaaaaaaaaaaaaaaaaaaaaaaaaaaaaaaaaaaaaaaaaaaaaaaaaaaaaaaaaaaaaugcaucccccccccccccccccccccccccccccccaaaggcucuuuucagagccaccagaauu

SEQ ID NO: 15200 - RNA, 4174 nt, Artificial Sequence
  HCoV/NL63/RPTEC/2004__AFV53148.1 spike protein mRNA human (variant)
aggagaaagcuuaccaugaagcuguuccucauccuucugguguugcccuuagccagcugcuuuuucaccuguaacuccaaugcuaaccugucuaugcuacagcucggcgucccugacaauucaaguacaauuguuacugggcugcuuccaacgcacugguuuugcgcaaaccaaagcaccuccguguacucugccaauggauucuuuuauauagauguagguaaccauagaucggcguucgcucugcacacaggcuacuaugacgccaaucaguacuauaucuacgugacuaacgagauuggguugaaugcaucagucacccucaaaaucuguaaguuuagcaggaacacaaccuucgauuuucugaguaaugccuccucuagcuucgacugcauugugaaccugcucuuuacugaacaguuaggagcuccgcugggcaucacaauauccggugagaccguucggcuucauuuguauaaugugacgcgcacuuucuacguccccgcagccuacaaacugaccaagcuaucagugaaauguuauuuuaacuacaguugcguauucagcguugugaaugcuacagucacugugaacgugaccacacacaacgggcgagucguuaauuauaccgugugugaugacugcaacggauacacggauaauaucuucucuguacagcaagacggccguauuccuaacggcuuuccauucaauaacugguuucuccugacuaauggguccacacuuguggauggagucucaagacuguaucagcccuugaggcucaccugucuguggccugugccagguuuaaagagcaguacuggcuucguuuacuuuaacgccacagggucugacgugaauugcaacggauaucagcauaauuccgucguggauguaaugcgguacaaccugaauuucagcgcgaacucgcucgacaaucuuaagucuggcguuaucguguuuaaaacccugcaguacgaugucuuguucuauuguuccaacucaaguagcggugugcuagacacgaccauucccuuugggccuuccucucaaccauacuauugcuucaucaacagcacaauaaauacuacccacgucucaacauuugugggcauucugccgcccacuguucgcgaaaucgugguagcaagaaccggacaguucuacauuaacggcuuuaaguauuucgaccucggguucaucgaggccgucaauuuuaacgugacaaccgcuagugccacugauuucuggacgguugcauuugcuacauucguggacguccuggugaauguauccgccaccaacauccagaaucuucuguacugcgauagcccuuuugaaaaauugcagugugagcaccuccaauucggacugcaggacgguuuuuauucugcgaacuucuuagaugacaaugugcugccagagacuuacguugcccuacccauuuacuaucagcauaccgauauaaacuuuacagcaaccgcuucauucggcgggaguugcuacgucuguaagccucaccaagugaauaucagccucaacggaaauacuuccgugugcgucaggacaucucauuuuucgauucgguauaucuacaaccgcguuaaaagcggcuccccaggugacucaaguuggcacauauaucugaagucugggacgugucccuucagcuuuuccaaacuuaauaacuuccagaaguucaagaccauuugcuuuucaacuguggaagugccgggcagcuguaacuucccuuuggaggccacauggcacuacaccucuuauacaaucguaggagcucuguacgucacuugguccgaaggcaauaguaucaccggggugcccuacccaguuagcgguauucgagaguuuucuaaccucgugcugaauaacugcacgaaauauaauaucuacgauuaugucggaaccggcauuauaagauccucaaaccagagucuugccgggggaaucacauacgugagcaauucgggcaaccuguuggguuucaagaauguuuccacugggaacauuuuuaucgugaccccuuguaaucagcccgaccaaguagcagucuaucagcagucuaucauuggcgccaugacagcugugaacgagagcagguacggacuccagaaucuguuacaacugccaaacuucuauuacgugucaaauggcgggaacaacugcacuaccgcggucaugacguacaguaauuuuggaauaugugcagaugguucccuaauccccguucggccucguaacucuagcgacaauggcauuuccgccaucauuacagcuaaccucucaaucccaagcaauuggaccacuucggugcagguagaauaucugcagauaacaucuaccccgaucguggucgacugcgccacuuacgugugcaacgggaauccccgcuguaaaaaccuuuugaagcaguauaccuccgcaugcaaaacaauugaggaugcccugagacucagcgcucaucuggaaacgaaugacguuucgucaauguuaaccuucgauucuaacgccuuuagucuggcaaaugugacuuccuucggagacuacaaccuuagcucugucuugccucaaaggaauauccggagcucccgaauugcgggccgcucagcucucgaggaucugcuauuuaguaaggugguuacaagcggucuggggaccguggacgucgauuauaagucuuguacaaaaggccucuccaucgccgaccuggcaugcgcccaguacuauaacggaauaaugguacuuccaggcguggcugaugccgaaagaauggcaauguacacugggucauugauuggaggcaugguucuggguggguuaaccagugcugccgcgauccccuucagccucgcccugcaggcuaggcuuaauuacguggcacugcagacggacgucuugcaagagaaccagaagauucucgccgcuuccuucaauaaagccaucaacaacauaguggcaucuuuuucgagcguaaaugaugcgaucacacagaccgccgaggcuauucacacugugaccaucgcccugaacaagauucaagacgucguuaaucagcagggaucagcacuaaaccaucugacaucccagcuccggcacaauuuccaagcuaucaguaacucuauacaggccauuuaugaucgccuggacccuccacaggcagaccagcaaguggauagacuuaucacuggcagguuggccgcucugaaugcguuugugagccaggucuuaaacaaauacaccgaagugcgugguucccggcgacucgcccagcagaagaucaaugaguguguuaagucacaaucuaacagauauggcuucugcgggaauggaacacauauuuuuagcaucguaaacagugcacccgacggccugcuuuuccugcacacggugcuacucccgaccgauuacaaaaaugucaaggcuugguccgggauuuguguggacggaauauauggcuacguucugaggcagccuaacuuggugcuguauagcgauaauggugucuuucgcgugacuucucggaucauguuccagccaagauuacccguacucucagacuuuguccaaauuuacaacugcaacgugacauucguuaauaucuccaggguggaacugcacaccgucauuccugauuacguggacguuaacaaaacucuucaggaguuugcccagaaucugcccaaguaugugaaaccaaacuucgauuugacaccuuuuaaucucaccuaccugaaccuaaguagcgaacugaagcagcuugaggccaagacggcuagucucuuccaaacuaccgucgagcugcagggguugaucgaccagauaaauucuacauauguggaucugaaauuacucaaccgcuucgaaaauggaggcuacauccccgaggcaccacgagacggucaggccuauguacggaaggauggcgaaugggugcugcuuuccaccuuuugaggacuaguuauaagacugacuagcccgaugggccucccaacgggcccuccuccccuccuugcaccgagauuaauaaaaaaaaaaaaaaaaaaaaaaaaaaaaaaaaaaaaaaaaaaaaaaaaaaaaaaaaaaaaaaaaugcaucccccccccccccccccccccccccccccccaaaggcucuuuucagagccaccagaauu

SEQ ID NO: 15201 - RNA, 3988 nt, Artificial Sequence
  Bat SARS-like CoV/WIV1__AGZ48828.1 spike protein mRNA human (1-1256)
aggagaaagcuuaccaugaagcugcucgugcuugucuucgccacccugguuagcuccuacacaaucgagaaaugcuuggacuuugaugacagaacucccccugcuaacacgcaguucuuaucuucacacaggggcguguauuacccagaugacauuuuucggaguaauguacugcaucuagugcaagaucacuuccucccguuugacagcaacgucacccgcuucauaacauuugggcugaauuucgauaaccccaucauuccuuuuaaggacggaaucuauuucgcagccacugaaaaauccaaugugauucgagguuggguuuuuggcucuaccaugaacaauaagucgcagucagugaucauaaugaacaauagcacaaaccuugucauccgugcguguaauuucgagcugugcgauaacccauuuuucgugguauugaaaaguaauaacacccagauucccuccuacaucuucaauaacgcuuuuaacuguacuuucgaauauguuucuaaggacuuuaaucucgaucugggggagaagccuggaaacuucaaagaccugagagaauuuguguucaggaauaaggauggcuuucuccaugucuacagcgguuaucagccaauuuccgccgcaucaggguuacccacaggauucaacgcccugaaaccuaucuuuaagcuaccauugggcauaaauauuaccaacuuccggacgcugcuaacugcuuuuccgccccgcccugacuacuggggcaccagugcagccgcuuacuucgugggguaucucaaaccaacaacuuuuaugcugaaguacgacgagaauggaaccaucacagaugccguggacugcagccaaaacccccuugcggagcugaaguguucugucaaauccuucgaaauugauaaggguaucuaucagaccucaaauuucagaguugcaccuagcaaagaggugguaagguuuccaaacaucacgaauuugugccccuucggcgaaguguuuaacgccacuacauucccgagugucuacgcuugggagcggaagcgcauuucuaauuguguggccgacuauuccguucucuacaacagcaccucguuuucuacuuucaaaugcuaugggguguccgcaacaaagcugaaugauuuauguuuuucaaacgucuacgcugacaguuucgugguaaaaggagaugacguucgacagauagccccuggccagaccggugugaucgcggauuacaacuauaagcugcccgacgauuuuacggggugcguccucgccuggaauaccagaaacauugacgcaacacaaacuggaaauuacaacuauaaguacaggagccuucggcacggcaaacugcguccauucgagcgcgacaucuccaaugugccuuuuucucccgauggcaagccauguacacccccugcuuucaacugcuauuggccauugaaugacuacggguuuuauauaaccaacggaauugguuaccagccguacagagucgugguucuuagcuucgaacugcucaaugcccccgcuacugugugcggcccuaaacugucaaccgaucuuaucaagaaccaguguguaaauuucaacuuuaaugggcugacaggaaccggcgucuugacuccaaguuccaaaagguuccagcccuuucaacaguucggucgggacgugagcgauuuuacggacucuguucgagauccuaagacaucagagauccucgacauuaguccaugcagcuucgggggcguguccgucaucacccccggaacuaacaccucuucggaaguggccguacuguaucaggaugugaauuguacagacguuccggucgcaauucaugccgaucaauuaaccccuagcuggcgcgugcacuccacuggcaacaacguguuucagacacaggcugggugccugauaggagcggagcacgucgacacgucauacgaaugugauaucccaauuggugcaggcaucugcgccaguuaucauaccguuucuagccuaagauccacuucacaaaagagcaucguggcuuacacaaugucucucggggccgacuccaguauugcauauagcaauaacaccauagccauccccacaaauuucucuauuuccaucacuaccgaggugaugccuguaucaauggcuaaaacgagugucgacuguaacauguacauuugcggagauagcaccgagugugccaaucugcuuuugcaguauggcucguuuugcacacagcugaacagggcacucuccgguaucgcgguggaacaggaccggaauacucgcgagguuuucgcucaggugaagcaaauguacaaaacccccacacugaaggauuuugggggcuucaacuucucucagauacuuccagacccucugaaacccacuaagagauccuuuaucgaagaucuucucuucaauaaggucacccuggccgacgcaggauuuaugaaacaguacggcgaguguuuaggggauauuaacgccagggaccugaucugcgcucagaaguucaauggacuaacggugcucccaccgcugcuuacagaugacaugauugccgcauauaccgcugccuugguuucagguacugcgacagccggcuggaccuuuggggcuggagcagcccugcaaaucccuuucgcuaugcagauggccuaccguuuuaacggcauaggugugacucagaauguacucuaugaaaaccagaaacaaauugcaaaucaguucaacaaggcgaucagucagauucaagagucccugaccacaacgucuaccgccuuagggaaacugcaggaugucgugaaccagaaugcucaggcccuuaacacuuuggugaagcaacucagcuccaauuuuggcgcaaucucaagcguccugaacgacauacuaagucggcuggauaagguugaggcugaagugcagaucgaccgacucauuacaggaagacugcagucucuucagaccuacguaacacaacaguugaucagggccgcagagauucgcgccuccgcuaaucuggcggccacuaaaaugagcgaaugcguguuaggccagucgaagcgggucgacuucugugggaaaggauaucaccucaugucauuuccccaggcagcuccacauggcgugguuuuccugcacgugaccuacguccccucucaagagagaaacuuuacgacagccccugccaucugccacgaagguaaggcuuauuucccaagggaggggguguucguuuuuaauggaaccaguugguucauaacucagcgcaacuuuuucagcccccagauuaucaccacagauaauacuuuugugagcggcucuugugacgucguaaucgguauuaucaacaauaccguguacgauccucuucaaccggagcuggacagcuucaaagaagaguuggauaaguacuuuaaaaaccauacauccccagacguugaucucggcgacauuucagggauaaaugcaaguguggucaacauccagaaggaaauugaucgacugaaugagguggccaagaaccuaaaugagagccugaucgaccuccaggaacugggaaaauaugagcaguacauuaaguggcccugguauguauggcuuggcuucaucgcgggguugauagcuaucgugauggucacgauucuguuaugcuguaugaccucuugcuguuccugccucaaaggagccuguucaugcggcaguuguugcaaguuugaugaagacgacagcgagccuguucugaaaggugugaaguugcacuacacuugaggacuaguuauaagacugacuagcccgaugggccucccaacgggcccuccuccccuccuugcaccgagauuaauaaaaaaaaaaaaaaaaaaaaaaaaaaaaaaaaaaaaaaaaaaaaaaaaaaaaaaaaaaaaaaaaugcaucccccccccccccccccccccccccccccccaaaggcucuuuucagagccaccagaauu

SEQ ID NO: 15202 - RNA, 3988 nt, Artificial Sequence
  Bat SARS-like CoV/WIV1__AGZ48828.1 spike protein mRNA human (1-1256)(K969P_V970P)
aggagaaagcuuaccaugaagcugcucgugcuugucuucgccacccugguuagcuccuacacaaucgagaaaugcuuggacuuugaugacagaacucccccugcuaacacgcaguucuuaucuucacacaggggcguguauuacccagaugacauuuuucggaguaauguacugcaucuagugcaagaucacuuccucccguuugacagcaacgucacccgcuucauaacauuugggcugaauuucgauaaccccaucauuccuuuuaaggacggaaucuauuucgcagccacugaaaaauccaaugugauucgagguuggguuuuuggcucuaccaugaacaauaagucgcagucagugaucauaaugaacaauagcacaaaccuugucauccgugcguguaauuucgagcugugcgauaacccauuuuucgugguauugaaaaguaauaacacccagauucccuccuacaucuucaauaacgcuuuuaacuguacuuucgaauauguuucuaaggacuuuaaucucgaucugggggagaagccuggaaacuucaaagaccugagagaauuuguguucaggaauaaggauggcuuucuccaugucuacagcgguuaucagccaauuuccgccgcaucaggguuacccacaggauucaacgcccugaaaccuaucuuuaaacuuccauugggcauaaauauuaccaacuuccggacgcugcuaacugcuuuuccgccccgcccugacuacuggggcaccagugcagccgcuuacuucgugggguaucucaaaccaacaacuuuuaugcugaaguacgacgagaauggaaccaucacagaugccguggacugcagccaaaacccccuugcggagcugaaguguucugucaaauccuucgaaauugauaaggguaucuaucagaccucaaauuucagaguugcaccuagcaaagaggugguaagguuuccaaacaucacgaauuugugccccuucggcgaaguguuuaacgccacuacauucccgagugucuacgcuugggagcggaagcgcauuucuaauuguguggccgacuauuccguucucuacaacagcaccucguuuucuacuuucaaaugcuaugggguguccgcaacaaagcugaaugauuuauguuuuucaaacgucuacgcugacaguuucgugguaaaaggagaugacguucgacagauagccccuggccagaccggugugaucgcggauuacaacuauaagcugcccgacgauuuuacggggugcguccucgccuggaauaccagaaacauugacgcaacacaaacuggaaauuacaacuauaaguacaggagccuucggcacggcaaacugcguccauucgagcgcgacaucuccaaugugccuuuuucucccgauggcaagccauguacacccccugcuuucaacugcuauuggccauugaaugacuacggguuuuauauaaccaacggaauugguuaccagccguacagagucgugguuuugagcuucgaacugcucaaugcccccgcuacugugugcggcccuaaacugucaaccgaucuuaucaagaaccaguguguaaauuucaacuuuaaugggcugacaggaaccggcgucuugacuccaaguuccaaaagguuccagcccuuucaacaguucggucgggacgugagcgauuuuacggacucuguucgagauccuaagacaucagagauccucgacauuaguccaugcagcuucgggggcguguccgucaucacccccggaacuaacaccucuucggaaguggccguacuguaucaggaugugaauuguacagacguuccggucgcaauucaugccgaucaauuaaccccuagcuggcgcgugcacuccacuggcaacaacguguuucagacacaggcugggugccugauaggagcggagcacgucgacacgucauacgaaugugauaucccaauuggugcaggcaucugcgccaguuaucauaccguuucuagccuaagauccacuucacaaaagagcaucguggcuuacacaaugucucucggggccgacuccaguauugcauauagcaauaacaccauagccauccccacaaauuucucuauuuccaucacuaccgaggugaugccuguaucaauggcuaaaacgagugucgacuguaacauguacauuugcggagauagcaccgagugugccaaucugcuuuugcaguauggcucguuuugcacacagcugaacagggcacucuccgguaucgcgguggaacaggaccggaauacucgcgagguuuucgcucaggugaagcaaauguacaaaacccccacacugaaggauuuugggggcuucaacuucucucagauacuuccagacccucugaaacccacuaagaggagcuuuaucgaagaucuacucuucaauaaggucacccuggccgacgcaggauuuaugaaacaguacggcgaguguuuaggggauauuaacgccagagaccugaucugcgcucagaaguucaauggacuaacggugcucccaccgcugcuuacagaugacaugauugccgcauauaccgcugccuugguuucagguacugcgacagccggcuggaccuuuggggcuggagcagcccugcaaaucccuuucgcuaugcagauggccuaccguuuuaacggcauaggugugacucagaauguacucuaugaaaaccagaaacaaauugcaaaucaguucaacaaggcgaucagucagauucaagagucccugaccacaacgucuaccgccuuagggaaacugcaggaugucgugaaccagaaugcucaggcccuuaacacuuuggugaagcaacucagcuccaauuuuggcgcaaucucaagcguccugaacgacauacuaagucggcuggaucccccagaggcugaaguucagaucgaccgacucauuacaggaagacugcagucucuucagaccuacgugacacaacaguugaucagggccgcagagauucgcgccuccgcuaaucuggcggccacuaagaugagcgaaugcguauuaggccagucgaaacggguggacuucugugggaagggauaucaccucaugucauuuccccaggcagcuccucauggcgucguguuccugcacguuaccuacgugccaucucaagagagaaacuuuacgacagcccccgccaucugccacgaagguaaggcuuauuucccuagggagggggucuucguguuuaauggaaccaguugguucauaacucagcgcaacuuuuucuccccgcagauuaucaccacagauaauacuuuuguuagcggcucuugugacguggucaucgguauuaucaacaauaccguauacgauccacuucaacccgagcuggacagcuucaaggaagaguuggauaaauacuuuaagaaccauacauccccugacguggaucucggcgacauuucagggauaaaugcaaguguugugaacauccagaaagaaauugaucgacugaaugaggucgccaagaaccuaaaugagagccugaucgaccuccaggaacugggaaaguaugagcaguacauuaaauggccaugguauguguggcuuggcuucaucgcgggguugauagcuaucguaauggugacgauucuguuaugcuguaugaccucuugcuguuccugccucaagggagccuguucaugcggcaguuguugcaaauuugaugaagacgacagcgagcccguccugaaggguguuaaacuucacuacacuugaggacuaguuauaagacugacuagcccgaugggccucccaacgggcccuccuccccuccuugcaccgagauuaauaaaaaaaaaaaaaaaaaaaaaaaaaaaaaaaaaaaaaaaaaaaaaaaaaaaaaaaaaaaaaaaaugcaucccccccccccccccccccccccccccccccaaaggcucuuuucagagccaccagaauu

SEQ ID NO: 15203 - RNA, 3793 nt, Artificial Sequence
  Bat SARS-like CoV/WIV1__AGZ48828.1 spike protein mRNA human (variant)
aggagaaagcuuaccaugaagcugcucgugcuugucuucgccacccugguuagcuccuacacaaucgagaaaugcuuggacuuugaugacagaacucccccugcuaacacgcaguucuuaucuucacacaggggcguguauuacccagaugacauuuuucggaguaauguacugcaucuagugcaagaucacuuccucccguuugacagcaacgucacccgcuucauaacauuugggcugaauuucgauaaccccaucauuccuuuuaaggacggaaucuauuucgcagccacugaaaaauccaaugugauucgagguuggguuuuuggcucuaccaugaacaauaagucgcagucagugaucauaaugaacaauagcacaaaccuugucauccgugcguguaauuucgagcugugcgauaacccauuuuucgugguauugaaaaguaauaacacccagauucccuccuacaucuucaauaacgcuuuuaacuguacuuucgaauauguuucuaaggacuuuaaucucgaucugggggagaagccuggaaacuucaaagaccugagagaauuuguguucaggaauaaggauggcuuucuccaugucuacagcgguuaucagccaauuuccgccgcaucaggguuacccacaggauucaacgcccugaaaccuaucuuuaaacuuccauugggcauaaauauuaccaacuuccggacgcugcuaacugcuuuuccgccccgcccugacuacuggggcaccagugcagccgcuuacuucgugggguaucucaaaccaacaacuuuuaugcugaaguacgacgagaauggaaccaucacagaugccguggacugcagccaaaacccccuugcggagcugaaguguucugucaaauccuucgaaauugauaaggguaucuaucagaccucaaauuucagaguugcaccuagcaaagaggugguaagguuuccaaacaucacgaauuugugccccuucggcgaaguguuuaacgccacuacauucccgagugucuacgcuugggagcggaagcgcauuucuaauuguguggccgacuauuccguucucuacaacagcaccucguuuucuacuuucaaaugcuaugggguguccgcaacaaagcugaaugauuuauguuuuucaaacgucuacgcugacaguuucgugguaaaaggagaugacguucgacagauagccccuggccagaccggugugaucgcggauuacaacuauaagcugcccgacgauuuuacggggugcguccucgccuggaauaccagaaacauugacgcaacacaaacuggaaauuacaacuauaaguacaggagccuucggcacggcaaacugcguccauucgagcgcgacaucuccaaugugccuuuuucucccgauggcaagccauguacacccccugcuuucaacugcuauuggccauugaaugacuacggguuuuauauaaccaacggaauugguuaccagccguacagagucgugguuuugagcuucgaacugcucaaugcccccgcuacugugugcggcccuaaacugucaaccgaucuuaucaagaaccaguguguaaauuucaacuuuaaugggcugacaggaaccggcgucuugacuccaaguuccaaaagguuccagcccuuucaacaguucggucgggacgugagcgauuuuacggacucuguucgagauccuaagacaucagagauccucgacauuaguccaugcagcuucgggggcguguccgucaucacccccggaacuaacaccucuucggaaguggccguacuguaucaggaugugaauuguacagacguuccggucgcaauucaugccgaucaauuaaccccuagcuggcgcgugcacuccacuggcaacaacguguuucagacacaggcugggugccugauaggagcggagcacgucgacacgucauacgaaugugauaucccaauuggugcaggcaucugcgccaguuaucauaccguuucuagccuaagauccacuucacaaaagagcaucguggcuuacacaaugucucucggggccgacuccaguauugcauauagcaauaacaccauagccauccccacaaauuucucuauuuccaucacuaccgaggugaugccuguaucaauggcuaaaacgagugucgacuguaacauguacauuugcggagauagcaccgagugugccaaucugcuuuugcaguauggcucguuuugcacacagcugaacagggcacucuccgguaucgcgguggaacaggaccggaauacucgcgagguuuucgcucaggugaagcaaauguacaaaacccccacacugaaggauuuugggggcuucaacuucucucagauacuuccagacccucugaaacccacuaagaggagcuuuaucgaagaucuacucuucaauaaggucacccuggccgacgcaggauuuaugaaacaguacggcgaguguuuaggggauauuaacgccagagaccugaucugcgcucagaaguucaauggacuaacggugcucccaccgcugcuuacagaugacaugauugccgcauauaccgcugccuugguuucagguacugcgacagccggcuggaccuuuggggcuggagcagcccugcaaaucccuuucgcuaugcagauggccuaccguuuuaacggcauaggugugacucagaauguacucuaugaaaaccagaaacaaauugcaaaucaguucaacaaggcgaucagucagauucaagagucccugaccacaacgucuaccgccuuagggaaacugcaggaugucgugaaccagaaugcucaggcccuuaacacuuuggugaagcaacucagcuccaauuuuggcgcaaucucaagcguccugaacgacauacuaagucggcuggaucccccagaggcugaaguucagaucgaccgacucauuacaggaagacugcagucucuucagaccuacgugacacaacaguugaucagggccgcagagauucgcgccuccgcuaaucuggcggccacuaagaugagcgaaugcguauuaggccagucgaaacggguggacuucugugggaagggauaucaccucaugucauuuccccaggcagcuccucauggcgucguguuccugcacguuaccuacgugccaucucaagagagaaacuuuacgacagcccccgccaucugccacgaagguaaggcuuauuucccuagggagggggucuucguguuuaauggaaccaguugguucauaacucagcgcaacuuuuucuccccgcagauuaucaccacagauaauacuuuuguuagcggcucuugugacguggucaucgguauuaucaacaauaccguauacgauccacuucaacccgagcuggacagcuucaaggaagaguuggauaaauacuuuaagaaccauacauccccugacguggaucucggcgacauuucagggauaaaugcaaguguugugaacauccagaaagaaauugaucgacugaaugaggucgccaagaaccuaaaugagagccugaucgaccuccaggaacugggaaaguaugagcagugaggacuaguuauaagacugacuagcccgaugggccucccaacgggcccuccuccccuccuugcaccgagauuaauaaaaaaaaaaaaaaaaaaaaaaaaaaaaaaaaaaaaaaaaaaaaaaaaaaaaaaaaaaaaaaaaugcaucccccccccccccccccccccccccccccccaaaggcucuuuucagagccaccagaauu

SEQ ID NO: 15204 - RNA, 3874 nt, Artificial Sequence
  Bat SARS-like CoV/WIV1__AGZ48828.1 spike protein mRNA human (variant)
aggagaaagcuuaccaugaagcugcucgugcuugucuucgccacccugguuagcuccuacacaaucgagaaaugcuuggacuuugaugacagaacucccccugcuaacacgcaguucuuaucuucacacaggggcguguauuacccagaugacauuuuucggaguaauguacugcaucuagugcaagaucacuuccucccguuugacagcaacgucacccgcuucauaacauuugggcugaauuucgauaaccccaucauuccuuuuaaggacggaaucuauuucgcagccacugaaaaauccaaugugauucgagguuggguuuuuggcucuaccaugaacaauaagucgcagucagugaucauaaugaacaauagcacaaaccuugucauccgugcguguaauuucgagcugugcgauaacccauuuuucgugguauugaaaaguaauaacacccagauucccuccuacaucuucaauaacgcuuuuaacuguacuuucgaauauguuucuaaggacuuuaaucucgaucugggggagaagccuggaaacuucaaagaccugagagaauuuguguucaggaauaaggauggcuuucuccaugucuacagcgguuaucagccaauuuccgccgcaucaggguuacccacaggauucaacgcccugaaaccuaucuuuaaacuuccauugggcauaaauauuaccaacuuccggacgcugcuaacugcuuuuccgccccgcccugacuacuggggcaccagugcagccgcuuacuucgugggguaucucaaaccaacaacuuuuaugcugaaguacgacgagaauggaaccaucacagaugccguggacugcagccaaaacccccuugcggagcugaaguguucugucaaauccuucgaaauugauaaggguaucuaucagaccucaaauuucagaguugcaccuagcaaagaggugguaagguuuccaaacaucacgaauuugugccccuucggcgaaguguuuaacgccacuacauucccgagugucuacgcuugggagcggaagcgcauuucuaauuguguggccgacuauuccguucucuacaacagcaccucguuuucuacuuucaaaugcuaugggguguccgcaacaaagcugaaugauuuauguuuuucaaacgucuacgcugacaguuucgugguaaaaggagaugacguucgacagauagccccuggccagaccggugugaucgcggauuacaacuauaagcugcccgacgauuuuacggggugcguccucgccuggaauaccagaaacauugacgcaacacaaacuggaaauuacaacuauaaguacaggagccuucggcacggcaaacugcguccauucgagcgcgacaucuccaaugugccuuuuucucccgauggcaagccauguacacccccugcuuucaacugcuauuggccauugaaugacuacggguuuuauauaaccaacggaauugguuaccagccguacagagucgugguuuugagcuucgaacugcucaaugcccccgcuacugugugcggcccuaaacugucaaccgaucuuaucaagaaccaguguguaaauuucaacuuuaaugggcugacaggaaccggcgucuugacuccaaguuccaaaagguuccagcccuuucaacaguucggucgggacgugagcgauuuuacggacucuguucgagauccuaagacaucagagauccucgacauuaguccaugcagcuucgggggcguguccgucaucacccccggaacuaacaccucuucggaaguggccguacuguaucaggaugugaauuguacagacguuccggucgcaauucaugccgaucaauuaaccccuagcuggcgcgugcacuccacuggcaacaacguguuucagacacaggcugggugccugauaggagcggagcacgucgacacgucauacgaaugugauaucccaauuggugcaggcaucugcgccaguuaucauaccguuucuagccuaagauccacuucacaaaagagcaucguggcuuacacaaugucucucggggccgacuccaguauugcauauagcaauaacaccauagccauccccacaaauuucucuauuuccaucacuaccgaggugaugccuguaucaauggcuaaaacgagugucgacuguaacauguacauuugcggagauagcaccgagugugccaaucugcuuuugcaauauggcucguuuugcacacagcugaacagggcacucuccgguaucgcgguggaacaggaccggaauacucgcgagguuuucgcucaggugaagcaaauguacaaaacccccacacugaaggauuuugggggcuucaacuucucucagauacuuccagacccucugaaacccacuaagaggagcuuuaucgaagaucuacucuucaauaaggucacccuggccgacgcaggauuuaugaaacaguacggcgaguguuuaggggauauuaacgccagagaccugaucugcgcucagaaguucaauggacuaacggugcucccaccgcugcuuacagaugacaugauugccgcauauaccgcugccuugguuucagguacugcgacagccggcuggaccuuuggggcuggagcagcccugcaaaucccuuucgcuaugcagauggccuaccguuuuaacggcauaggugugacucagaauguacucuaugaaaaccagaaacaaauugcaaaucaguucaacaaggcgaucagucagauucaagagucccugaccacaacgucuaccgccuuagggaaacugcaggaugucgugaaccagaaugcucaggcccuuaacacuuuggugaagcaacucagcuccaauuuuggcgcaaucucaagcguccugaacgacauacuaagucggcuggaucccccagaggcugaaguucagaucgaccgacucauuacaggaagacugcagucucuucagaccuacgugacacaacaguugaucagggccgcagagauucgcgccuccgcuaaucuggcggccacuaagaugagcgaaugcguauuaggccagucgaaacggguggacuucugugggaagggauaucaccucaugucauuuccccaggcagcuccucauggcgucguguuccugcacguuaccuacgugccaucucaagagagaaacuuuacgacagcccccgccaucugccacgaagguaaggcuuauuucccuagggagggggucuucguguuuaauggaaccaguugguucauaacucagcgcaacuuuuucuccccgcagauuaucaccacagauaauacuuuuguuagcggcucuugugacguggucaucgguauuaucaacaauaccguauacgauccacuucaacccgagcuggacagcuucaaggaagaguuggauaaauacuuuaagaaccauacauccccugacguggaucucggcgacauuucagggauaaaugcaaguguugugaacauccagaaagaaauugaucgacugaaugaggucgccaagaaccuaaaugagagccugaucgaccuccaggaacugggaaaguaugagcagggcggguacauuccagaagcgccccgggauggacaggcuuaugugcguaaagacggcgaguggguacuuuugucuacguucugaggacuaguuauaagacugacuagcccgaugggccucccaacgggcccuccuccccuccuugcaccgagauuaauaaaaaaaaaaaaaaaaaaaaaaaaaaaaaaaaaaaaaaaaaaaaaaaaaaaaaaaaaaaaaaaaugcaucccccccccccccccccccccccccccccccaaaggcucuuuucagagccaccagaauu

SEQ ID NO: 15205 - RNA, 4042 nt, Artificial Sequence
  BatCoV/HKU9-1 BF_005I__YP_001039971.1 spike protein mRNA human (1-1274)
aggagaaagcuuaccaugcugcucauccuugugcugggcgucagcuuggccgcugcauccagacccgagugcuucaacccuagguuuaccuuaacaccacugaaucacacucuaaacuacacgucuauuaaggccaaaguuucaaaugugcuccugccggaccccuauauagcguacagugggcagacccuucggcaaaaccuguucauggcugauaugagcaauacaaucuuguauccuguaacuccacccgccaacggagcaaaugguggcuuuauuuacaacaccuccaucauuccugugucugccggacucuucgucaauacauggauguaucgccagccagcuucgucacgagcauacugucaggaacccuuugggguggccuucggcgacaccuuugagaacgaucguaucgcuauacugaucauggccccugacaaucuggguagcuggagugcgguugcaccaagaaaccagacuaauauuuaucucuuagugugcuccaacgccacacuguguaucaauccgggguucaacagguggggacccgcuggcucuuuuauugccccugaugcacuugucgaccauagcaacuccugcuucgugaauaacaccuuuucaguaaauaucaguacgagccggauaucuuuggcuuuccuguuuaaggauggcgaccuacucauuuaccacuccggguggcugccaacuucaaacuucgaacauggauucagccgcgguagucaccccaugaccuacuuuaugucucuuccuguuggcgggaaucugccaagagcccaauucuuucaguccaucgugaggagcaacgcgauugauaaaggagacggcauguguacaaauuucgaugucaacuugcauguggcccaccucaucaaucgggaccuguuagugucguauuuuaacaaugguucugucgcaaacgcugccgauugcgcugacuccgccgcagaggaacuguacuguguuacugggucauucgaucccccgaccggaguguauccucucagucgcuaccgagcccagguagcuggcuuugugagagucacacagaggggcagcuauugcacgcccccauacuccgugcuucaagacccuccccagccaguuguguggcggcguuauaugcuguacgacugugucuucgauuuuaccgugguaguugacucuuugcccacucaccagcuacagugcuacggggugagcccucgcagacuggcgucaauguguuauggaagugucacacucgaugugaugaggaucaaugagacccaucugaacaaucuuuucaaccgggucccagacacuuuuucccuguacaacuaugcauugccggauaauuucuacgguugccuccacgccuuuuaucugaacagcacagcucccuacgccguggcaaaucgauucccuauuaagccaggcgggcgccaaucuaacucagccuucauagacaccguuaucaaugcugcccauuauagucccuuuagcuacguguacggauuagcaguaauuacgcugaaaccugcggcuggcuccaagcuagucugcccaguggccaacgauaccguugugaucacagacagauguguccaguauaaucucuacgguuauacugggaccggcgugcugucuaagaacacaucgcuuguaauacccgauggaaaaguguucacugcaagcuccaccggcacaauuaucgggguuucaaucaauaguaccacuuacucuauuaugccgugcgucacggugccugugagcgucggauaucacccaaacuuugagagggccuugcuguucaauggucucuccuguucacagcggagccgcgcuguuacagaacccgugucugugcugugguccgccagugcaaccgcucaagacgccuuugacacuccuagcggcugcguagucaacguggagcuuagaaauaccacaaucguuaacaccugugcgaugcccauuggaaauucucugugcuucauaaacggguccaucgccacugcuaacgcagauucauugccaaggcuccagcuggugaauuacgacccuuuauaugauaacaguacagccacgcccaugaccccagucuacugggugaagguuccgacuaauuuuacacugagcgcuaccgaagaguacauucagacaacugccccuaaaaucaccaucgacugugcacguuaucuaugcggcgauucgucccggugucucaacgugcugcuucacuacgguacguucugcaaugacauuaacaaggcguugucucgaguaagcaccauacuggauucagcccuccugaguuuagucaaagagcuguccaucaauacaagagacgaagugacuaccuuuucuuucgauggggacuauaacuuuacaggccuuaugggauguuugggccccaauugcggggcuacuaccuacaggagcgccuucuccgaucuccuguaugacaaggugcgcauuacggauccaggauuuaugcagucauaccaaaagugcaucgacagccagugggguggcaguauucgggaccuacuguguacacagaccuauaacgggaucgcaguccugcccccuauaguuucuccagcuaugcaggcccucuacacuucccuuuuggugggagcaguagccagcucgggcuacacauucgguaucaccucagcuggggugauucccuucgcgacucaacugcaguuuagauuaaauggcaucggagucaccacacaggugcucguugagaaccagaaacugauugccucuaguuucaauaacgcacuugugaauauccaaaagggcuuuacggaaaccuccauagcucugagcaaaaugcaggaugucauuaaccagcaugccgcccaguugcacacucucgugguucaacuggggaacucuuucggagcuaucagcuccucaauuaaugagaucuuuaguaggcuagaaggccuggcagccaacgcggagguggaccgccucauaaauggucgaaugaugguccugaacacauauguaacccagcuuuugauccaggcuagcgaggccaaggcacaaaaugcccuggcugcacagaaaauuucugaaugcgugaaggcccaguccuuacggaacgauuucugugggaauggaacacauguucucucaaucccucagcuggcgccgaacggcgugcuuuuuauucacuacgcuuauacuccaaccgaguacgccuucguccaaacgagugcaggucugugccauaauggcacaggguaugcuccccgucagggaauguuugugcuaccuaacaauaccaacauguggcacuucacuaccaugcaguuuuacaauccaguaaacaucagcgccuccaauacacaggugcucacuucuuguucggucaacuauaccagcguuaauuacacagugcuggaacccucagugccuggcgacuacgauuuccaaaaagaguucgacaaguuuuauaagaacuuguccacgauauucaacaauaccuuuaacccgaaugauuucaacuuuaguacugucgacgugacagcccagauuaaaucucugcacgauguuguaaaucaguuaaaccagagcuucaucgaccucaagaaacugaauguguacgaaaagaccaucaaauggcccugguaugucuggcuugcaaugauugcugggaucgugggacugguuuuggccgugauuaugcucaugugcaugacuaacuguugcuccuguuuuaagggcaugugcgauuguagaaggugcugcgguucauacgacucuuaugaugacgucuacccagcggugcgcguaaauaagaaacggacagucugaggacuaguuauaagacugacuagcccgaugggccucccaacgggcccuccuccccuccuugcaccgagauuaauaaaaaaaaaaaaaaaaaaaaaaaaaaaaaaaaaaaaaaaaaaaaaaaaaaaaaaaaaaaaaaaaugcaucccccccccccccccccccccccccccccccaaaggcucuuuucagagccaccagaauu

SEQ ID NO: 15206 - RNA, 4042 nt, Artificial Sequence
  BatCoV/HKU9-1 BF_005I__YP_001039971.1 spike protein mRNA human (1-1274)(G983P_L984P)
aggagaaagcuuaccaugcugcucauccuugugcugggcgucagcuuggccgcugcauccagacccgagugcuucaacccuagguuuaccuuaacaccacugaaucacacucuaaacuacacgucuauuaaggccaaaguuucaaaugugcuccugccggaccccuauauagcguacagugggcagacccuucggcaaaaccuguucauggcugauaugagcaauacaaucuuguauccuguaacuccacccgccaacggagcaaaugguggcuuuauuuacaacaccuccaucauuccugugucugccggacucuucgucaauacauggauguaucgccagccagcuucgucacgagcauacugucaggaacccuuugggguggccuucggcgacaccuuugagaacgaucguaucgcuauacugaucauggccccugacaaucuggguagcuggagugcgguugcaccaagaaaccagacuaauauuuaucucuuagugugcuccaacgccacacuguguaucaauccgggguucaacagguggggacccgcuggcucuuuuauugccccugaugcacuugucgaccauagcaacuccugcuucgugaauaacaccuuuucaguaaauaucaguacgagccggauaucuuuggcuuuccuguuuaaggauggcgaccuacucauuuaccacuccggguggcugccaacuucaaacuucgaacauggauucagccgcgguagucaccccaugaccuacuuuaugucucuuccuguuggcgggaaucugccaagagcccaauucuuucaguccaucgugaggagcaacgcgauugauaaaggagacggcauguguacaaauuucgaugucaacuugcauguggcccaccucaucaaucgggaccuguuagugucguauuuuaacaaugguucugucgcaaacgcugccgauugcgcugacuccgccgcagaggaacuguacuguguuacugggucauucgaucccccgaccggaguguauccucucagucgcuaccgagcccagguagcuggcuuugugagagucacacagaggggcagcuauugcacgcccccauacuccgugcuucaagacccuccccagccaguuguguggcggcguuauaugcuguacgacugugucuucgauuuuaccgugguaguugacucuuugcccacucaccagcuacagugcuacggggugagcccucgcagacuggcgucaauguguuauggaagugucacacucgaugugaugaggaucaaugagacccaucugaacaaucuuuucaaccgggucccagacacuuuuucccuguacaacuaugcauugccggauaauuucuacgguugccuccacgccuuuuaucugaacagcacagcucccuacgccguggcaaaucgauucccuauuaagccaggcgggcgccaaucuaacucagccuucauagacaccguuaucaaugcugcccauuauagucccuuuagcuacguguacggauuagcaguaauuacgcugaaaccugcggcuggcuccaagcuagucugcccaguggccaacgauaccguugugaucacagacagauguguccaguauaaucucuacgguuauacugggaccggcgugcugucuaagaacacaucgcuuguaauacccgauggaaaaguguucacugcaagcuccaccggcacaauuaucgggguuucaaucaauaguaccacuuacucuauuaugccgugcgucacggugccugugagcgucggauaucacccaaacuuugagagggccuugcuguucaauggucucuccuguucacagcggagccgcgcuguuacagaacccgugucugugcugugguccgccagugcaaccgcucaagacgccuuugacacuccuagcggcugcguagucaacguggagcuuagaaauaccacaaucguuaacaccugugcgaugcccauuggaaauucucugugcuucauaaacggguccaucgccacugcuaacgcagauucauugccaaggcuccagcuggugaauuacgacccuuuauaugauaacaguacagccacgcccaugaccccagucuacugggugaagguuccgacuaauuuuacacugagcgcuaccgaagaguacauucagacaacugccccuaaaaucaccaucgacugugcacguuaucuaugcggcgauucgucccggugucucaacgugcugcuucacuacgguacguucugcaaugacauuaacaaggcguugucucgaguaagcaccauacuggauucagcccuccugaguuuagucaaagagcuguccaucaauacaagagacgaagugacuaccuuuucuuucgauggggacuauaacuuuacaggccuuaugggauguuugggccccaauugcggggcuacuaccuacaggagcgccuucuccgaucuccuguaugacaaggugcgcauuacggauccaggauuuaugcagucauaccaaaagugcaucgacagccagugggguggcaguauucgggaccuacuguguacacagaccuauaacgggaucgcaguccugcccccuauaguuucuccagcuaugcaggcccucuacacuucccuuuuggugggagcaguagccagcucgggcuacacauucgguaucaccucagcuggggugauucccuucgcgacucaacugcaguuuagauuaaauggcaucggagucaccacacaggugcucguugagaaccagaaacugauugccucuaguuucaauaacgcacuugugaauauccaaaagggcuuuacggaaaccuccauagcucugagcaaaaugcaggaugucauuaaccagcaugccgcccaguugcacacucucgugguucaacuggggaacucuuucggagcuaucagcuccucaauuaaugagaucuuuaguaggcuagaaccuccggcagccaacgcggagguggaccgccugauaaauggccgaaugaugguccucaacacauauguaacccagcugcuuauccaggcuagcgaggccaaggcacaaaaugccuuggcugcacagaaaauuucugaaugcgugaaggcccagucccugcggaacgauuucugugguaaugggacacauguuuuaucaaucccacagcucgcgcccaacggagugcuguuuauucacuacgcuuauacuccuaccgaguacgccuucguccaaacgagugcaggccuuugccauaaugguacaggcuaugccccacgucaggggauguuugugcugcccaacaauaccaacauguggcacuucacuaccaugcaguuuuacaauccuguaaacaucagcgcuuccaauacacaggugcuaacuucuuguucggucaacuauaccagcguuaauuacacagugcucgaaccgucagugcccggagacuacgauuuccaaaaagaguucgacaaguuuuauaagaaccuguccacgauauucaacaauaccuuuaacccaaaugauuucaacuuuaguacugucgacgugacagcccagauuaaaucuuugcacgauguuguaaaucagcugaaccagagcuucaucgacuuaaagaaacucaauguguacgaaaagaccaucaaauggccuugguaugucuggcuggcaaugauugcuggcaucguggggcuuguucuggccgugauuauguugaugugcaugacuaacuguugcuccuguuuuaagggaaugugcgauuguagaaggugcugcggcucauacgacucuuaugaugacgucuaccccgcggugcgcguaaauaagaaacggacagucugaggacuaguuauaagacugacuagcccgaugggccucccaacgggcccuccuccccuccuugcaccgagauuaauaaaaaaaaaaaaaaaaaaaaaaaaaaaaaaaaaaaaaaaaaaaaaaaaaaaaaaaaaaaaaaaaugcaucccccccccccccccccccccccccccccccaaaggcucuuuucagagccaccagaauu

SEQ ID NO: 15207 - RNA, 3841 nt, Artificial Sequence
  BatCoV/HKU9-1 BF_005I__YP_001039971.1 spike protein mRNA human (variant)
aggagaaagcuuaccaugcugcucauccuugugcugggcgucagcuuggccgcugcauccagacccgagugcuucaacccuagguuuaccuuaacaccacugaaucacacucuaaacuacacgucuauuaaggccaaaguuucaaaugugcuccugccggaccccuauauagcguacagugggcagacccuucggcaaaaccuguucauggcugauaugagcaauacaaucuuguauccuguaacuccacccgccaacggagcaaaugguggcuuuauuuacaacaccuccaucauuccugugucugccggacucuucgucaauacauggauguaucgccagccagcuucgucacgagcauacugucaggaacccuuugggguggccuucggcgacaccuuugagaacgaucguaucgcuauacugaucauggccccugacaaucuggguagcuggagugcgguugcaccaagaaaccagacuaauauuuaucucuuagugugcuccaacgccacacuguguaucaauccgggguucaacagguggggacccgcuggcucuuuuauugccccugaugcacuugucgaccauagcaacuccugcuucgugaauaacaccuuuucaguaaauaucaguacgagccggauaucuuuggcuuuccuguuuaaggauggcgaccuacucauuuaccacuccggguggcugccaacuucaaacuucgaacauggauucagccgcgguagucaccccaugaccuacuuuaugucucuuccuguuggcgggaaucugccaagagcccaauucuuucaguccaucgugaggagcaacgcgauugauaaaggagacggcauguguacaaauuucgaugucaacuugcauguggcccaccucaucaaucgggaccuguuagugucguauuuuaacaaugguucugucgcaaacgcugccgauugcgcugacuccgccgcagaggaacuguacuguguuacugggucauucgaucccccgaccggaguguauccucucagucgcuaccgagcccagguagcuggcuuugugagagucacacagaggggcagcuauugcacgcccccauacuccgugcuucaagacccuccccagccaguuguguggcggcguuauaugcuguacgacugugucuucgauuuuaccgugguaguugacucuuugcccacucaccagcuacagugcuacggggugagcccucgcagacuggcgucaauguguuauggaagugucacacucgaugugaugaggaucaaugagacccaucugaacaaucuuuucaaccgggucccagacacuuuuucccuguacaacuaugcauugccggauaauuucuacgguugccuccacgccuuuuaucugaacagcacagcucccuacgccguggcaaaucgauucccuauuaagccaggcgggcgccaaucuaacucagccuucauagacaccguuaucaaugcugcccauuauagucccuuuagcuacguguacggauuagcaguaauuacgcugaaaccugcggcuggcuccaagcuagucugcccaguggccaacgauaccguugugaucacagacagauguguccaguauaaucucuacgguuauacugggaccggcgugcugucuaagaacacaucgcuuguaauacccgauggaaaaguguucacugcaagcuccaccggcacaauuaucgggguuucaaucaauaguaccacuuacucuauuaugccgugcgucacggugccugugagcgucggauaucacccaaacuuugagagggccuugcuguucaauggucucuccuguucacagcggagccgcgcuguuacagaacccgugucugugcugugguccgccagugcaaccgcucaagacgccuuugacacuccuagcggcugcguagucaacguggagcuuagaaauaccacaaucguuaacaccugugcgaugcccauuggaaauucucugugcuucauaaacggguccaucgccacugcuaacgcagauucauugccaaggcuccagcuggugaauuacgacccuuuauaugauaacaguacagccacgcccaugaccccagucuacugggugaagguuccgacuaauuuuacacugagcgcuaccgaagaguacauucagacaacugccccuaaaaucaccaucgacugugcacguuaucuaugcggcgauucgucccggugucucaacgugcugcuucacuacgguacguucugcaaugacauuaacaaggcguugucucgaguaagcaccauacuggauucagcccuccugaguuuagucaaagagcuguccaucaauacaagagacgaagugacuaccuuuucuuucgauggggacuauaacuuuacaggccuuaugggauguuugggccccaauugcggggcuacuaccuacaggagcgccuucuccgaucuccuguaugacaaggugcgcauuacggauccaggauuuaugcagucauaccaaaagugcaucgacagccagugggguggcaguauucgggaccuacuguguacacagaccuauaacgggaucgcaguccugcccccuauaguuucuccagcuaugcaggcccucuacacuucccuuuuggugggagcaguagccagcucgggcuacacauucgguaucaccucagcuggggugauucccuucgcgacucaacugcaguuuagauuaaauggcaucggagucaccacacaggugcucguugagaaccagaaacugauugccucuaguuucaauaacgcacuugugaauauccaaaagggcuuuacggaaaccuccauagcucugagcaaaaugcaggaugucauuaaccagcaugccgcccaguugcacacucucgugguucaacuggggaacucuuucggagcuaucagcuccucaauuaaugagaucuuuaguaggcuagaaccuccggcagccaacgcggagguggaccgccugauaaauggccgaaugaugguccucaacacauauguaacccagcugcuuauccaggcuagcgaggccaaggcacaaaaugccuuggcugcacagaaaauuucugaaugcgugaaggcccagucccugcggaacgauuucugugguaaugggacacauguuuuaucaaucccacagcucgcgcccaacggagugcuguuuauucacuacgcuuauacuccuaccgaguacgccuucguccaaacgagugcaggccuuugccauaaugguacaggcuaugccccacgucaggggauguuugugcugcccaacaauaccaacauguggcacuucacuaccaugcaguuuuacaauccuguaaacaucagcgcuuccaauacacaggugcuaacuucuuguucggucaacuauaccagcguuaauuacacagugcucgaaccgucagugcccggagacuacgauuuccaaaaagaguucgacaaguuuuauaagaaccuguccacgauauucaacaauaccuuuaacccaaaugauuucaacuuuaguacugucgacgugacagcccagauuaaaucuuugcacgauguuguaaaucagcugaaccagagcuucaucgacuuaaagaaacucaauguguacgaaaagugaggacuaguuauaagacugacuagcccgaugggccucccaacgggcccuccuccccuccuugcaccgagauuaauaaaaaaaaaaaaaaaaaaaaaaaaaaaaaaaaaaaaaaaaaaaaaaaaaaaaaaaaaaaaaaaaugcaucccccccccccccccccccccccccccccccaaaggcucuuuucagagccaccagaauu

SEQ ID NO: 15208 - RNA, 3922 nt, Artificial Sequence
  BatCoV/HKU9-1 BF_005I__YP_001039971.1 spike protein mRNA human (variant)
aggagaaagcuuaccaugcugcucauccuugugcugggcgucagcuuggccgcugcauccagacccgagugcuucaacccuagguuuaccuuaacaccacugaaucacacucuaaacuacacgucuauuaaggccaaaguuucaaaugugcuccugccggaccccuauauagcguacagugggcaaacccuucggcaaaaccuguucauggcugauaugagcaauacaaucuuguauccuguaacuccacccgccaacggagcaaaugguggcuuuauuuacaacaccuccaucauuccugugucugccggacucuucgucaauacauggauguaucgccagccagcuucgucacgagcauacugucaggaacccuuugggguggccuucggcgacaccuuugagaacgaucguaucgcuauacugaucauggccccugacaaucuggguagcuggagugcgguugcaccaagaaaccagacuaauauuuaucucuuagugugcuccaacgccacacuguguaucaauccgggguucaacagguggggacccgcuggcucuuuuauugccccugaugcacuugucgaccauagcaacuccugcuucgugaauaacaccuuuucaguaaauaucaguacgagccggauaucuuuggcuuuccuguuuaaggauggcgaccuacucauuuaccacuccggguggcugccaacuucaaacuucgaacauggauucagccgcgguagucaccccaugaccuacuuuaugucucuuccuguuggcgggaaucugccaagagcccaauucuuucaguccaucgugaggagcaacgcgauugauaaaggagacggcauguguacaaauuucgaugucaacuugcauguggcccaccucaucaaucgggaccuguuagugucguauuuuaacaaugguucugucgcaaacgcugccgauugcgcugacuccgccgcagaggaacuguacuguguuacugggucauucgaucccccgaccggaguguauccucucagucgcuaccgagcccagguagcuggcuuugugagagucacacagaggggcagcuauugcacgcccccauacuccgugcuucaagacccuccccagccaguuguguggcggcguuauaugcuguacgacugugucuucgauuuuaccgugguaguugacucuuugcccacucaccagcuacagugcuacggggugagcccucgcagacuggcgucaauguguuauggaagugucacacucgaugugaugaggaucaaugagacccaucugaacaaucuuuucaaccgggucccagacacuuuuucccuguacaacuaugcauugccggauaauuucuacgguugccuccacgccuuuuaucugaacagcacagcucccuacgccguggcaaaucgauucccuauuaagccaggcgggcgccaaucuaacucagccuucauagacaccguuaucaaugcugcccauuauagucccuuuagcuacguguacggauuagcaguaauuacgcugaaaccugcggcuggcuccaagcuagucugcccaguggccaacgauaccguugugaucacagacagauguguccaguauaaucucuacgguuauacugggaccggcgugcugucuaagaacacaucgcuuguaauacccgauggaaaaguguucacugcaagcuccaccggcacaauuaucgggguuucaaucaauaguaccacuuacucuauuaugccgugcgucacggugccugugagcgucggauaucacccaaacuuugagagggccuugcuguucaauggucucuccuguucacagcggagccgcgcuguuacagaacccgugucugugcugugguccgccagugcaaccgcucaagacgccuuugacacuccuagcggcugcguagucaacguggagcuuagaaauaccacaaucguuaacaccugugcgaugcccauuggaaauucucugugcuucauaaacggguccaucgccacugcuaacgcagauucauugccaaggcuccagcuggugaauuacgacccuuuauaugauaacaguacagccacgcccaugaccccagucuacugggugaagguuccgacuaauuuuacacugagcgcuaccgaagaguacauucagacaacugccccuaaaaucaccaucgacugugcacguuaucuaugcggcgauucgucccggugucucaacgugcugcuucacuacgguacguucugcaaugacauuaacaaggcguugucucgaguaagcaccauacuggauucagcccuccugaguuuagucaaagagcuguccaucaauacaagagacgaagugacuaccuuuucuuucgauggggacuauaacuuuacaggccuuaugggauguuugggccccaauugcggggcuacuaccuacaggagcgccuucuccgaucuccuguaugacaaggugcgcauuacggauccaggauuuaugcagucauaccaaaagugcaucgacagccagugggguggcaguauucgggaccuacuguguacacagaccuauaacgggaucgcaguccugcccccuauaguuucuccagcuaugcaggcccucuacacuucccuuuuggugggagcaguagccagcucgggcuacacauucgguaucaccucagcuggggugauucccuucgcgacucaacugcaguuuagauuaaauggcaucggagucaccacacaggugcucguugagaaccagaaacugauugccucuaguuucaauaacgcacuugugaauauccaaaagggcuuuacggaaaccuccauagcucugagcaaaaugcaggaugucauuaaccagcaugccgcccaguugcacacucucgugguucaacuggggaacucuuucggagcuaucagcuccucaauuaaugagaucuuuaguaggcuagaaccuccggcagccaacgcggagguggaccgccugauaaauggccgaaugaugguccucaacacauauguaacccagcugcuuauccaggcuagcgaggccaaggcacaaaaugccuuggcugcacagaaaauuucugaaugcgugaaggcccagucccugcggaacgauuucugugguaaugggacacauguuuuaucaaucccacagcucgcgcccaacggagugcuguuuauucacuacgcuuauacuccuaccgaguacgccuucguccaaacgagugcaggccuuugccauaaugguacaggcuaugccccacgucaggggauguuugugcugcccaacaauaccaacauguggcacuucacuaccaugcaguuuuacaauccuguaaacaucagcgcuuccaauacacaggugcuaacuucuuguucggucaacuauaccagcguuaauuacacagugcucgaaccgucagugcccggagacuacgauuuccaaaaagaguucgacaaguuuuauaagaaccuguccacgauauucaacaauaccuuuaacccaaaugauuucaacuuuaguacugucgacgugacagcccagauuaaaucuuugcacgauguuguaaaucagcugaaccagagcuucaucgacuuaaagaaacucaauguguacgaaaagggcggguauaucccugaggcacccagagauggacaggcuuacgucaggaaagacggcgagugggugcugcuuuccaccuuuugaggacuaguuauaagacugacuagcccgaugggccucccaacgggcccuccuccccuccuugcaccgagauuaauaaaaaaaaaaaaaaaaaaaaaaaaaaaaaaaaaaaaaaaaaaaaaaaaaaaaaaaaaaaaaaaaugcaucccccccccccccccccccccccccccccccaaaggcucuuuucagagccaccagaauu

SEQ ID NO: 15209 - RNA, 3700 nt, Artificial Sequence
  PDCoV/Swine/Thailand/S5011/2015__AMN91621.1 spike protein mRNA human (1-1160)
aggagaaagcuuaccaugcagagagcccugcucaucaugacccuucugugcuuggcuagggcaaaguucgccgacgauuuacuggaccuacucacauuucccggcgcgcaccgguuccugcauaaaccuacucgcaacgauagcauucuuuacucccgagcuaauaacaauuuugacguggggguccugccaggauauccgacgaagaacguuaauuuguucucuccccucaccaacucaacacugccuauaaauggucugcaccguaguuaccaaccacucauguuaaacugucugacuaaaaucaccaaucagacacuuagcauguauuugcagcccuccgagauucagaccuacucuugcggcggggccauggugaaguaucaaacucaugaugcaguaagaaucauucuggaccuaaucgccacagauaggauaucgguggaagucgugggacaggcuggcgagaacuacguuuuuguguguucagaccaguucaauuauaccacggcacuccacaacagcaccuuuuucagucuuaauucccagcuguacugcuuuacuaacaauacauaccuggguaucuugccuccagaucucacugacuucaccgucuaucggacagggcaauuuuacgccaacggauaucuguuaggcacccugcccauuacggugaacuacguacgccucuauagaggccagcuuucugcuaauagcgcccauuucgcgcuggcaaacuugacugauacacuaaucacccugacuaauacaaccauuucccagaucacguacugugacaaaucaguuguggauaguauagccugccagaggagcucucaccaagucgaagacggguuuuauuccgacccuaagucagcugugcgggcccgccagcgaaccauugugacacucccaaagcugccggagcuugaagucguucagcugaacaucagcgcacacauggauuucggagaggcuagauuggacagugugacuauuaaugguaacaccucuuacuguguaacaaaacccuacuucaggcucgagacuaauuuucugugccggggcuguaccaugaacuuacguacagauaccugcuccuucgaccugagcgccgugaauaacgggaugucguuuucucaauucugucuauccacugaaucaggagcgugcgagaugaagaucaucgucacguauguguggaauuaccuccugcgccagagacuuuauguuacagccguggaaggccagacccauacugguaccacaaguguccacgcaaccgauacuagcuccgugauuacagacguaugcacggauuacaccauauaugggguuucuggaacuggcaucauuaaaccuagcgacuugcugcuccauaacggcaucgcuuuuacaucaccaaccggggagcuguacgccuucaagaauauaacaacuggaaaaacccuucaggugcugcccugugagacgccuagucaauugauugucaucaacaauaccguggucggugcuaucacauccagcaacucuacugaaaacaauagguuuaccacaacuauugugaccccaacguucuuuuauucaacaaacgccaccacucucaauugcacaaagcccguucugaguuacggcccgaucagcguguguuccgauggggcaauugccggaaccucuacuuuacagaacacccggccuucgauaguaagccuguacgacggcgagaucgaaauucccuccgcuuucucacuaaguguccagacagaguaucuccaggugcaagcggaacagguuaucguggauugcccacaguacgucuguaaugguaacucucgaugccugcagcuuuuggcacaauauacgagcgccuguuccaauaucgagguggcucugcacucaagcgcccagcucgacucucgcgagauuauauccauguuuaagaccaguacucagagccugcaguuagcaaacaucacaaauuucaaaggggacuacaacuuuucuuccauucugaccucaagaguaggcggaaggagugccaucgaagaucuuuuguucaauaaggugguuacaagcggccucgggacugucgaccaagauuauaaaucgugcucccggaacauggcuauugccgaccugguguguucucaguacuauaauggaaucauggugcuaccuggugucguugaugcagagaagauggcgauguacaccggcagccugacgggggcuaugguguucggaggccucacagccgcagccgcuauacccuuugccaccgcagugcaggcucgccugaacuacguagcccuucaaacuaaugucuugcaggaaaaccagaaaauccuggcggagucauucaaccaggccguggguaauauuaguuuagcucucuccucuguuaacgacgcaauccaacagaccagcgaagcccugaauacaguggcuauugccaucaagaaaauacagacugucgugaaccagcaaggggaggcacuuucccaccugaccgcgcaguugucaaauaacuuucaggccauuagcacaaguauccaggauauuuauaauagacucgaggaaguugaggcuaaccaacagguggacaggcugaucaauggccgucuagccgcacugaacgcuuacguaacgcagcuccugaaucaaaugucucagauacggcagucccgacuuuuggcccagcaaaagaucaacgaaugcgucaagagccagucgccaagauauggauucuguggcaaugggacccauaucuuuucacugacucagacagcacccaacggaauuuucuuuaugcacgccguguuagugccuaauaaauucaccagggucaacgcuucugcggguauuugcguugauaacacucgcggcuacagucuccagccacaacugauccuuuaucaguuuaauaacuccuggcgggugacaccgagaaauauguacgagcccaggcugccucgccaggccgacuucauacagcuaaccgauugcagcguaacguuuuauaacacuaccgcagcuaaucucccaaacauuauccccgacgugaucgaugucaaucaaacagugucugacauuaucgacaaccugccuaccgccacuccaccccagugggauguugggauuuacaauaacacaauauugaaucugaccguggaaaucaacgacuuacaggagcgaagcaagaaucucucccagauugccgaucggcugcaaaacuacaucgacaaucuuaacaauacacuggucgauuuggaguggcucaaccguguggaaacuuaucugaaauggccgugguacauuuggcuagcuaucgcacuggcccuuauagcguucguuaccauccucauuacgaucuuucuguguacaggaugcuguggcgguugcuucggguguugcggcggauguuucggcuuguuuucaaagaaaaagagauauaccgacgaucagccuacuccaaguuucaaguuuaaagaguggugaggacuaguuauaagacugacuagcccgaugggccucccaacgggcccuccuccccuccuugcaccgagauuaauaaaaaaaaaaaaaaaaaaaaaaaaaaaaaaaaaaaaaaaaaaaaaaaaaaaaaaaaaaaaaaaaugcaucccccccccccccccccccccccccccccccaaaggcucuuuucagagccaccagaauu

SEQ ID NO: 15210 - RNA, 3700 nt, Artificial Sequence
  PDCoV/Swine/Thailand/S5011/2015__AMN91621.1 spike protein mRNA human (1-1160)(E855P_V856P)
aggagaaagcuuaccaugcagagagcccugcucaucaugacccuucugugcuuggcuagggcaaaguucgccgacgauuuacuggaccuacucacauuucccggcgcgcaccgguuccugcauaaaccuacucgcaacgauagcauucuuuacucccgagcuaauaacaauuuugacguggggguccugccaggauauccgacgaagaacguuaauuuguucucuccccucaccaacucaacacugccuauaaauggucugcaccguaguuaccaaccacucauguuaaacugucugacuaaaaucaccaaucagacacuuagcauguauuugcagcccuccgagauucagaccuacucuugcggcggggccauggugaaguaucaaacucaugaugcaguaagaaucauucuggaccuaaucgccacagauaggauaucgguggaagucgugggacaggcuggcgagaacuacguuuuuguguguucagaccaguucaauuauaccacggcacuccacaacagcaccuuuuucagucuuaauucccagcuguacugcuuuacuaacaauacauaccuggguaucuugccuccagaucucacugacuucaccgucuaucggacagggcaauuuuacgccaacggauaucuguuaggcacccugcccauuacggugaacuacguacgccucuauagaggccagcuuucugcuaauagcgcccauuucgcgcuggcaaacuugacugauacacuaaucacccugacuaauacaaccauuucccagaucacguacugugacaaaucaguuguggauaguauagccugccagaggagcucucaccaagucgaagacggguuuuauuccgacccuaagucagcugugcgggcccgccagcgaaccauugugacacucccaaagcugccggagcuugaagucguucagcugaacaucagcgcacacauggauuucggagaggcuagauuggacagugugacuauuaaugguaacaccucuuacuguguaacaaaacccuacuucaggcucgagacuaauuuucugugccggggcuguaccaugaacuuacguacagauaccugcuccuucgaccugagcgccgugaauaacgggaugucguuuucucaauucugucuauccacugaaucaggagcgugcgagaugaagaucaucgucacguauguguggaauuaccuccugcgccagagacuuuauguuacagccguggaaggccagacccauacugguaccacaaguguccacgcaaccgauacuagcuccgugauuacagacguaugcacggauuacaccauauaugggguuucuggaacuggcaucauuaaaccuagcgacuugcugcuccauaacggcaucgcuuuuacaucaccaaccggggagcuguacgccuucaagaauauaacaacuggaaaaacccuucaggugcugcccugugagacgccuagucaauugauugucaucaacaauaccguggucggugcuaucacauccagcaacucuacugaaaacaauagguuuaccacaacuauugugaccccaacguucuuuuauucaacaaacgccaccacucucaauugcacaaagcccguucugaguuacggcccgaucagcguguguuccgauggggcaauugccggaaccucuacuuuacagaacacccggccuucgauaguaagccuguacgacggcgagaucgaaauucccuccgcuuucucacuaaguguccagacagaguaucuccaggugcaagcggaacagguuaucguggauugcccacaguacgucuguaaugguaacucucgaugccugcagcuuuuggcacaauauacgagcgccuguuccaauaucgagguggcucugcacucaagcgcccagcucgacucucgcgagauuauauccauguuuaagaccaguacucagagccugcaguuagcaaacaucacaaauuucaaaggggacuacaacuuuucuuccauucugaccucaagaguaggcggaaggagugccaucgaagaucuuuuguucaauaaggugguuacaagcggccucgggacugucgaccaagauuauaaaucgugcucccggaacauggcuauugccgaccugguguguucucaguacuauaauggaaucauggugcuaccuggugucguugaugcagagaagauggcgauguacaccggcagccugacgggggcuaugguguucggaggccucacagccgcagccgcuauacccuuugccaccgcagugcaggcucgccugaacuacguagcccuucaaacuaaugucuugcaggaaaaccagaaaauccuggcggagucauucaaccaggccguggguaauauuaguuuagcucucuccucuguuaacgacgcaauccaacagaccagcgaagcccugaauacaguggcuauugccaucaagaaaauacagacugucgugaaccagcaaggggaggcacuuucccaccugaccgcgcaguugucaaauaacuuucaggccauuagcacaaguauccaggauauuuauaauagacucgagccacccgaagcuaaccaacagguugacaggcugaucaauggccgucuagccgcacugaacgcuuacgugacgcagcuccugaaucaaaugucucagauacggcagucccgacuuuuggcccagcaaaagaucaacgagugcguaaagagccagucgccuagauauggauucuguggcaaugggacccauaucuuuucacugacucagacagcaccaaacggaauuuucuuuaugcacgccgucuuagugccgaauaaauucaccagggugaacgcuucugcggguauuugcgucgauaacacucgcggcuacagucuccagccccaacugauccuuuaucaguuuaauaacuccuggcggguuacaccuagaaauauguacgaaccaaggcugccccgccaggccgacuucauacagcuaaccgauugcagcgugacguuuuauaacacuaccgcagcuaaucucccuaacauuaucccagacguaaucgaugugaaucaaacagucucugacauuaucgacaaccugcccaccgccacuccgccucagugggauguggggauuuacaauaacacaauauugaaucugaccguugagaucaacgacuuacaggaacgaagcaagaaucucucccagauugccgaucggcugcaaaacuacaucgacaaucuuaacaauacacugguggauuuggaguggcucaaccgugucgagacuuaucugaaauggccaugguacauuuggcuagcuaucgcacuggcccuuauagcguucgugaccauccucauuacgaucuuucuguguacaggaugcuguggcgguugcuucggguguugcggcggauguuucggcuuguuuucaaagaaaaagagauauaccgacgaucagcccacuccuaguuucaaguuuaaagaauggugaggacuaguuauaagacugacuagcccgaugggccucccaacgggcccuccuccccuccuugcaccgagauuaauaaaaaaaaaaaaaaaaaaaaaaaaaaaaaaaaaaaaaaaaaaaaaaaaaaaaaaaaaaaaaaaaugcaucccccccccccccccccccccccccccccccaaaggcucuuuucagagccaccagaauu

SEQ ID NO: 15211 - RNA, 3499 nt, Artificial Sequence
  PDCoV/Swine/Thailand/S5011/2015__AMN91621.1 spike protein mRNA human (variant)
aggagaaagcuuaccaugcagagagcccugcucaucaugacccuucugugcuuggcuagggcaaaguucgccgacgauuuacuggaccuacucacauuucccggcgcgcaccgguuccugcauaaaccuacucgcaacgauagcauucuuuacucccgagcuaauaacaauuuugacguggggguccugccaggauauccgacgaagaacguuaauuuguucucuccccucaccaacucaacacugccuauaaauggucugcaccguaguuaccaaccacucauguuaaacugucugacuaaaaucaccaaucagacacuuagcauguauuugcagcccuccgagauucagaccuacucuugcggcggggccauggugaaguaucaaacucaugaugcaguaagaaucauucuggaccuaaucgccacagauaggauaucgguggaagucgugggacaggcuggcgagaacuacguuuuuguguguucagaccaguucaauuauaccacggcacuccacaacagcaccuuuuucagucuuaauucccagcuguacugcuuuacuaacaauacauaccuggguaucuugccuccagaucucacugacuucaccgucuaucggacagggcaauuuuacgccaacggauaucuguuaggcacccugcccauuacggugaacuacguacgccucuauagaggccagcuuucugcuaauagcgcccauuucgcgcuggcaaacuugacugauacacuaaucacccugacuaauacaaccauuucccagaucacguacugugacaaaucaguuguggauaguauagccugccagaggagcucucaccaagucgaagacggguuuuauuccgacccuaagucagcugugcgggcccgccagcgaaccauugugacacucccaaagcugccggagcuugaagucguucagcugaacaucagcgcacacauggauuucggagaggcuagauuggacagugugacuauuaaugguaacaccucuuacuguguaacaaaacccuacuucaggcucgagacuaauuuucugugccggggcuguaccaugaacuuacguacagauaccugcuccuucgaccugagcgccgugaauaacgggaugucguuuucucaauucugucuauccacugaaucaggagcgugcgagaugaagaucaucgucacguauguguggaauuaccuccugcgccagagacuuuauguuacagccguggaaggccagacccauacugguaccacaaguguccacgcaaccgauacuagcuccgugauuacagacguaugcacggauuacaccauauaugggguuucuggaacuggcaucauuaaaccuagcgacuugcugcuccauaacggcaucgcuuuuacaucaccaaccggggagcuguacgccuucaagaauauaacaacuggaaaaacccuucaggugcugcccugugagacgccuagucaauugauugucaucaacaauaccguggucggugcuaucacauccagcaacucuacugaaaacaauagguuuaccacaacuauugugaccccaacguucuuuuauucaacaaacgccaccacucucaauugcacaaagcccguucugaguuacggcccgaucagcguguguuccgauggggcaauugccggaaccucuacuuuacagaacacccggccuucgauaguaagccuguacgacggcgagaucgaaauucccuccgcuuucucacuaaguguccagacagaguaucuccaggugcaagcggaacagguuaucguggauugcccacaguacgucuguaaugguaacucucgaugccugcagcuuuuggcacaauauacgagcgccuguuccaauaucgagguggcucugcacucaagcgcccagcucgacucucgcgagauuauauccauguuuaagaccaguacucagagccugcaguuagcaaacaucacaaauuucaaaggggacuacaacuuuucuuccauucugaccucaagaguaggcggaaggagugccaucgaagaucuuuuguucaauaaggugguuacaagcggccucgggacugucgaccaagauuauaaaucgugcucccggaacauggcuauugccgaccugguguguucucaguacuauaauggaaucauggugcuaccuggugucguugaugcagagaagauggcgauguacaccggcagccugacgggggcuaugguguucggaggccucacagccgcagccgcuauacccuuugccaccgcagugcaggcucgccugaacuacguagcccuucaaacuaaugucuugcaggaaaaccagaaaauccuggcggagucauucaaccaggccguggguaauauuaguuuagcucucuccucuguuaacgacgcaauccaacagaccagcgaagcccugaauacaguggcuauugccaucaagaaaauacagacugucgugaaccagcaaggggaggcacuuucccaccugaccgcgcaguugucaaauaacuuucaggccauuagcacaaguauccaggauauuuauaauagacucgagccacccgaagcuaaccaacagguugacaggcugaucaauggccgucuagccgcacugaacgcuuacgugacgcagcuccugaaucaaaugucucagauacggcagucccgacuuuuggcccagcaaaagaucaacgagugcguaaagagccagucgccuagauauggauucuguggcaaugggacccauaucuuuucacugacucagacagcaccaaacggaauuuucuuuaugcacgccgucuuagugccgaauaaauucaccagggugaacgcuucugcggguauuugcgucgauaacacucgcggcuacagucuccagccccaacugauccuuuaucaguuuaauaacuccuggcggguuacaccuagaaauauguacgaaccaaggcugccccgccaggccgacuucauacagcuaaccgauugcagcgugacguuuuauaacacuaccgcagcuaaucucccuaacauuaucccagacguaaucgaugugaaucaaacagucucugacauuaucgacaaccugcccaccgccacuccgccucagugggauguggggauuuacaauaacacaauauugaaucugaccguugagaucaacgacuuacaggaacgaagcaagaaucucucccagauugccgaucggcugcaaaacuacaucgacaaucuuaacaauacacugguggauuuggaguggcucaaccgugucgagacuugaggacuaguuauaagacugacuagcccgaugggccucccaacgggcccuccuccccuccuugcaccgagauuaauaaaaaaaaaaaaaaaaaaaaaaaaaaaaaaaaaaaaaaaaaaaaaaaaaaaaaaaaaaaaaaaaugcaucccccccccccccccccccccccccccccccaaaggcucuuuucagagccaccagaauu

SEQ ID NO: 15212 - RNA, 3580 nt, Artificial Sequence
  PDCoV/Swine/Thailand/S5011/2015__AMN91621.1 spike protein mRNA human (variant)
aggagaaagcuuaccaugcagagagcccugcucaucaugacccuucugugcuuggcuagggcaaaguucgccgacgauuuacuggaccuacucacauuucccggcgcgcaccgguuccugcauaaaccuacucgcaacgauagcauucuuuacucccgagcuaauaacaauuuugacguggggguccugccaggauauccgacgaagaacguuaauuuguucucuccccucaccaacucaacacugccuauaaauggucugcaccguaguuaccaaccacucauguuaaacugucugacuaaaaucaccaaucagacacuuagcauguauuugcagcccuccgagauucagaccuacucuugcggcggggccauggugaaguaucaaacucaugaugcaguaagaaucauucuggaccuaaucgccacagauaggauaucgguggaagucgugggacaggcuggcgagaacuacguuuuuguguguucagaccaguucaauuauaccacggcacuccacaacagcaccuuuuucagucuuaauucccagcuguacugcuuuacuaacaauacauaccuggguaucuugccuccagaucucacugacuucaccgucuaucggacagggcaauuuuacgccaacggauaucuguuaggcacccugcccauuacggugaacuacguacgccucuauagaggccagcuuucugcuaauagcgcccauuucgcgcuggcaaacuugacugauacacuaaucacccugacuaauacaaccauuucccagaucacguacugugacaaaucaguuguggauaguauagccugccagaggagcucucaccaagucgaagacggguuuuauuccgacccuaagucagcugugcgggcccgccagcgaaccauugugacacucccaaagcugccggagcuugaagucguucagcugaacaucagcgcacacauggauuucggagaggcuagauuggacagugugacuauuaaugguaacaccucuuacuguguaacaaaacccuacuucaggcucgagacuaauuuucugugccggggcuguaccaugaacuuacguacagauaccugcuccuucgaccugagcgccgugaauaacgggaugucguuuucucaauucugucuauccacugaaucaggagcgugcgagaugaagaucaucgucacguauguguggaauuaccuccugcgccagagacuuuauguuacagccguggaaggccagacccauacugguaccacaaguguccacgcaaccgauacuagcuccgugauuacagacguaugcacggauuacaccauauaugggguuucuggaacuggcaucauuaaaccuagcgacuugcugcuccauaacggcaucgcuuuuacaucaccaaccggggagcuguacgccuucaagaauauaacaacuggaaaaacccuucaggugcugcccugugagacgccuagucaauugauugucaucaacaauaccguggucggugcuaucacauccagcaacucuacugaaaacaauagguuuaccacaacuauugugaccccaacguucuuuuauucaacaaacgccaccacucucaauugcacaaagcccguucugaguuacggcccgaucagcguguguuccgauggggcaauugccggaaccucuacuuuacagaacacccggccuucgauaguaagccuguacgacggcgagaucgaaauucccuccgcuuucucacuaaguguccagacagaguaucuccaggugcaagcggaacagguuaucguggauugcccacaguacgucuguaaugguaacucucgaugccugcagcuuuuggcacaauauacgagcgccuguuccaauaucgagguggcucugcacucaagcgcccagcucgacucucgcgagauuauauccauguuuaagaccaguacucagagccugcaguuagcaaacaucacaaauuucaaaggggacuacaacuuuucuuccauucugaccucaagaguaggcggaaggagugccaucgaagaucuuuuguucaauaaggugguuacaagcggccucgggacugucgaccaagauuauaaaucgugcucccggaacauggcuauugccgaccugguguguucucaguacuauaauggaaucauggugcuaccuggugucguugaugcagagaagauggcgauguacaccggcagccugacgggggcuaugguguucggaggccucacagccgcagccgcuauacccuuugccaccgcagugcaggcucgccugaacuacguagcccuucaaacuaaugucuugcaggaaaaccagaaaauccuggcggagucauucaaccaggccguggguaauauuaguuuagcucucuccucuguuaacgacgcaauccaacagaccagcgaagcccugaauacaguggcuauugccaucaagaaaauacagacugucgugaaccagcaaggggaggcacuuucccaccugaccgcgcaguugucaaauaacuuucaggccauuagcacaaguauccaggauauuuauaauagacucgagccacccgaagcuaaccaacagguugacaggcugaucaauggccgucuagccgcacugaacgcuuacgugacgcagcuccugaaucaaaugucucagauacggcagucccgacuuuuggcccagcaaaagaucaacgagugcguaaagagccagucgccuagauauggauucuguggcaaugggacccauaucuuuucacugacucagacagcaccaaacggaauuuucuuuaugcacgccgucuuagugccgaauaaauucaccagggugaacgcuucugcggguauuugcgucgauaacacucgcggcuacagucuccagccccaacugauccuuuaucaguuuaauaacuccuggcggguuacaccuagaaauauguacgaaccaaggcugccccgccaggccgacuucauacagcuaaccgauugcagcgugacguuuuauaacacuaccgcagcuaaucucccuaacauuaucccagacguaaucgaugugaaucaaacagucucugacauuaucgacaaccugcccaccgccacuccgccucagugggauguggggauuuacaauaacacaauauugaaucugaccguugagaucaacgacuuacaggaacgaagcaagaaucucucccagauugccgaucggcugcaaaacuacaucgacaaucuuaacaauacacugguggauuuggaguggcucaaccgugucgagacuggaggcuauauuccagaagcucccagagacggucaggcauacgugaggaaagauggggaguggguucugcuaucaaccuucugaggacuaguuauaagacugacuagcccgaugggccucccaacgggcccuccuccccuccuugcaccgagauuaauaaaaaaaaaaaaaaaaaaaaaaaaaaaaaaaaaaaaaaaaaaaaaaaaaaaaaaaaaaaaaaaaugcaucccccccccccccccccccccccccccccccaaaggcucuuuucagagccaccagaauu

SEQ ID NO: 15213 - RNA, 4378 nt, Artificial Sequence
  PEDV/NPL-PEDv/2013/P10__AHZ94887.1 spike protein mRNA human (1-1386)
aggagaaagcuuaccaugaaaagccugaccuacuucuggcucuuucuucccgugcuguccacauugucuuuaccucaggacgucacuagaugcucagccaacacgaauuucaggcgguuuuucaguaaauuuaacguucaagcuccagcagugguagugcugggcggguaucuaccgaucggagagaaucagggugucaacagcaccugguacugugccggccagcaccccacagcguccggggugcauggaauuuucguuucucacauacgcggcggucauggguuugaaaucggaauuucgcaggagccuuucgauccaucaggcuaucaacucuaccugcacaaggcuacuaauggcaacaccaaugccacagcacgacuucguaucugccaguuucccagcauuaaaacccuggggccuacugccaacaaugacgugacaaccggaagaaacuguuuguucaauaaggcuaucccagcacauaugagugaacacuccgucguggguauaacgugggauaacgacaggguaacuguguuuucugauaaaaucuauuacuucuauuuuaagaaugacuggagccggguugccaccaagugcuacaacuccggcgggugugcuaugcaguacgucuaugagcccacauacuauaugcucaaugugacuucagccggagaagauggcauuaguuaccagccuugcaccgcgaacuguaucgguuaugcagccaacguguucgcuacagagccaaaugggcacauuccggagggauucagcuuuaacaauugguuccugcugucuaacgacuccacccucguccauggcaaaguugugucaaaucaacccuuacugguaaacugccuuuuggccaucccuaagauauacggccuggggcaguuuuucagcuuuaaucagacgauugauggaguguguaacggugcagcuguccagcgcgccccagaagcgcuaagauucaauaucaacgacauuagugugauccucgccgagggcucuaucguucugcacacugcacuugggacaaauuuuuccuucgugugcagcaacucgucuaauccccaucuggcuaccuuugccauuccuuugggagcuacucaagucccauauuacuguuucuuuaaaguggauacauacaacuccaccguauauaaguuccucgccguucugcccccgacggugagggaaauagucaucaccaaauacggcgacguguaugucaaugguuuuggguacuuacaccugggccuccuugaugcagugacaauuaacuucacuggacacggcaccgacgacgauguuucaggguucuggacaaucgccaguacuaacuuuguggacgcucugauagagguacagggaaccgcgauucagcggaucuuguauugcgaugacccugucagccaacuaaagugcucccagguggcauucgaucuggacgaugguuuuuacacaaucucuagccgcaaucuccugucacaugagcagcccauuaguuucguuacccuuccauccuuuaacgaccacagcuucgugaauaucacugucucugccucauuuggcgggcauaguggagcuaaccugauugccagcgauacgacaauaaauggcuucuccucuuuuuguguggacacccgacaguucacuaucucguuguuuuauaacguaaccaauagcuacgguuacguguccaagucacaagauaguaacugcccuuucacacuccagucuguuaaugacuaucugagcuuuuccaaauucugugucucaaccagcuuacuggcaucugccugcacuauugaccuauucggguaccccgaauuuggcuccggagugaaguucacaagucucuauuuucaguucacgaaaggcgagcugaucaccgggacuccaaagccccuugaaggagugacagaugucagcuuuaugaccuuggacguuuguacaaaauacacuaucuaugguuucaagggcgaggggauuauaacccugacgaacucuuccuuucucgcuggaguguacuauaccucagauaguggccagcugcuugccuucaaaaaugugacaagcggugcaguauacucggucacuccuugcuccuuuucugaacaagcggcuuacguggacgaugacaucguuggggugauuagcucacugaguuccucuaccuucaacagcacaagagaguugccaggcuuuuucuaucacuccaaugauggaucaaacuguacugagccgguccucguguacagcaauaucggcguuugcaagagugggucuauuggauaugugcccucccagagcggccagguaaagaucgccccuaccgucacggguaacauaucgaucccaacaaacuucucaaugucuauuaggaccgaauaccugcaguuauauaauacucccgugaguguggacugugcaacauacgucugcaacggaaauucccgguguaaacaacugcuaacccaguauacugccgcuugcaagaccaucgagagcgcccuccagcugucugcacgucuugaaagcguugaggugaacuccauguugacaauuucagaugaagcucugcagcucgccacgaucaguagcuuuaauggggacggcuacaacuucaccaauguacugggugugucugucuacgauccugcgucccgcagagugguucaaaagaggucauuuauagaggacuuacuguucaacaagguggucacuaauggccuugggacaguggaugaggacuauaaacggugcaguaacggacgaagcguugccgacuuggugugugcucaguacuauuccggcgucaugguacucccaggggugguugaugcagaaaagcugcauauguacucugccucgcuaauuggaggcauggugcuggguggguuuaccagcgcugccgcacuccccuucucauaugcgguccaggcccgccugaauuaccuugcuuugcaaacagacgugcugcagagaaaccagcaguuacucgccgaguccuuuaauagugcaaucggaaacauuacuucugcuuucgaaagcguaaaggaggccaucucccaaaccucaaaaggccugaauacgguggcacacgcccuuacaaagguccaggaaguugugaacucucagggugcugcgcugacccaguugacugugcaacuccagcacaacuuucaggccauaagcaguuccaucgaugacauuuauagcaggcuggauauccuaucugcagacgcucaggucgaucggcugauuaccggccgccucucagcccugaaugccuucguggcucaaacacuuacuaaauacaccgagguucaggcauccagaaaguuggcccagcaaaaaguaaacgagugcgugaagagucagagccagagguacggguuuuguggaggcgacggggaacauaucuucucgcugguccaggcggcuccgcaaggauuacucuuucugcacacagugcuuguuccuucugauuucguggacgucauagccauugcaggccugugcgugaaugaugagaucgcccuaacgcuccgugaaccaggucugguauuguucacccaugagcugcagaaccacacugcuacagaguauuuugucuccagccggcgaauguucgaacccagaaagccuaccgugucagacuuuguucagaucgagaguuguguggucacuuacgugaauuuaacaagggaucagcuccccgacguuauuccagacuauaucgaugugaacaaaacccuguacgaaauucuugcaucucugccuaaucgcacggggcccuccuugccacucgacgucuucaacgccacuuaucugaaucuaaccggagagauagcggaucuggaacaacggagcgagucacuuagaaacacaaccgaggaacuccagagucugaucuacaauauuaacaauacuuugguggaccuggagugguuaaacaggguagaaacauauaucaaguggccgugguggguguggcucauuaucuuuauaguucugaucuucgucgugagccuucugguguuuugcuguauuuccaccggcugcugugguugcuguggcugcugcugugcuugcuucucuggguguugccgcggaccucgauugcagcccuacgaggucuuugaaaaaguacacgugcagugaggacuaguuauaagacugacuagcccgaugggccucccaacgggcccuccuccccuccuugcaccgagauuaauaaaaaaaaaaaaaaaaaaaaaaaaaaaaaaaaaaaaaaaaaaaaaaaaaaaaaaaaaaaaaaaaugcaucccccccccccccccccccccccccccccccaaaggcucuuuucagagccaccagaauu

SEQ ID NO: 15214 - RNA, 4378 nt, Artificial Sequence
  PEDV/NPL-PEDv/2013/P10__AHZ94887.1 spike protein mRNA human (1-1386)(I1076P_L1077P)
aggagaaagcuuaccaugaagucucugaccuacuucuggcucuuucuucccgugcuguccacauugucuuuaccucaggacgucacuagaugcucagccaacacgaauuucaggcgguuuuucaguaaauuuaacguucaagcuccagcagugguagugcugggcggguaucuaccgaucggagagaaucagggugucaacagcaccugguacugugccggccagcaccccacagcguccggggugcauggaauuuucguuucucacauacgcggcggucauggguuugaaaucggaauuucgcaggagccuuucgauccaucaggcuaucaacucuaccugcacaaggcuacuaauggcaacaccaaugccacagcacgacuucguaucugccaguuucccagcauuaaaacccuggggccuacugccaacaaugacgugacaaccggaagaaacuguuuguucaauaaggcuaucccagcacauaugagugaacacuccgucguggguauaacgugggauaacgacaggguaacuguuuuuagcgauaaaaucuauuacuucuauuuuaagaaugacuggagccggguggccaccaagugcuacaacuccggcgggugugcuaugcaguacgucuaugagcccacauacuauaugcucaaugugacuucagccggagaagauggcauuaguuaccagccuugcaccgcgaacuguaucgguuaugcagccaacguguucgcuacagagccaaaugggcacauuccggagggauucagcuuuaacaauugguuccugcugucuaacgacuccacccucguccauggcaaaguugugucaaaucaacccuuacugguaaacugccuuuuggccaucccuaagauauacggccuggggcaguuuuucagcuuuaaucagacgauugauggaguguguaacggugcagcuguccagcgcgccccagaagcgcuaagauucaauaucaacgacauuagugugauccucgccgagggcucuaucguucugcacacugcacuugggacaaauuuuuccuucgugugcagcaacucgucuaauccccaucuggcuaccuuugccauuccuuugggagcuacucaagucccauauuacuguuucuuuaaaguggauacauacaacuccaccguauauaaguuccucgccguucugcccccgacggugagggaaauagucaucaccaaauacggcgacguguaugucaaugguuuuggguacuuacaccugggccuccuugaugcagugacaauuaacuucacuggacacggcaccgacgacgauguuucaggguucuggacaaucgccaguacuaacuuuguggacgcucugauagagguacagggaaccgcgauucagcggaucuuguauugcgaugacccugucagccaacuaaagugcucccagguggcauucgaucuggacgaugguuuuuacacaaucucuagccgcaaucuccugucacaugagcagcccauuaguuucguuacccuuccauccuuuaacgaccacagcuucgugaauaucacugucucugccucauuuggcgggcauaguggagcuaaccugauugccagcgauacgacaauaaauggcuucuccucuuuuuguguggacacccgacaguucacuaucucguuguuuuauaacguaaccaauagcuacgguuacguguccaagucacaagauaguaacugcccuuucacacuccagucuguuaaugacuaucugagcuuuuccaaauucugugucucaaccagcuuacuggcaucugccugcacuauugaccuauucggguaccccgaauuuggcuccggagugaaguucacaagucucuauuuucaguucacgaaaggcgagcugaucaccgggacuccaaagccccuugaaggagugacagaugucagcuuuaugaccuuggacguuuguacaaaauacacuaucuaugguuucaagggcgaggggauuauaacccugacgaacucuuccuuucucgcuggaguguacuauaccucagauaguggccagcugcuugccuucaaaaaugugacaagcggugcaguauacucggucacuccuugcuccuuuucugaacaagcggcuuacguggacgaugacaucguuggggugauuagcucacugaguuccucuaccuucaacagcacaagagaguugccaggcuuuuucuaucacuccaaugauggaucaaacuguacugagccgguccucguguacagcaauaucggcguuugcaagagugggucuauuggauaugugcccucccagagcggccagguaaagaucgccccuaccgucacggguaacauaucgaucccaacaaacuucucaaugucuauuaggaccgaauaccugcaguuauauaauacucccgugaguguggacugugcaacauacgucugcaacggaaauucccgguguaaacaacugcuaacccaguauacugccgcuugcaagaccaucgagagcgcccuccagcugucugcacgucuugaaagcguugaggugaacuccauguugacaauuucagaugaagcucugcagcucgccacgaucaguagcuuuaauggggacggcuacaacuucaccaauguacugggugugucugucuacgauccugcgucccgcagagugguucaaaagaggucauuuauagaggacuuacuguucaacaagguggucacuaauggccuugggacaguggaugaggacuauaaacggugcaguaacggacgaagcguugccgacuuggugugugcucaguacuauuccggcgucaugguacucccaggggugguugaugcagaaaagcugcauauguacucugccucgcuaauuggaggcauggugcuggguggguuuaccagcgcugccgcacuccccuucucauaugcgguccaggcccgccugaauuaccuugcuuugcaaacagacgugcugcagagaaaccagcaguuacucgccgaguccuuuaauagugcaaucggaaacauuacuucugcuuucgaaagcguaaaggaggccaucucccaaaccucaaaaggccugaauacgguggcacacgcccuuacaaagguccaggaaguugugaacucucagggugcugcgcugacccaguugacugugcaacuccagcacaacuuucaggccauaagcaguuccaucgaugacauuuauagcaggcuggauccgccuucugcagacgcucaggucgaucggcuaaucaccggccgccugucagcccucaaugccuucguggcucaaacacugacuaaauacaccgagguucaggcauccagaaaacuugcccagcaaaaaguaaacgagugcgugaagagucagagccagagguacggguuuuguggaggcgacggggaacauauuuucucguugguccaggcggcuccacaaggacuguuauuucuccacacagugcugguucccucugauuucguggacgucaucgccauagcaggccuuugcgugaaugaugagauugcccugacgcuacgugaaccuggucucguacuguucacccaugaguugcagaaccacacugcuacagaguauuuugucuccagccggcgaauguucgaacccagaaagccaaccgugucagacuuuguucagaucgagaguuguguggucacuuacgugaaucugacaagggaucaguuaccugacguuauccccgacuauauugaugugaacaaaacccucuacgaaauccuggcaucucuuccaaaucgcacggggccgucccugccuuuggacgucuucaacgccacuuaucucaaucugaccggagagauugcggaucuagaacaacggagcgagucacugagaaacacaaccgaggaacuucagagucucauauacaauaucaacaauacucugguggacuuggaguggcugaacaggguagaaacauauauuaaguggcccuggugggugugguuaaucauuuuuaucguucucauauucgucgugagccugcuuguguuuugcuguaucuccaccggcugcugugguugcuguggcugcugcugugcuugcuucucuggguguugccgcggaccacgacugcagcccuacgaggucuuugaaaaaguacacgugcagugaggacuaguuauaagacugacuagcccgaugggccucccaacgggcccuccuccccuccuugcaccgagauuaauaaaaaaaaaaaaaaaaaaaaaaaaaaaaaaaaaaaaaaaaaaaaaaaaaaaaaaaaaaaaaaaaugcaucccccccccccccccccccccccccccccccaaaggcucuuuucagagccaccagaauu

SEQ ID NO: 15215 - RNA, 4186 nt, Artificial Sequence
  PEDV/NPL-PEDv/2013/P10__AHZ94887.1 spike protein mRNA human (variant)
aggagaaagcuuaccaugaagucucugaccuacuucuggcucuuucuucccgugcuguccacauugucuuuaccucaggacgucacuagaugcucagccaacacgaauuucaggcgguuuuucaguaaauuuaacguucaagcuccagcagugguagugcugggcggguaucuaccgaucggagagaaucagggugucaacagcaccugguacugugccggccagcaccccacagcguccggggugcauggaauuuucguuucucacauacgcggcggucauggguuugaaaucggaauuucgcaggagccuuucgauccaucaggcuaucaacucuaccugcacaaggcuacuaauggcaacaccaaugccacagcacgacuucguaucugccaguuucccagcauuaaaacccuggggccuacugccaacaaugacgugacaaccggaagaaacuguuuguucaauaaggcuaucccagcacauaugagugaacacuccgucguggguauaacgugggauaacgacaggguaacuguuuuuagcgauaaaaucuauuacuucuauuuuaagaaugacuggagccggguggccaccaagugcuacaacuccggcgggugugcuaugcaguacgucuaugagcccacauacuauaugcucaaugugacuucagccggagaagauggcauuaguuaccagccuugcaccgcgaacuguaucgguuaugcagccaacguguucgcuacagagccaaaugggcacauuccggagggauucagcuuuaacaauugguuccugcugucuaacgacuccacccucguccauggcaaaguugugucaaaucaacccuuacugguaaacugccuuuuggccaucccuaagauauacggccuggggcaguuuuucagcuuuaaucagacgauugauggaguguguaacggugcagcuguccagcgcgccccagaagcgcuaagauucaauaucaacgacauuagugugauccucgccgagggcucuaucguucugcacacugcacuugggacaaauuuuuccuucgugugcagcaacucgucuaauccccaucuggcuaccuuugccauuccuuugggagcuacucaagucccauauuacuguuucuuuaaaguggauacauacaacuccaccguauauaaguuccucgccguucugcccccgacggugagggaaauagucaucaccaaauacggcgacguguaugucaaugguuuuggguacuuacaccugggccuccuugaugcagugacaauuaacuucacuggacacggcaccgacgacgauguuucaggguucuggacaaucgccaguacuaacuuuguggacgcucugauagagguacagggaaccgcgauucagcggaucuuguauugcgaugacccugucagccaacuaaagugcucccagguggcauucgaucuggacgaugguuuuuacacaaucucuagccgcaaucuccugucacaugagcagcccauuaguuucguuacccuuccauccuuuaacgaccacagcuucgugaauaucacugucucugccucauuuggcgggcauaguggagcuaaccugauugccagcgauacgacaauaaauggcuucuccucuuuuuguguggacacccgacaguucacuaucucguuguuuuauaacguaaccaauagcuacgguuacguguccaagucacaagauaguaacugcccuuucacacuccagucuguuaaugacuaucugagcuuuuccaaauucugugucucaaccagcuuacuggcaucugccugcacuauugaccuauucggguaccccgaauuuggcuccggagugaaguucacaagucucuauuuucaguucacgaaaggcgagcugaucaccgggacuccaaagccccuugaaggagugacagaugucagcuuuaugaccuuggacguuuguacaaaauacacuaucuaugguuucaagggcgaggggauuauaacccugacgaacucuuccuuucucgcuggaguguacuauaccucagauaguggccagcugcuugccuucaaaaaugugacaagcggugcaguauacucggucacuccuugcuccuuuucugaacaagcggcuuacguggacgaugacaucguuggggugauuagcucacugaguuccucuaccuucaacagcacaagagaguugccaggcuuuuucuaucacuccaaugauggaucaaacuguacugagccgguccucguguacagcaauaucggcguuugcaagagugggucuauuggauaugugcccucccagagcggccagguaaagaucgccccuaccgucacggguaacauaucgaucccaacaaacuucucaaugucuauuaggaccgaauaccugcaguuauauaauacucccgugaguguggacugugcaacauacgucugcaacggaaauucccgguguaaacaacugcuaacccaguauacugccgcuugcaagaccaucgagagcgcccuccagcugucugcacgucuugaaagcguugaggugaacuccauguugacaauuucagaugaagcucugcagcucgccacgaucaguagcuuuaauggggacggcuacaacuucaccaauguacugggugugucugucuacgauccugcgucccgcagagugguucaaaagaggucauuuauagaggacuuacuguucaacaagguggucacuaauggccuugggacaguggaugaggacuauaaacggugcaguaacggacgaagcguugccgacuuggugugugcucaguacuauuccggcgucaugguacucccaggggugguugaugcagaaaagcugcauauguacucugccucgcuaauuggaggcauggugcuggguggguuuaccagcgcugccgcacuccccuucucauaugcgguccaggcccgccugaauuaccuugcuuugcaaacagacgugcugcagagaaaccagcaguuacucgccgaguccuuuaauagugcaaucggaaacauuacuucugcuuucgaaagcguaaaggaggccaucucccaaaccucaaaaggccugaauacgguggcacacgcccuuacaaagguccaggaaguugugaacucucagggugcugcgcugacccaguugacugugcaacuccagcacaacuuucaggccauaagcaguuccaucgaugacauuuauagcaggcuggauccgccuucugcagacgcucaggucgaucggcuaaucaccggccgccugucagcccucaaugccuucguggcucaaacacugacuaaauacaccgagguucaggcauccagaaaacuugcccagcaaaaaguaaacgagugcgugaagagucagagccagagguacggguuuuguggaggcgacggggaacauauuuucucguugguccaggcggcuccacaaggacuguuauuucuccacacagugcugguucccucugauuucguggacgucaucgccauagcaggccuuugcgugaaugaugagauugcccugacgcuacgugaaccuggucucguacuguucacccaugaguugcagaaccacacugcuacagaguauuuugucuccagccggcgaauguucgaacccagaaagccaaccgugucagacuuuguucagaucgagaguuguguggucacuuacgugaaucugacaagggaucaguuaccugacguuauccccgacuauauugaugugaacaaaacccucuacgaaauccuggcaucucuuccaaaucgcacggggccgucccugccuuuggacgucuucaacgccacuuaucucaaucugaccggagagauugcggaucuagaacaacggagcgagucacugagaaacacaaccgaggaacuucagagucucauauacaauaucaacaauacucugguggacuuggaguggcugaacaggguagaaacaugaggacuaguuauaagacugacuagcccgaugggccucccaacgggcccuccuccccuccuugcaccgagauuaauaaaaaaaaaaaaaaaaaaaaaaaaaaaaaaaaaaaaaaaaaaaaaaaaaaaaaaaaaaaaaaaaugcaucccccccccccccccccccccccccccccccaaaggcucuuuucagagccaccagaauu

SEQ ID NO: 15216 - RNA, 4267 nt, Artificial Sequence
  PEDV/NPL-PEDv/2013/P10__AHZ94887.1 spike protein mRNA human (variant)
aggagaaagcuuaccaugaagucucugaccuacuucuggcucuuucuucccgugcuguccacauugucuuuaccucaggacgucacuagaugcucagccaacacgaauuucaggcgguuuuucaguaaauuuaacguucaagcuccagcagugguagugcugggcggguaucuaccgaucggagagaaucagggugucaacagcaccugguacugugccggccagcaccccacagcguccggggugcauggaauuuucguuucucacauacgcggcggucauggguuugaaaucggaauuucgcaggagccuuucgauccaucaggcuaucaacucuaccugcacaaggcuacuaauggcaacaccaaugccacagcacgacuucguaucugccaguuucccagcauuaaaacccuggggccuacugccaacaaugacgugacaaccggaagaaacuguuuguucaauaaggcuaucccagcacauaugagugaacacuccgucguggguauaacgugggauaacgacaggguaacuguuuuuagcgauaaaaucuauuacuucuauuuuaagaaugacuggagccggguggccaccaagugcuacaacuccggcgggugugcuaugcaguacgucuaugagcccacauacuauaugcucaaugugacuucagccggagaagauggcauuaguuaccagccuugcaccgcgaacuguaucgguuaugcagccaacguguucgcuacagagccaaaugggcacauuccggagggauucagcuuuaacaauugguuccugcugucuaacgacuccacccucguccauggcaaaguugugucaaaucaacccuuacugguaaacugccuuuuggccaucccuaagauauacggccuggggcaguuuuucagcuuuaaucagacgauugauggaguguguaacggugcagcuguccagcgcgccccagaagcgcuaagauucaauaucaacgacauuagugugauccucgccgagggcucuaucguucugcacacugcacuugggacaaauuuuuccuucgugugcagcaacucgucuaauccccaucuggcuaccuuugccauuccuuugggagcuacucaagucccauauuacuguuucuuuaaaguggauacauacaacuccaccguauauaaguuccucgccguucugcccccgacggugagggaaauagucaucaccaaauacggcgacguguaugucaaugguuuuggguacuuacaccugggccuccuugaugcagugacaauuaacuucacuggacacggcaccgacgacgauguuucaggguucuggacaaucgccaguacuaacuuuguggacgcucugauagagguacagggaaccgcgauucagcggaucuuguauugcgaugacccugucagccaacuaaagugcucccagguggcauucgaucuggacgaugguuuuuacacaaucucuagccgcaaucuccugucacaugagcagcccauuaguuucguuacccuuccauccuuuaacgaccacagcuucgugaauaucacugucucugccucauuuggcgggcauaguggagcuaaccugauugccagcgauacgacaauaaauggcuucuccucuuuuuguguggacacccgacaguucacuaucucguuguuuuauaacguaaccaauagcuacgguuacguguccaagucacaagauaguaacugcccuuucacacuccagucuguuaaugacuaucugagcuuuuccaaauucugugucucaaccagcuuacuggcaucugccugcacuauugaccuauucggguaccccgaauuuggcuccggagugaaguucacaagucucuauuuucaguucacgaaaggcgagcugaucaccgggacuccaaagccccuugaaggagugacagaugucagcuuuaugaccuuggacguuuguacaaaauacacuaucuaugguuucaagggcgaggggauuauaacccugacgaacucuuccuuucucgcuggaguguacuauaccucagauaguggccagcugcuugccuucaaaaaugugacaagcggugcaguauacucggucacuccuugcuccuuuucugaacaagcggcuuacguggacgaugacaucguuggggugauuagcucacugaguuccucuaccuucaacagcacaagagaguugccaggcuuuuucuaucacuccaaugauggaucaaacuguacugagccgguccucguguacagcaauaucggcguuugcaagagugggucuauuggauaugugcccucccagagcggccagguaaagaucgccccuaccgucacggguaacauaucgaucccaacaaacuucucaaugucuauuaggaccgaauaccugcaguuauauaauacucccgugaguguggacugugcaacauacgucugcaacggaaauucccgguguaaacaacugcuaacccaguauacugccgcuugcaagaccaucgagagcgcccuccagcugucugcacgucuugaaagcguugaggugaacuccauguugacaauuucagaugaagcucugcagcucgccacgaucaguagcuuuaauggggacggcuacaacuucaccaauguacugggugugucugucuacgauccugcgucccgcagagugguucaaaagaggucauuuauagaggacuuacuguucaacaagguggucacuaauggccuugggacaguggaugaggacuauaaacggugcaguaacggacgaagcguugccgacuuggugugugcucaguacuauuccggcgucaugguacucccaggggugguugaugcagaaaagcugcauauguacucugccucgcuaauuggaggcauggugcuggguggguuuaccagcgcugccgcacuccccuucucauaugcgguccaggcccgccugaauuaccuugcuuugcaaacagacgugcugcagagaaaccagcaguuacucgccgaguccuuuaauagugcaaucggaaacauuacuucugcuuucgaaagcguaaaggaggccaucucccaaaccucaaaaggccugaauacgguggcacacgcccuuacaaagguccaggaaguugugaacucucagggugcugcgcugacccaguugacugugcaacuccagcacaacuuucaggccauaagcaguuccaucgaugacauuuauagcaggcuggauccgccuucugcagacgcucaggucgaucggcuaaucaccggccgccugucagcccucaaugccuucguggcucaaacacugacuaaauacaccgagguucaggcauccagaaaacuugcccagcaaaaaguaaacgagugcgugaagagucagagccagagguacggguuuuguggaggcgacggggaacauauuuucucguugguccaggcggcuccacaaggacuguuauuucuccacacagugcugguucccucugauuucguggacgucaucgccauagcaggccuuugcgugaaugaugagauugcccugacgcuacgugaaccuggucucguacuguucacccaugaguugcagaaccacacugcuacagaguauuuugucuccagccggcgaauguucgaacccagaaagccaaccgugucagacuuuguucagaucgagaguuguguggucacuuacgugaaucugacaagggaucaguuaccugacguuauccccgacuauauugaugugaacaaaacccucuacgaaauccuggcaucucuuccaaaucgcacggggccgucccugccuuuggacgucuucaacgccacuuaucucaaucugaccggagagauugcggaucuagaacaacggagcgagucacugagaaacacaaccgaggaacuucagagucucauauacaauaucaacaauacucugguggacuuggaguggcugaacaggguagaaacaggcgguuauauucccgaggcuccacgcgauggccaggccuacgugcgaaaggacggggaauggguuuuacucagcaccuuuugaggacuaguuauaagacugacuagcccgaugggccucccaacgggcccuccuccccuccuugcaccgagauuaauaaaaaaaaaaaaaaaaaaaaaaaaaaaaaaaaaaaaaaaaaaaaaaaaaaaaaaaaaaaaaaaaugcaucccccccccccccccccccccccccccccccaaaggcucuuuucagagccaccagaauu

SEQ ID NO: 15217 - RNA, 4303 nt, Artificial Sequence
  MHV/S__BAK18575.1 spike protein mRNA human (1-1361)
aggagaaagcuuaccaugcuuagcguguucauccucuuucuucccuccugccugggcuacauuggggacuucagauguauaaacuuggucaauaccgauacaucuaacgccucagcuccuaguguuagcacugaggugguagacguguccaagggaaucgguacguauuacgucuuagauaggguguaucugaaugcaacccuacuccugacaggcuacuauccaguugacgggucuaacuaccggaaucuugcccugacuggaaccaacacauugucgcucaauugguauaaaccgcccuuucugucagaauuuaacgauggcauuuuugcgaaggugaaaaaucugaaggcuagccucccuaaagacaguaccuccuacuucccaacuaucgucauugguucuaacuuugugacaaccagcuacacgguaguuuuagagcccuauaaugggaucauaauggccuccaucugccaguacacuauuugucugcuuccuuauaccgauugcaagccaaacacaggaggcaauaaguugaucggcuucuggcacauugaccugaaaucacccguguguauccuaaagcgcaacuuuacuuucaaugucaacgcagauuggcucuacuuucauuucuaucaacaagggggaaccuuuuacgccuauuacgcugacgcagguagugccacaaccuuccuguucagcucuuacauaggcgaugugcuuacgcaguauuuugugcugccuuucgucugcacuccaacaaccacugggguuuucuccccgcaguacugggugacacccuugguaaaacgacaguaucucuucaacuuuaaucagaagggaaccauuacgucagcuguggacugugccagcaguuacaccucugaaaucaaaugcaagacacaguccaugaacccuaauacuggcgucuaugaucugagcgguuacaccgugcagccaguuggguuaguguaucguagagucaggaaccugcccgacugucggauugaggacuggcucgcggcaaagacagugccuucgccacuuaauugggaacgcaaaacuuuccaaaacugcaauuuuaaccugucuuccuugcuaagacugguacaggccggaucacucaguuguagcaauaucgaugcugccaagguuuacggcaugugcuucggcuccaugucuaucgacaaauuugcaauucccaacagcaggcggguggaucugcagcuuggaaauucaggguuccugcagaguuuuaacuacaagauagacacccgcgcuacauccugccaauuguauuacagccucgcccagucuaaugucaccgugaacaaucacaacccgucaaguuggaaccgaagauaugguuucaaugaugucgcgacuuuuggcagggggaaacaugacguggccuacgcagaggcuuguuucacgguuggagccagcuauugcccuugugcuaaccccuccaucgugucuccaugcacaaccggcaagccuaaauucgccaauugucccacugguaccacaaaccgggagugcaauguacuggcauuagggucgaaccuguuuaagugugauugcaccuguaauccaagcccccuaacuacauacgaccuccguugccugcagggccgcuccaugcuuggagucggcgaucacugugaaggguugggagugcuggaggacaagugcgguggcucaaacacgugcaauuguagugccgaugcuuucguugggugggcgaaagacucuugccucagcaacggaagaugucauaucuuuuccaaucugaugcuuaacggcauuaauucagguaccacuugcagcacagaccugcaauugccuaacaccgaaguggucacagggauaugugugaaguaugaucucuacggcauuacuggacagggcguauucaaagaggugaaggcagacuacuauaauucuuggcagaaccuguuauacgauguuaacgggaaucugaacggauuuagggacaucgucaccaauaaaacguaucuaacccgguccugcuacaguggucgagugagcgccgcuuaucaccaggaugccccagagccggcacuccuguaccgcaaccuuaagugugacuauguguucaauaacaauaucuuuagagaagagacacccuugaacuacuucgauucuuaccugggcugcgucguuaaugccgacaacuccacugaacaagcuguggaugccugugaccucaggauggggucaggacugugcgugaauuauaguaccgcacaccgggcgcgcacaagcguaucgacuggcuacaaguuaaccacguuugagccuuucacagucuccauugugaacgauucuguugaaagcgugggugggcuguaugagaugcagaucccaaccaauuuuacuauugcuucacaucaggaguucauacagacaagagcccccaaagucaccaucgacugugcagccuuugugugcggcgauuacacuaccugcaggcaacagcuuguugaauauggaaguuucugugacaacauuaaugcuaucuugggcgaggugaacaaccucaucgacacaaugcagcugcagguagccuccgcacuaauucaaggggucacgcugucuagccgucucgcugauggaauauccggccagaucgacgauauuaauuucucaccucugcuugguugcuuggggagccaguguagugaaggaaccauggccgcgcagggccggucuacuguggaggaccuguuauuugauaaggugaaacucuccgacgucgguuucguugaagccuacaacaauugcacaggcgggcaagaggugcgagaucugcuuuguguacagagcuuuaacggaaucaaggugcugccacccgucuugucggagaaucaggugucaggcuauaccgcuggggcaacagccucuaguauguucccgccuugguccgcugccgcaggaguuccauuuagccucucugugcaauacagaauuaacggccugggugucacuaugaaugugcuaagcgaaaaccagaaaaugaucgcguccgccuucaauaacgcuauaggggccauccaggagggauuugacgcaaccaauucagcucuggccaagauucagaguguugugaacgcaaaugccgaagcucucaacaaucugcuuaaccaauugagcaauagguucggcgcgaucucugccucccugcaggagauuuuaucacgccucgaugcacuggaagcucaggcccagaucgaccggcuuauaaacgguagacugacggcccuaaacgcuuacgucaguaagcaacucagcgauaugacacugauuaaaguauccgcagcccaggcgaucgagaaggugaaugagugcguuaaaucucagucgcccaggauuaacuuuuguggcaaugggaaccacaucuugagccuggugcagaaugcuccuuauggauuauacuuccuccauuuuucauauguccccaccuccuucacuaccgccaacgugaguccaggccugugcauaucuggggaccgcggacuugcaccuaaggccggcuacuucguacaagaugacggugaauggaaauuuacagggagcaauuauuacuaucccgagccaaucacugacaagaacuccguggucaugucaucuugugcuguuaauuacaccaaggcaccggaaguguuccugaacacaagcauuaguaauuugccugauuuuaaagaggagcucgacaagugguucaaaaaccagacguccguggcccccgaucugagccuagacuuugaaaagcugaaugucaccuuccuugaucucucugacgagaugaaccgaauccaggaagcgauuaaaaagcugaaugagucauacaucaacuugaaagaaauaggaacuuaugagauguacgugaaguggccaugguauguuuggcuguuaauuggccucgcugguguagccgugugcguccugcuguuuuucaucuguugcugcacaggcuguggguccugcuguuuuaagaaaugcggaaacuguugcgaugaguacggcgggcaccaagacaguaucgugauucacaauaucagcucgcaugaagauugaggacuaguuauaagacugacuagcccgaugggccucccaacgggcccuccuccccuccuugcaccgagauuaauaaaaaaaaaaaaaaaaaaaaaaaaaaaaaaaaaaaaaaaaaaaaaaaaaaaaaaaaaaaaaaaaugcaucccccccccccccccccccccccccccccccaaaggcucuuuucagagccaccagaauu

SEQ ID NO: 15218 - RNA, 4303 nt, Artificial Sequence
  MHV/S__BAK18575.1 spike protein mRNA human (1-1361)(A1073P_L1074P)
aggagaaagcuuaccaugcugagcguguucauccucuuucuucccuccugccugggcuacauuggggacuucagauguauaaacuuggucaauaccgauacaucuaacgccucagcuccuaguguuagcacugaggugguagacguguccaagggaaucgguacguauuacgucuuagauaggguguaucugaaugcaacccuacuccugacaggcuacuauccaguugacgggucuaacuaccggaaucuugcccugacuggaaccaacacauugucgcucaauugguauaaaccgcccuuucugucagaauuuaacgauggcauuuuugcgaaggugaaaaaucugaaggcuagccucccuaaagacaguaccuccuacuucccaacuaucgucauugguucuaacuuugugacaaccagcuacacgguaguuuuagagcccuauaaugggaucauaauggccuccaucugccaguacacuauuugucugcuuccuuauaccgauugcaagccaaacacaggaggcaauaaguugaucggcuucuggcacauugaccugaaaucacccguguguauccuaaagcgcaacuuuacuuucaaugucaacgcagauuggcucuacuuucauuucuaucaacaagggggaaccuuuuacgccuauuacgcugacgcagguagugccacaaccuuccuguucagcucuuacauaggcgaugugcuuacgcaguauuuugugcugccuuucgucugcacuccaacaaccacugggguuuucuccccgcaguacugggugacacccuugguaaaacgacaguaucucuucaacuuuaaucagaagggaaccauuacgucagcuguggacugugccagcaguuacaccucugaaaucaaaugcaagacacaguccaugaacccuaauacuggcgucuaugaucugagcgguuacaccgugcagccaguuggguuaguguaucguagagucaggaaccugcccgacugucggauugaggacuggcucgcggcaaagacagugccuucgccacuuaauugggaacgcaaaacuuuccaaaacugcaauuuuaaccugucuuccuugcuaagacugguacaggccggaucacucaguuguagcaauaucgaugcugccaagguuuacggcaugugcuucggcuccaugucuaucgacaaauuugcaauucccaacagcaggcggguggaucugcagcuuggaaauucaggguuccugcagaguuuuaacuacaagauagacacccgcgcuacauccugccaauuguauuacagccucgcccagucuaaugucaccgugaacaaucacaacccgucaaguuggaaccgaagauaugguuucaaugaugucgcgacuuuuggcagggggaaacaugacguggccuacgcagaggcuuguuucacgguuggagccagcuauugcccuugugcuaaccccuccaucgugucuccaugcacaaccggcaagccuaaauucgccaauugucccacugguaccacaaaccgggagugcaauguacuggcauuagggucgaaccuguuuaagugugauugcaccuguaauccaagcccccuaacuacauacgaccuccguugccugcagggccgcuccaugcuuggagucggcgaucacugugaaggguugggagugcuggaggacaagugcgguggcucaaacacgugcaauuguagugccgaugcuuucguugggugggcgaaagacucuugccucagcaacggaagaugucauaucuuuuccaaucugaugcuuaacggcauuaauucagguaccacuugcagcacagaccugcaauugccuaacaccgaaguggucacagggauaugugugaaguaugaucucuacggcauuacuggacagggcguauucaaagaggugaaggcagacuacuauaauucuuggcagaaccuguuauacgauguuaacgggaaucugaacggauuuagggacaucgucaccaauaaaacguaucuaacccgguccugcuacaguggucgagugagcgccgcuuaucaccaggaugccccagagccggcacuccuguaccgcaaccuuaagugugacuauguguucaauaacaauaucuuuagagaagagacacccuugaacuacuucgauucuuaccugggcugcgucguuaaugccgacaacuccacugaacaagcuguggaugccugugaccucaggauggggucaggacugugcgugaauuauaguaccgcacaccgggcgcgcacaagcguaucgacuggcuacaaguuaaccacguuugagccuuucacagucuccauugugaacgauucuguugaaagcgugggugggcuguaugagaugcagaucccaaccaauuuuacuauugcuucacaucaggaguucauacagacaagagcccccaaagucaccaucgacugugcagccuuugugugcggcgauuacacuaccugcaggcaacagcuuguugaauauggaaguuucugugacaacauuaaugcuaucuugggcgaggugaacaaccucaucgacacaaugcagcugcagguagccuccgcacuaauucaaggggucacgcugucuagccgucucgcugauggaauauccggccagaucgacgauauuaauuucucaccucugcuugguugcuuggggagccaguguagugaaggaaccauggccgcgcagggccggucuacuguggaggaccuguuauuugauaaggugaaacucuccgacgucgguuucguugaagccuacaacaauugcacaggcgggcaagaggugcgagaucugcuuuguguacagagcuuuaacggaaucaaggugcugccacccgucuugucggagaaucaggugucaggcuauaccgcuggggcaacagccucuaguauguucccgccuugguccgcugccgcaggaguuccauuuagccucucugugcaauacagaauuaacggccugggugucacuaugaaugugcuaagcgaaaaccagaaaaugaucgcguccgccuucaauaacgcuauaggggccauccaggagggauuugacgcaaccaauucagcucuggccaagauucagaguguugugaacgcaaaugccgaagcucucaacaaucugcuuaaccaauugagcaauagguucggcgcgaucucugccucccugcaggagauuuuaucacgccucgaucccccugaagcacaggcucagaucgaccggcugauaaacgguagacuuacggcccugaacgccuacgucaguaagcaacuaagcgauaugacacucauuaaaguauccgcugcacaggccaucgagaaggugaaugagugcguuaaaucucagucgcccaggauuaacuuuuguggcaaugggaaccacauccugagcuuggugcagaaugcgccauauggacuguacuucuuacauuuuucauaugucccuaccuccuucacuaccgcuaacgugagucccggccucugcauaucuggggaccgcggacuggccccaaaggcaggcuacuucguacaagaugacggugaauggaaauuuacagggagcaauuauuacuauccggagccuaucacugacaagaacuccguggucaugucaucuugugccguuaauuacaccaaggcucccgaaguguuccuuaacacaagcauuaguaaucugccagauuuuaaagaggaguuggacaagugguucaaaaaccagacguccguggcacccgaucucagccuggacuuugaaaagcuaaaugucaccuuccuggaucuuucugacgagaugaaccgaauccaggaagccauuaaaaagcucaaugagucauacaucaaccugaaagaaauaggaacuuaugagauguacgugaaguggccuugguauguuugguugcugauuggcuuagcggguguagcugugugcguccuccuguuuuucaucuguugcugcacaggcuguggguccugcuguuuuaagaaaugcggaaacuguugcgaugaguacggcgggcaccaagacaguaucgugauucacaauaucagcucgcaugaagauugaggacuaguuauaagacugacuagcccgaugggccucccaacgggcccuccuccccuccuugcaccgagauuaauaaaaaaaaaaaaaaaaaaaaaaaaaaaaaaaaaaaaaaaaaaaaaaaaaaaaaaaaaaaaaaaaugcaucccccccccccccccccccccccccccccccaaaggcucuuuucagagccaccagaauu

SEQ ID NO: 15219 - RNA, 4111 nt, Artificial Sequence
  MHV/S__BAK18575.1 spike protein mRNA human (variant)
aggagaaagcuuaccaugcugagcguguucauccucuuucuucccuccugccugggcuacauuggggacuucagauguauaaacuuggucaauaccgauacaucuaacgccucagcuccuaguguuagcacugaggugguagacguguccaagggaaucgguacguauuacgucuuagauaggguguaucugaaugcaacccuacuccugacaggcuacuauccaguugacgggucuaacuaccggaaucuugcccugacuggaaccaacacauugucgcucaauugguauaaaccgcccuuucugucagaauuuaacgauggcauuuuugcgaaggugaaaaaucugaaggcuagccucccuaaagacaguaccuccuacuucccaacuaucgucauugguucuaacuuugugacaaccagcuacacgguaguuuuagagcccuauaaugggaucauaauggccuccaucugccaguacacuauuugucugcuuccuuauaccgauugcaagccaaacacaggaggcaauaaguugaucggcuucuggcacauugaccugaaaucacccguguguauccuaaagcgcaacuuuacuuucaaugucaacgcagauuggcucuacuuucauuucuaucaacaagggggaaccuuuuacgccuauuacgcugacgcagguagugccacaaccuuccuguucagcucuuacauaggcgaugugcuuacgcaguauuuugugcugccuuucgucugcacuccaacaaccacugggguuuucuccccgcaguacugggugacacccuugguaaaacgacaguaucucuucaacuuuaaucagaagggaaccauuacgucagcuguggacugugccagcaguuacaccucugaaaucaaaugcaagacacaguccaugaacccuaauacuggcgucuaugaucugagcgguuacaccgugcagccaguuggguuaguguaucguagagucaggaaccugcccgacugucggauugaggacuggcucgcggcaaagacagugccuucgccacuuaauugggaacgcaaaacuuuccaaaacugcaauuuuaaccugucuuccuugcuaagacugguacaggccggaucacucaguuguagcaauaucgaugcugccaagguuuacggcaugugcuucggcuccaugucuaucgacaaauuugcaauucccaacagcaggcggguggaucugcagcuuggaaauucaggguuccugcagaguuuuaacuacaagauagacacccgcgcuacauccugccaauuguauuacagccucgcccagucuaaugucaccgugaacaaucacaacccgucaaguuggaaccgaagauaugguuucaaugaugucgcgacuuuuggcagggggaaacaugacguggccuacgcagaggcuuguuucacgguuggagccagcuauugcccuugugcuaaccccuccaucgugucuccaugcacaaccggcaagccuaaauucgccaauugucccacugguaccacaaaccgggagugcaauguacuggcauuagggucgaaccuguuuaagugugauugcaccuguaauccaagcccccuaacuacauacgaccuccguugccugcagggccgcuccaugcuuggagucggcgaucacugugaaggguugggagugcuggaggacaagugcgguggcucaaacacgugcaauuguagugccgaugcuuucguugggugggcgaaagacucuugccucagcaacggaagaugucauaucuuuuccaaucugaugcuuaacggcauuaauucagguaccacuugcagcacagaccugcaauugccuaacaccgaaguggucacagggauaugugugaaguaugaucucuacggcauuacuggacagggcguauucaaagaggugaaggcagacuacuauaauucuuggcagaaccuguuauacgauguuaacgggaaucugaacggauuuagggacaucgucaccaauaaaacguaucuaacccgguccugcuacaguggucgagugagcgccgcuuaucaccaggaugccccagagccggcacuccuguaccgcaaccuuaagugugacuauguguucaauaacaauaucuuuagagaagagacacccuugaacuacuucgauucuuaccugggcugcgucguuaaugccgacaacuccacugaacaagcuguggaugccugugaccucaggauggggucaggacugugcgugaauuauaguaccgcacaccgggcgcgcacaagcguaucgacuggcuacaaguuaaccacguuugagccuuucacagucuccauugugaacgauucuguugaaagcgugggugggcuguaugagaugcagaucccaaccaauuuuacuauugcuucacaucaggaguucauacagacaagagcccccaaagucaccaucgacugugcagccuuugugugcggcgauuacacuaccugcaggcaacagcuuguugaauauggaaguuucugugacaacauuaaugcuaucuugggcgaggugaacaaccucaucgacacaaugcagcugcagguagccuccgcacuaauucaaggggucacgcugucuagccgucucgcugauggaauauccggccagaucgacgauauuaauuucucaccucugcuugguugcuuggggagccaguguagugaaggaaccauggccgcgcagggccggucuacuguggaggaccuguuauuugauaaggugaaacucuccgacgucgguuucguugaagccuacaacaauugcacaggcgggcaagaggugcgagaucugcuuuguguacagagcuuuaacggaaucaaggugcugccacccgucuugucggagaaucaggugucaggcuauaccgcuggggcaacagccucuaguauguucccgccuugguccgcugccgcaggaguuccauuuagccucucugugcaauacagaauuaacggccugggugucacuaugaaugugcuaagcgaaaaccagaaaaugaucgcguccgccuucaauaacgcuauaggggccauccaggagggauuugacgcaaccaauucagcucuggccaagauucagaguguugugaacgcaaaugccgaagcucucaacaaucugcuuaaccaauugagcaauagguucggcgcgaucucugccucccugcaggagauuuuaucacgccucgaucccccugaagcacaggcucagaucgaccggcugauaaacgguagacuuacggcccugaacgccuacgucaguaagcaacuaagcgauaugacacucauuaaaguauccgcugcacaggccaucgagaaggugaaugagugcguuaaaucucagucgcccaggauuaacuuuuguggcaaugggaaccacauccugagcuuggugcagaaugcgccauauggacuguacuucuuacauuuuucauaugucccuaccuccuucacuaccgcuaacgugagucccggccucugcauaucuggggaccgcggacuggccccaaaggcaggcuacuucguacaagaugacggugaauggaaauuuacagggagcaauuauuacuauccggagccuaucacugacaagaacuccguggucaugucaucuugugccguuaauuacaccaaggcucccgaaguguuccuuaacacaagcauuaguaaucugccagauuuuaaagaggaguuggacaagugguucaaaaaccagacguccguggcacccgaucucagccuggacuuugaaaagcuaaaugucaccuuccuggaucuuucugacgagaugaaccgaauccaggaagccauuaaaaagcucaaugagucauacaucaaccugaaagaaauaggaacuuaugagaugugaggacuaguuauaagacugacuagcccgaugggccucccaacgggcccuccuccccuccuugcaccgagauuaauaaaaaaaaaaaaaaaaaaaaaaaaaaaaaaaaaaaaaaaaaaaaaaaaaaaaaaaaaaaaaaaaugcaucccccccccccccccccccccccccccccccaaaggcucuuuucagagccaccagaauu

SEQ ID NO: 15220 - RNA, 4192 nt, Artificial Sequence
  MHV/S__BAK18575.1 spike protein mRNA human (variant)
aggagaaagcuuaccaugcugagcguguucauccucuuucuucccuccugccugggcuacauuggggacuucagauguauaaacuuggucaauaccgauacaucuaacgccucagcuccuaguguuagcacugaggugguagacguguccaagggaaucgguacguauuacgucuuagauaggguguaucugaaugcaacccuacuccugacaggcuacuauccaguugacgggucuaacuaccggaaucuugcccugacuggaaccaacacauugucgcucaauugguauaaaccgcccuuucugucagaauuuaacgauggcauuuuugcgaaggugaaaaaucugaaggcuagccucccuaaagacaguaccuccuacuucccaacuaucgucauugguucuaacuuugugacaaccagcuacacgguaguuuuagagcccuauaaugggaucauaauggccuccaucugccaguacacuauuugucugcuuccuuauaccgauugcaagccaaacacaggaggcaauaaguugaucggcuucuggcacauugaccugaaaucacccguguguauccuaaagcgcaacuuuacuuucaaugucaacgcagauuggcucuacuuucauuucuaucaacaagggggaaccuuuuacgccuauuacgcugacgcagguagugccacaaccuuccuguucagcucuuacauaggcgaugugcuuacgcaguauuuugugcugccuuucgucugcacuccaacaaccacugggguuuucuccccgcaguacugggugacacccuugguaaaacgacaauaucucuucaacuuuaaucagaagggaaccauuacgucagcuguggacugugccagcaguuacaccucugaaaucaaaugcaagacacaguccaugaacccuaauacuggcgucuaugaucugagcgguuacaccgugcagccaguuggguuaguguaucguagagucaggaaccugcccgacugucggauugaggacuggcucgcggcaaagacagugccuucgccacuuaauugggaacgcaaaacuuuccaaaacugcaauuuuaaccugucuuccuugcuaagacugguacaggccggaucacucaguuguagcaauaucgaugcugccaagguuuacggcaugugcuucggcuccaugucuaucgacaaauuugcaauucccaacagcaggcggguggaucugcagcuuggaaauucaggguuccugcagaguuuuaacuacaagauagacacccgcgcuacauccugccaauuguauuacagccucgcccagucuaaugucaccgugaacaaucacaacccgucaaguuggaaccgaagauaugguuucaaugaugucgcgacuuuuggcagggggaaacaugacguggccuacgcagaggcuuguuucacgguuggagccagcuauugcccuugugcuaaccccuccaucgugucuccaugcacaaccggcaagccuaaauucgccaauugucccacugguaccacaaaccgggagugcaauguacuggcauuagggucgaaccuguuuaagugugauugcaccuguaauccaagcccccuaacuacauacgaccuccguugccugcagggccgcuccaugcuuggagucggcgaucacugugaaggguugggagugcuggaggacaagugcgguggcucaaacacgugcaauuguagugccgaugcuuucguugggugggcgaaagacucuugccucagcaacggaagaugucauaucuuuuccaaucugaugcuuaacggcauuaauucagguaccacuugcagcacagaccugcaauugccuaacaccgaaguggucacagggauaugugugaaguaugaucucuacggcauuacuggacagggcguauucaaagaggugaaggcagacuacuauaauucuuggcagaaccuguuauacgauguuaacgggaaucugaacggauuuagggacaucgucaccaauaaaacguaucuaacccgguccugcuacaguggucgagugagcgccgcuuaucaccaggaugccccagagccggcacuccuguaccgcaaccuuaagugugacuauguguucaauaacaauaucuuuagagaagagacacccuugaacuacuucgauucuuaccugggcugcgucguuaaugccgacaacuccacugaacaagcuguggaugccugugaccucaggauggggucaggacugugcgugaauuauaguaccgcacaccgggcgcgcacaagcguaucgacuggcuacaaguuaaccacguuugagccuuucacagucuccauugugaacgauucuguugaaagcgugggugggcuguaugagaugcagaucccaaccaauuuuacuauugcuucacaucaggaguucauacagacaagagcccccaaagucaccaucgacugugcagccuuugugugcggcgauuacacuaccugcaggcaacagcuuguugaauauggaaguuucugugacaacauuaaugcuaucuugggcgaggugaacaaccucaucgacacaaugcagcugcagguagccuccgcacuaauucaaggggucacgcugucuagccgucucgcugauggaauauccggccagaucgacgauauuaauuucucaccucugcuugguugcuuggggagccaguguagugaaggaaccauggccgcgcagggccggucuacuguggaggaccuguuauuugauaaggugaaacucuccgacgucgguuucguugaagccuacaacaauugcacaggcgggcaagaggugcgagaucugcuuuguguacagagcuuuaacggaaucaaggugcugccacccgucuugucggagaaucaggugucaggcuauaccgcuggggcaacagccucuaguauguucccgccuugguccgcugccgcaggaguuccauuuagccucucugugcaauacagaauuaacggccugggugucacuaugaaugugcuaagcgaaaaccagaaaaugaucgcguccgccuucaauaacgcuauaggggccauccaggagggauuugacgcaaccaauucagcucuggccaagauucagaguguugugaacgcaaaugccgaagcucucaacaaucugcuuaaccaauugagcaauagguucggcgcgaucucugccucccugcaggagauuuuaucacgccucgaucccccugaagcacaggcucagaucgaccggcugauaaacgguagacuuacggcccugaacgccuacgucaguaagcaacuaagcgauaugacacucauuaaaguauccgcugcacaggccaucgagaaggugaaugagugcguuaaaucucagucgcccaggauuaacuuuuguggcaaugggaaccacauccugagcuuggugcagaaugcgccauauggacuguacuucuuacauuuuucauaugucccuaccuccuucacuaccgcuaacgugagucccggccucugcauaucuggggaccgcggacuggccccaaaggcaggcuacuucguacaagaugacggugaauggaaauuuacagggagcaauuauuacuauccggagccuaucacugacaagaacuccguggucaugucaucuugugccguuaauuacaccaaggcucccgaaguguuccuuaacacaagcauuaguaaucugccagauuuuaaagaggaguuggacaagugguucaaaaaccagacguccguggcacccgaucucagccuggacuuugaaaagcuaaaugucaccuuccuggaucuuucugacgagaugaaccgaauccaggaagccauuaaaaagcucaaugagucauacaucaaccugaaagaaauaggaacuuaugagaugggcgguuacauuccugaggcgccacgggauggccaggcuuaugugcguaaggacggggaauggguuuugcuguccacauuuugaggacuaguuauaagacugacuagcccgaugggccucccaacgggcccuccuccccuccuugcaccgagauuaauaaaaaaaaaaaaaaaaaaaaaaaaaaaaaaaaaaaaaaaaaaaaaaaaaaaaaaaaaaaaaaaaugcaucccccccccccccccccccccccccccccccaaaggcucuuuucagagccaccagaauu

SEQ ID NO: 15221 - protein, 219 aa, Artificial Sequence
  MERS-CoV/MERS-CoV-Jeddah-human-1__KF958702.1__membrane protein (M)
MSNMTQLTEAQIIAIIKDWNFAWSLIFLLITIVLQYGYPSRSMTVYVFKMFVLWLLWPSSMALSIFSAIYPIDLASQIISGIVAAVSAMMWISYFVQSIRLFMRTGSWWSFNPETNCLLNVPFGGTTVVRPLVEDSTSVTAVVTNGHLKMAGMHFGACDYDRLPNEVTVAKPNVLIALKMVKRQSYGTNSGVAIYHRYKAGNYRSPPITADIELALLRA

SEQ ID NO: 15222 - protein, 219 aa, Artificial Sequence
  MERS-CoV/Al-Hasa_4_2013__KF186564.1__membrane protein (M)
MSNMTQLTEAQIIAIIKDWNFAWSLIFLLITIVLQYGYPSRSMTVYVFKMFVLWLLWPSSMALSIFSAVYPIDLASQIISGIVAAVSAMMWISYFVQSIRLFMRTGSWWSFNPETNCLLNVPFGGTTVVRPLVEDSTSVTAVVTNGHLKMAGMHFGACDYDRLPNEVTVAKPNVLIALKMVKRQSYGTNSGVAIYHRYKAGNYRSPPITADIELALLRA

SEQ ID NO: 15223 - protein, 219 aa, Artificial Sequence; identical to SEQ ID NO: 15221
  MERS-CoV/Riyadh_14_2013__KJ156934.1__membrane protein (M)

SEQ ID NO: 15224 - protein, 219 aa, Artificial Sequence; identical to SEQ ID NO: 15222
  MERS-CoV/England 1__NC_038294.1__membrane protein (M)

SEQ ID NO: 15225 - protein, 221 aa, Artificial Sequence
  SARS-CoV/Tor2__NC_004718.3__membrane protein (M)
MADNGTITVEELKQLLEQWNLVIGFLFLAWIMLLQFAYSNRNRFLYIIKLVFLWLLWPVTLACFVLAAVYRINWVTGGIAIAMACIVGLMWLSYFVASFRLFARTRSMWSFNPETNILLNVPLRGTIVTRPLMESELVIGAVIIRGHLRMAGHSLGRCDIKDLPKEITVATSRTLSYYKLGASQRVGTDSGFAAYNRYRIGNYKLNTDHAGSNDNIALLVQ

SEQ ID NO: 15226 - protein, 230 aa, Artificial Sequence
  HCoV/OC43__NC_006213.1__membrane protein (M)
MSSKTTPAPVYIWTADEAIKFLKEWNFSLGIILLFITIILQFGYTSRSMFVYVIKMIILWLMWPLTIILTIFNCVYALNNVYLGLSIVFTIVAIIMWIVYFVNSIRLFIRTGSFWSFNPETNNLMCIDMKGTMYVRPIIEDYHTLTVTIIRGHLYIQGIKLGTGYSLADLPAYMTVAKVTHLCTYKRGFLDRISDTSGFAVYVKSKVGNYRLPSTQKGSGMDTALLRNNI

SEQ ID NO: 15227 - protein, 223 aa, Artificial Sequence
  HCoV/HKU1__NC_006577.2__membrane protein (M)
MNKSFLPQFTSDQAVTFLKEWNFSLGVILLFITIILQFGYTSRSMFVYLIKMIILWLMWPLTITLTIFNCFYALNNAFLAFSIVFTIISIVIWILYFVNSIRLFIRTGSWWSFNPETNNLMCIDMKGKMFVRPVIEDYHTLTATVIRGHLYIQGVKLGTGYTLSDLPVYVTVAKVQVLCTYKRAFLDKLDVNSGFAVFVKSKVGNYRLPSSKPSGMDTALLRA

SEQ ID NO: 15228 - protein, 225 aa, Artificial Sequence
  HCoV/229E/BN1/GER/2015__KU291448.1__membrane protein (M)
MSNDNCTGDIVTHLKNWNFGWNVILTIFIVILQFGHYKYSRLFYGLKMLVLWLLWPLVLALSIFDTWANWDSNWAFVAFSFLMAVSTLVMWVMYFANSFRLFRRARTFWAWNPEVNAITVTTVLGQTYYQPIQQAPTGITVTLLSGVLYVDGHRLASGVQVHNLPEYMTVAVPSTTIIYSRVGRSVNSQNSTGWVFYVRVKHGDFSAVSSPMSNMTENERLLHFF

SEQ ID NO: 15229 - protein, 226 aa, Artificial Sequence
  HCoV/NL63/RPTEC/2004__JX504050.1__membrane protein (M)
MSNSSVPLLEVYVHLRNWNFSWNLILTLFIVVLQYGHYKYSRLLYGLKMSVLWCLWPLVLALSIFDCFVNFNVDWVFFGFSILMSIITLCLWVMYFVNSFRLWRRVKTFWAFNPETNAIISLQVYGHNYYLPVMAAPTGVTLTLLSGVLLVDGHKIATRVQVGQLPKYVIVATPSTTIVCDRVGRSVNETSQTGWAFYVRAKHGDFSGVASQEGVLSEREKLLHLI

SEQ ID NO: 15230 - protein, 221 aa, Artificial Sequence
  Bat SARS-like CoV/WIV1__KF367457.1__membrane protein (M)
MAENGTISVEELKRLLEQWNLVIGFLFLAWIMLLQFAYSNRNRFLYIIKLVFLWLLWPVTLACFVLAAVYRINWVTGGIAIAMACIVGLMWLSYFIASFRLFARTRSMWSFNPETNILLNVPLRGTIVTRPLMESELVIGAVIIRGHLRMAGHSLGRCDIKDLPKEITVATSRTLSYYKLGASQRVGTDSGFAAYNRYRIGNYKLNTDHAGSNDNIALLVQ

SEQ ID NO: 15231 - protein, 222 aa, Artificial Sequence
  BatCoV/HKU9-1 BF_005I__NC_009021.1__membrane protein (M)
MSNNCTNTVPRPEVIAALKDWNFAVSVILLFITVLLQWGYPSRCKPIWVIKMFILWLLWPLSIAAAVFAAIHPINSVAFGFAIAFACISGIMWLSYFISSFRLLCRTGSAWSFMPETDMLINIPLLGRTVTRPIISDSPAVQFLIIRGELRFDGFTLGRCDPGDMPDIVTIARPNALHWYKRALTRNMYTRSAILVYIKYKVGNHRVQNTTEDGDRLAMFVA

SEQ ID NO: 15232 - protein, 217 aa, Artificial Sequence
  PDCoV/Swine/Thailand/S5011/2015__KU051641.1__membrane protein (M)
MSDAEEWQIIVFIAIIWALGVILQGGYATRNRVIYVIKLILLWLLQPFTLVVTIWTAVDRSSKKDAVFIVSIIFAVLTFISWAKYWYDSIRLLMKTRSAWALSPESRLLAGIMDPMGTWRCIPIDHMAPILTPVVKHGKLKLHGQELANGISVRNPPQDMVIVSPSDTFHYTFKKPVESNNDPEFAVLIYQGDRASNAGLHTITTSKAGDARLYKYM

SEQ ID NO: 15233 - protein, 226 aa, Artificial Sequence
  PEDV/NPL-PEDv/2013/P10__KJ778616.1__membrane protein (M)
MSNGSIPVDEVIQHLRNWNFTWNIILTILLVVLQYGHYKYSAFLYGVKMAILWILWPLVLALSLFDAWASFQVNWVFFAFSILMACITLMLWIMYFVNSIRLWRRTHSWWSFNPETDALLTTSVMGRQVCIPVLGAPTGVTLTLLSGTLLVEGYKVATGVQVSQLPNFVTVAKATTTIVYGRVGRSVNASSGTGWAFYVRSKHGDYSAVSNPSSVLTDSEKVLHLV

SEQ ID NO: 15234 - protein, 228 aa, Artificial Sequence
  MHV/A59__NC_048217.1__membrane protein (M)
MSSTTQAPEPVYQWTADEAVQFLKEWNFSLGIILLFITIILQFGYTSRSMFIYVVKMIILWLMWPLTIVLCIFNCVYALNNVYLGFSIVFTIVSIVIWIMYFVNSIRLFIRTGSWWSFNPETNNLMCIDMKGTVYVRPIIEDYHTLTATIIRGHLYMQGVKLGTGFSLSDLPAYVTVAKVSHLCTYKRAFLDKVDGVSGFAVYVKSKVGNYRLPSNKPSGADTALLRT

SEQ ID NO: 15235 - protein, 222 aa, Artificial Sequence
  SARS-CoV-2/Wuhan-Hu-1__NC_045512.2/MN908947.2/EPI_ISL_402128__mem brane protein (M)
MADSNGTITVEELKKLLEQWNLVIGFLFLTWICLLQFAYANRNRFLYIIKLIFLWLLWPVTLACFVLAAVYRINWITGGIAIAMACLVGLMWLSYFIASFRLFARTRSMWSFNPETNILLNVPLHGTILTRPLLESELVIGAVILRGHLRIAGHHLGRCDIKDLPKEITVATSRTLSYYKLGASQRVAGDSGFAAYSRYRIGNYKLNTDHSSSSDNIALLVQ

SEQ ID NO: 15236 - protein, 222 aa, Artificial Sequence
  SARS-CoV-2__MT919771.1__membrane protein (M)
MADSNGTITVEELKKLLEQWNLVIGFLFFTWICLLQFAYANRNRFLYIIKLIFLWLLWPVTLACFVLAAVYRINWITGGIAIAMACLVGLMWLSYFIASFRLFARTRSMWSFNPETNILLNVPLHGTILTRPLLESELVIGAVILRGHLRIAGHHLGRCDIKDLPKEITVATSRTLSYYKLGASQRVAGDSGFAAYSRYRIGNYKLNTDHSSSSDNIALLVQ

SEQ ID NO: 15237 - protein, 222 aa, Artificial Sequence
  SARS-CoV-2__MT913062.1__membrane protein (M)
MADSNGTITVEELKKLLEQWNLVIGFLFLTWICLLQFAYANRNRFLYIIKLIFLWLLWPVTLACFVLAAVYRINWITGGIAIAMACLVGLMWLSYFIASFRLFARTRSMWSFNPETNILLNVPLHGTILTRPLLESELVIGAVILRGHLRIAGHHLGRCDIKDLPKEITVATSRMLSYYKLGASQRVAGDSGFAAYSRYRIGNYKLNTDHSSSSDNIALLVQ

SEQ ID NO: 15238 - protein, 222 aa, Artificial Sequence
  SARS-CoV-2__MT913095.1__membrane protein (M)
MADSNGTITVEELKKLLEQWNLVIGFLFLTWICLLQFAYANRNRFLYIIKLIFLWLLWPVTLACFVLAAFYRINWITGGIAIAMACLVGLMWLSYFIASFRLFARTRSMWSFNPETNILLNVPLHGTILTRPLLESELVIGAVILRGHLRIAGHHLGRCDIKDLPKEITVATSRTLSYYKLGASQRVAGDSGFAAYSRYRIGNYKLNTDHSSSSDNIALLVQ

SEQ ID NO: 15239 - protein, 222 aa, Artificial Sequence
  SARS-CoV-2__MT913138.1__membrane protein (M)
MADSNGTITVEELKKLLEQWNLVIGFLFLTWICLLQFAYANRNRFLYIIKLIFLWLLWPVTLACFVLAAVYRINWITGGIAIAMACLVGLMWLSYFIASFRLFARTRSMWSFNPETNILLNVPLHGTILTRPLLESELVIGAVILRGHLRIAGHHLGRCDIKDLPKEITVATSLTLSYYKLGASQRVAGDSGFAAYSRYRIGNYKLNTDHSSSSDNIALLVQ

SEQ ID NO: 15240 - protein, 222 aa, Artificial Sequence
  SARS-CoV-2__MT913144.1__membrane protein (M)
MADSNGTITVEELKKLLEQWNLIIGFLFLTWICLLQFAYANRNRFLYIIKLIFLWLLWPVTLACFVLAAVYRINWITGGIAIAMACLVGLMWLSYFIASFRLFARTRSMWSFNPETNILLNVPLHGTILTRPLLESELVIGAVILRGHLRIAGHHLGRCDIKDLPKEITVATSRTLSYYKLGASQRVAGDSGFAAYSRYRIGNYKLNTDHSSSSDNIALLVQ

SEQ ID NO: 15241 - protein, 222 aa, Artificial Sequence
  SARS-CoV-2__MT911566.1__membrane protein (M)
MAGSNGTITVEELKKLLEQWNLVIGFLFLTWICLLQFAYANRNRFLYIIKLIFLWLLWPVTLACFVLAAVYRINWITGGIAIAMACLVGLMWLSYFIASFRLFARTRSMWSFNPETNILLNVPLHGTILTRPLLESELVIGAVILRGHLRIAGHHLGRCDIKDLPKEITVATSRTLSYYKLGASQRVAGDSGFAAYSRYRIGNYKLNTDHSSSSDNIALLVQ

SEQ ID NO: 15242 - protein, 222 aa, Artificial Sequence
  SARS-CoV-2__MT892971.1__membrane protein (M)
MADSNGTITVEELKKLLEQWNLVIGFLFLTWICLLQFAYANRNRFLYIIKLIFLWLLWPVTLASFVLAAVYRINWITGGIAIAMACLVGLMWLSYFIASFRLFARTRSMWSFNPETNILLNVPLHGTILTRPLLESELVIGAVILRGHLRIAGHHLGRCDIKDLPKEITVATSRTLSYYKLGASQRVAGDSGFAAYSRYRIGNYKLNTDHSSSSDNIALLVQ

SEQ ID NO: 15243 - protein, 222 aa, Artificial Sequence
  SARS-CoV-2__MT883499.1__membrane protein (M)
MAYSNGTITVEELKKLLEQWNLVIGFLFLTWICLLQFAYANRNRFLYIIKLIFLWLLWPVTLACFVLAAVYRINWITGGIAIAMACLVGLMWLSYFIASFRLFARTRSMWSFNPETNILLNVPLHGTILTRPLLESELVIGAVILRGHLRIAGHHLGRCDIKDLPKEITVATSRTLSYYKLGASQRVAGDSGFAAYSRYRIGNYKLNTDHSSSSDNIALLVQ

SEQ ID NO: 15244 - protein, 222 aa, Artificial Sequence
  SARS-CoV-2__MT883502.1__membrane protein (M)
MADSNGTITVEELKKLLEQWNLVIGFLFLTWICLLQFAYANRNRFLYIIKLIFLWLLWPLTLACFVLAAVYRINWITGGIAIAMACLVGLMWLSYFIASFRLFARTRSMWSFNPETNILLNVPLHGTILTRPLLESELVIGAVILRGHLRIAGHHLGRCDIKDLPKEITVATSRTLSYYKLGASQRVAGDSGFAAYSRYRIGNYKLNTDHSSSSDNIALLVQ

SEQ ID NO: 15245 - protein, 222 aa, Artificial Sequence
  SARS-CoV-2__MT873185.1__membrane protein (M)
MADSNGTITVEELKKLLEQWNLVIGFLFLTWICLLQFAYANRNRFLYIIKLIFLWLLWPVTLACFVLAAVYRINWITGGIAIAMSCLVGLMWLSYFIASFRLFARTRSMWSFNPETNILLNVPLHGTILTRPLLESELVIGAVILRGHLRIAGHHLGRCDIKDLPKEITVATSRTLSYYKLGASQRVAGDSGFAAYSRYRIGNYKLNTDHSSSSDNIALLVQ

SEQ ID NO: 15246 - protein, 222 aa, Artificial Sequence
  SARS-CoV-2__MT873187.1__membrane protein (M)
MADSNGTITVEELKKLLEQWNLVIGFLFLTWICLLQFAYANRNRFLYIIKLIFLWLLWPVTLACFVLAAVYRINWITGGIAIAMACLVGLMWLSYFIASFRLFARTRSMWSFNPETNILLNVPLHGTILTRPLLESELVIGAVILRGHLRIAGHHLGRCDIKDLPKEITVATSRTLSYYKLGASQRVAGDSGFAAYSRYRIGNYKLNTYHSSSSDNIALLVQ

SEQ ID NO: 15247 - protein, 222 aa, Artificial Sequence
  SARS-CoV-2__MT873268.1__membrane protein (M)
MADSNGTITVEELKKLLEQWNLVIGFLFLTWICLLQFAYANRNRFLYIIKLIFLWLLWPVTLACFVLAAVYRINWITGGIAIAMACLVGLMWLSYFIASFRLFARTRSMWSFNPETNILLNVPLHDTILTRPLLESELVIGAVILRGHLRIAGHHLGRCDIKDLPKEITVATSRTLSYYKLGASQRVAGDSGFAAYSRYRIGNYKLNTDHSSSSDNIALLVQ

SEQ ID NO: 15248 - protein, 222 aa, Artificial Sequence
  SARS-CoV-2__MT873272.1__membrane protein (M)
MSDSNGTITVEELKKLLEQWNLVIGFLFLTWICLLQFAYANRNRFLYIIKLIFLWLLWPVTLACFVLAAVYRINWITGGIAIAMACLVGLMWLSYFIASFRLFARTRSMWSFNPETNILLNVPLHGTILTRPLLESELVIGAVILRGHLRIAGHHLGRCDIKDLPKEITVATSRTLSYYKLGASQRVAGDSGFAAYSRYRIGNYKLNTDHSSSSDNIALLVQ

SEQ ID NO: 15249 - protein, 222 aa, Artificial Sequence
  SARS-CoV-2__MT873351.1__membrane protein (M)
MADSNGTITVEELKKLLEQWNLVIGFLFLTWICLLQFAYANRNRFLYIIKLIFLWLLWPVTLACFVLAAVYRINWITGGIAIAMACLVGLMWLSYFIASLRLFARTRSMWSFNPETNILLNVPLHGTILTRPLLESELVIGAVILRGHLRIAGHHLGRCDIKDLPKEITVATSRTLSYYKLGASQRVAGDSGFAAYSRYRIGNYKLNTDHSSSSDNIALLVQ

SEQ ID NO: 15250 - protein, 222 aa, Artificial Sequence
  SARS-CoV-2__MT872501.1__membrane protein (M)
MADSNGTITVEELKKLLEQWNLVIGFLFLTWICLLQFAYANRNRFLYIIKLIFLWLLWPVTLACFVLAAVYRINWITGGIAIAMACLVGLMWLSYFIASFRLFARTRSIWSFNPETNILLNVPLHGTILTRPLLESELVIGAVILRGHLRIAGHHLGRCDIKDLPKEITVATSRTLSYYKLGASQRVAGDSGFAAYSRYRIGNYKLNTDHSSSSDNIALLVQ

SEQ ID NO: 15251 - protein, 222 aa, Artificial Sequence
  SARS-CoV-2__MT846468.1__membrane protein (M)
MADSNGTITVEELKKLLEQWNLVIGFLFLTWICLLQFAYANRNRFLYIIKLTFLWLLWPVTLACFVLAAVYRINWITGGIAIAMACLVGLMWLSYFIASFRLFARTRSMWSFNPETNILLNVPLHGTILTRPLLESELVIGAVILRGHLRIAGHHLGRCDIKDLPKEITVATSRTLSYYKLGASQRVAGDSGFAAYSRYRIGNYKLNTDHSSSSDNIALLVQ

SEQ ID NO: 15252 - protein, 222 aa, Artificial Sequence
  SARS-CoV-2__MT846494.1__membrane protein (M)
MADSNGTITVEELKKLLEQWNLVIGFLFLTWICLLQFAYANRNRFLYIIKLIFLWLLWPVTLACFVLASVYRINWITGGIAIAMACLVGLMWLSYFIASFRLFARTRSMWSFNPETNILLNVPLHGTILTRPLLESELVIGAVILRGHLRIAGHHLGRCDIKDLPKEITVATSRTLSYYKLGASQRVAGDSGFAAYSRYRIGNYKLNTDHSSSSDNIALLVQ

SEQ ID NO: 15253 - protein, 222 aa, Artificial Sequence
  SARS-CoV-2__MT846567.1__membrane protein (M)
MVDSNGTITVEELKKLLEQWNLVIGFLFLTWICLLQFAYANRNRFLYIIKLIFLWLLWPVTLACFVLAAVYRINWITGGIAIAMACLVGLMWLSYFIASFRLFARTRSMWSFNPETNILLNVPLHGTILTRPLLESELVIGAVILRGHLRIAGHHLGRCDIKDLPKEITVATSRTLSYYKLGASQRVAGDSGFAAYSRYRIGNYKLNTDHSSSSDNIALLVQ

SEQ ID NO: 15254 - protein, 222 aa, Artificial Sequence
  SARS-CoV-2__MT846668.1__membrane protein (M)
MADSNGTITVEELKKLLEQWNLVIGFLFLTWICLLQFAYANRNRFLYIIKLIFLWLLWPVTLACFVLAAVYRINWITGGIAIAMACLVGLMWLSYFIASFRLFARTRSMWSFNPETNILLNVPLHGTILTRPLLESELVIGAVILRGHLRIAGHHLGRCDIKDLPKEITVATSRTLSYYKLGASQRVTGDSGFAAYSRYRIGNYKLNTDHSSSSDNIALLVQ

SEQ ID NO: 15255 - protein, 222 aa, Artificial Sequence
  SARS-CoV-2__MT843737.1__membrane protein (M)
MADSNGTITVEELKKLLEQWNLLIGFLFLTWICLLQFAYANRNRFLYIIKLIFLWLLWPVTLACFVLAAVYRINWITGGIAIAMACLVGLMWLSYFIASFRLFARTRSMWSFNPETNILLNVPLHGTILTRPLLESELVIGAVILRGHLRIAGHHLGRCDIKDLPKEITVATSRTLSYYKLGASQRVAGDSGFAAYSRYRIGNYKLNTDHSSSSDNIALLVQ

SEQ ID NO: 15256 - protein, 222 aa, Artificial Sequence
  SARS-CoV-2__MT831141.1__membrane protein (M)
MADSNGTITVEELKKLLEQWNLVIGFLFLTWICLLQFAYANRNRFLYIIKLIFLWLLWPVTLACFVLAAVYRINWITGGIAIAMACLVGLMWLSYFIASFRLFVRTRSMWSFNPETNILLNVPLHGTILTRPLLESELVIGAVILRGHLRIAGHHLGRCDIKDLPKEITVATSRTLSYYKLGASQRVAGDSGFAAYSRYRIGNYKLNTDHSSSSDNIALLVQ

SEQ ID NO: 15257 - protein, 222 aa, Artificial Sequence
  SARS-CoV-2__MT831423.1__membrane protein (M)
MADSNGTITVEELKKLLEQWNLVIGFLFLTWICLLQFAYANRNRFLYIIKLIFLWLLWPVTLACFVLAAVYRINWITCGIAIAMACLVGLMWLSYFIASFRLFARTRSMWSFNPETNILLNVPLHGTILTRPLLESELVIGAVILRGHLRIAGHHLGRCDIKDLPKEITVATSRTLSYYKLGASQRVAGDSGFAAYSRYRIGNYKLNTDHSSSSDNIALLVQ

SEQ ID NO: 15258 - protein, 222 aa, Artificial Sequence
  SARS-CoV-2__MT831469.1__membrane protein (M)
MADSNGTITVEELKRLLEQWNLVIGFLFLTWICLLQFAYANRNRFLYIIKLIFLWLLWPVTLACFVLAAVYRINWITGGIAIAMACLVGLMWLSYFIASFRLFARTRSMWSFNPETNILLNVPLHGTILTRPLLESELVIGAVILRGHLRIAGHHLGRCDIKDLPKEITVATSRTLSYYKLGASQRVAGDSGFAAYSRYRIGNYKLNTDHSSSSDNIALLVQ

SEQ ID NO: 15259 - protein, 222 aa, Artificial Sequence
  SARS-CoV-2__MT834027.1__membrane protein (M)
MADSNGTITVEELKKLLEQWNLVIGFLFLTWICLLQFAYANRNRFLYIIKLIFLWLLWPVTLACFVLAAVYRINWITGGIAIAMACLVGLMWLSYFIASFRLFARTRSMWSFNPETNILLNVPLYGTILTRPLLESELVIGAVILRGHLRIAGHHLGRCDIKDLPKEITVATSRTLSYYKLGASQRVAGDSGFAAYSRYRIGNYKLNTDHSSSSDNIALLVQ

SEQ ID NO: 15260 - protein, 222 aa, Artificial Sequence
  SARS-CoV-2__MT834697.1__membrane protein (M)
MADSNGTITVEELKKLLEQWNLVIGFLFLTWICLLQFAYANRNRFLYIIKLIFLWLLWPVTLACFVLAAVYRINWITGGIAIAMACLVGLMWLSYFISSFRLFARTRSMWSFNPETNILLNVPLHGTILTRPLLESELVIGAVILRGHLRIAGHHLGRCDIKDLPKEITVATSRTLSYYKLGASQRVAGDSGFAAYSRYRIGNYKLNTDHSSSSDNIALLVQ

SEQ ID NO: 15261 - protein, 222 aa, Artificial Sequence
  SARS-CoV-2__MT825091.1__membrane protein (M)
MADSNGTITVEELEKLLEQWNLVIGFLFLTWICLLQFAYANRNRFLYIIKLIFLWLLWTVTLACFVLAAVYRINWITGGIAIAMACLVGLMWLSYFIASFRLFARTRSMWSFNPETNILLNVPLHGTILTRPLLESELVIGAVILRGHLRIAGHHLGRCDIKDLPKEITVATSRTLSYYKLGASQRVAGDSGFAAYSRYRIGNYKLNTDHSSSSDNIALLVQ

SEQ ID NO: 15262 - protein, 222 aa, Artificial Sequence
  SARS-CoV-2__MT821547.1__membrane protein (M)
MADSNGTITVEELEKLLEQWNLVIGFLFLTWICLLQFAYANRNRFLYIIKLIFLWLLWPVTLACFVLAAVYRINWITGGIAIAMACLVGLMWLSYFIASFRLFARTRSMWSFNPETNILLNVPLHGTILTRPLLESELVIGAVILRGHLRIAGHHLGRCDIKDLPKEITVATSRTLSYYKLGASQRVAGDSGFAAYSRYRIGNYKLNTDHSSSSDNIALLVQ

SEQ ID NO: 15263 - protein, 222 aa, Artificial Sequence
  SARS-CoV-2__MT821560.1__membrane protein (M)
MADSNGTITVEELEKLLEQWNLVIGFLFLTWICLLQFAYANRNRFLYIIKLIFLWLLWPVTLAFFVLAAVYRINWITGGIAIAMACLVGLMWLSYFIASFRLFARTRSMWSFNPETNILLNVPLHGTILTRPLLESELVIGAVILRGHLRIAGHHLGRCDIKDLPKEITVATSRTLSYYKLGASQRVAGDSGFAAYSRYRIGNYKLNTDHSSSSDNIALLVQ

SEQ ID NO: 15264 - protein, 222 aa, Artificial Sequence
  SARS-CoV-2__MT811164.1__membrane protein (M)
MADSNGTITVEELKKLLEQWNLVIGFLFLTWICLLQFAYANRNRFLYIIKLIFLWLLWPVTLACFVLAAVYRINWITGGIAIAMACLVGLMWLSYFIASFRLFARTRSMWSFNPETNILLNVPLHGTILTRPLLENELVIGAVILRGHLRIAGHHLGRCDIKDLPKEITVATSRTLSYYKLGASQRVAGDSGFAAYSRYRIGNYKLNTDHSSSSDNIALLVQ

SEQ ID NO: 15265 - protein, 222 aa, Artificial Sequence
  SARS-CoV-2__MT811448.1__membrane protein (M)
MADSNGTITVEELKKLLEQWNLVIGFLFLTWICLLQFAYANRNRFLYIIKLIFLWLLWPVTLACFVLAAVYRINWITGGIAISMACLVGLMWLSYFIASFRLFARTRSMWSFNPETNILLNVPLHGTILTRPLLESELVIGAVILRGHLRIAGHHLGRCDIKDLPKEITVATSRTLSYYKLGASQRVAGDSGFAAYSRYRIGNYKLNTDHSSSSDNIALLVQ

SEQ ID NO: 15266 - protein, 222 aa, Artificial Sequence
  SARS-CoV-2__MT806776.1__membrane protein (M)
MADSNGTITVEELKKLLEQWNLVIGFLFLTWICLLQFAYANRNRFLYIIKLIFLWLLWPVTLACFVLAAVYRINWITGGIAIAMACLVGLMWLIYFIASFRLFARTRSMWSFNPETNILLNVPLHGTILTRPLLESELVIGAVILRGHLRIAGHHLGRCDIKDLPKEITVATSRTLSYYKLGASQRVAGDSGFAAYSRYRIGNYKLNTDHSSSSDNIALLVQ

SEQ ID NO: 15267 - protein, 222 aa, Artificial Sequence
  SARS-CoV-2__MT806783.1__membrane protein (M)
MADSNGTITVEELKKLLEQWNLVIGFLFLTWICLLQFAYANRNRFLYIIKLIFLWLLWPVTLACFVLAAVYRINWITGGIAIAMACLVGLMWLSYFIASFRLFARTRSMWSFNPETNILLNVPLHGTILTRPLLESELVIGAVILRGHLRIAGHHLGRCDIKDLPKEITVATSRTLSYYKLGASQRVAGDSGFAAYSRYRIGNYKLNIDHSSSSDNIALLVQ

SEQ ID NO: 15268 - protein, 222 aa, Artificial Sequence
  SARS-CoV-2__MT799972.1__membrane protein (M)
MADSNGTITVEELKKLLEQWNLVIGFLFLTWICLLQFAYANRNRFLYIIKLIFLWLLWPVTLACFVLAAVYRINWITGGIAIAMACLVGLMWLSYFIASFRLFARTRSMWSFNPETNILLNVPLHGTILTRPLLESELVIGVVILRGHLRIAGHHLGRCDIKDLPKEITVATSRTLSYYKLGASQRVAGDSGFAAYSRYRIGNYKLNTDHSSSSDNIALLVQ

SEQ ID NO: 15269 - protein, 222 aa, Artificial Sequence
  SARS-CoV-2__MT799976.1__membrane protein (M)
MADSNGTITVEELKKLLEQWNLVIGFLFLTWICLLQFAYANRNRFLYIIKLIFLWLLWPVTLVCFVLAAVYRINWITGGIAIAMACLVGLMWLSYFIASFRLFARTRSMWSFNPETNILLNVPLHGTILTRPLLESELVIGAVILRGHLRIAGHHLGRCDIKDLPKEITVATSRTLSYYKLGASQRVAGDSGFAAYSRYRIGNYKLNTDHSSSSDNIALLVQ

SEQ ID NO: 15270 - protein, 222 aa, Artificial Sequence
  SARS-CoV-2__MT795901.1__membrane protein (M)
MADSNGTITVEELKKLLEQWNLVIGFLFLTWICLLQFAYANRNRFLYIIKLIFLWLLWPVTLACFVLAAVYRINWITGGIAIAMACLVGLMWLSYFIASFRLFARTRSMWSFNPETNILLNVPLHGTILTRPLLESELVIGAVILRGHLRIAGHYLGRCDIKDLPKEITVATSRTLSYYKLGASQRVAGDSGFAAYSRYRIGNYKLNTDHSSSSDNIALLVQ

SEQ ID NO: 15271 - protein, 222 aa, Artificial Sequence
  SARS-CoV-2__MT791885.1__membrane protein (M)
MADSNGTITVEELKKLLEQWNLVIGFLFLTWICLLQFAYANRNRFLYIIKLIFLWLLWPVTLACFVLAAVYRINWITGGIAIAMACLVGLMWLSYFIASFRLFARTRSMWSFNPETNILLNVPLHGTILTRPLLESELVIGAVILRGHLRIAGHHLGLCDIKDLPKEITVATSRTLSYYKLGASQRVAGDSGFAAYSRYRIGNYKLNTDHSSSSDNIALLVQ

SEQ ID NO: 15272 - protein, 222 aa, Artificial Sequence
  SARS-CoV-2__MT759588.1__membrane protein (M)
MADSNGTITVEELKKLLEQWNLVIGFLFLTWICLLQFAYANRNRFLYIIKLIFLWLLWPVTLACFVLAAVYRINWITGGIAIAMACLVGLMWLSYFIASFRLFARTLSMWSFNPETNILLNVPLHGTILTRPLLESELVIGAVILRGHLRIAGHHLGRCDIKDLPKEITVATSRTLSYYKLGASQRVAGDSGFAAYSRYRIGNYKLNTDHSSSSDNIALLVQ

SEQ ID NO: 15273 - protein, 222 aa, Artificial Sequence
  SARS-CoV-2__MT745712.1__membrane protein (M)
MADSNGTITVEELKKLLEQWNLVIGFLFLTWICLLQFAYANRNRFLYIIKLIFLWLLWPVTLACFVLAAVYRINLITGGIAIAMACLVGLMWLSYFIASFRLFARTRSMWSFNPETNILLNVPLHGTILTRPLLESELVIGAVILRGHLRIAGHHLGRCDIKDLPKEITVATSRTLSYYKLGASQRVAGDSGFAAYSRYRIGNYKLNTDHSSSSDNIALLVQ

SEQ ID NO: 15274 - protein, 222 aa, Artificial Sequence
  SARS-CoV-2__MT750032.1__membrane protein (M)
MADSNGTITVEELKKLLEQWNLVIGFLFLTWICLLQFAYANRNRFLYIIKLIFLWLLWPVTLACFVLAAVYRINWITGGIAIAMACLVGLMWLSYFIASFRLFARTRSMWSFNPETNILLNVPLHGTILTRPLLESELVIGAVILRGHLRIAGHHLGRCDIKDLPKEITVATSRTLSYYKLGASQRVAGDSGFAAYSRCRIGNYKLNTDHSSSSDNIALLVQ

SEQ ID NO: 15275 - protein, 222 aa, Artificial Sequence
  SARS-CoV-2__MT750363.1__membrane protein (M)
MADSNGTITVEELKKLLEQWNLVIGFLFLTWICLLQFAYANRNRFLYIIKLIFLWLLWPVTLACFVLAAVYRINWITGGIAIAMACFVGLMWLSYFIASFRLFARTRSMWSFNPETNILLNVPLHGTILTRPLLESELVIGAVILRGHLRIAGHHLGRCDIKDLPKEITVATSRTLSYYKLGASQRVAGDSGFAAYSRYRIGNYKLNTDHSSSSDNIALLVQ

SEQ ID NO: 15276 - protein, 222 aa, Artificial Sequence
  SARS-CoV-2__MT740395.1__membrane protein (M)
MADSNGTITAEELKKLLEQWNLVIGFLFLTWICLLQFAYANRNRFLYIIKLIFLWLLWPVTLACFVLAAVYRINWITGGIAIAMACLVGLMWLSYFIASFRLFARTRSMWSFNPETNILLNVPLHGTILTRPLLESELVIGAVILRGHLRIAGHHLGRCDIKDLPKEITVATSRTLSYYKLGASQRVAGDSGFAAYSRYRIGNYKLNTDHSSSSDNIALLVQ

SEQ ID NO: 15277 - protein, 222 aa, Artificial Sequence
  SARS-CoV-2__MT731744.1__membrane protein (M)
MADFNGTITVEELKKLLEQWNLVIGFLFLTWICLLQFAYANRNRFLYIIKLIFLWLLWPVTLACFVLAAVYRINWITGGIAIAMACLVGLMWLSYFIASFRLFARTRSMWSFNPETNILLNVPLHGTILTRPLLESELVIGAVILRGHLRIAGHHLGRCDIKDLPKEITVATSRTLSYYKLGASQRVAGDSGFAAYSRYRIGNYKLNTDHSSSSDNIALLVQ

SEQ ID NO: 15278 - protein, 222 aa, Artificial Sequence
  SARS-CoV-2__MT706390.1__membrane protein (M)
MADSNGTITVEELKKLLEQWNLVIGFLFLTWICLLQFAYANRNRFLYIIKLIFLWLLWPVTLACFVLAAVYRINWITGGIAIAMACLVGLMWLSYFIASFRLFARTRSMWSFNPETNILLNVPLHGTIVTRPLLESELVIGAVILRGHLRIAGHHLGRCDIKDLPKEITVATSRTLSYYKLGASQRVAGDSGFAAYSRYRIGNYKLNTDHSSSSDNIALLVQ

SEQ ID NO: 15279 - protein, 222 aa, Artificial Sequence
  SARS-CoV-2__MT655135.1__membrane protein (M)
MADSNGTITVEELKKLLEQWNLVIGFLFLTWICLLQFAYANRNRFLYIIKLIFLWLLWPVTLTCFVLAAVYRINWITGGIAIAMACLVGLMWLSYFIASFRLFARTRSMWSFNPETNILLNVPLHGTILTRPLLESELVIGAVILRGHLRIAGHHLGRCDIKDLPKEITVATSRTLSYYKLGASQRVAGDSGFAAYSRYRIGNYKLNTDHSSSSDNIALLVQ

SEQ ID NO: 15280 - protein, 222 aa, Artificial Sequence
  SARS-CoV-2__MT641735.1__membrane protein (M)
MADSNGTITVEELKKLLEQWNLVIGFLFLTWICLLQFAYANRNRFFYIIKLIFLWLLWPVTLACFVLAAVYRINWITGGIAIAMACLVGLMWLSYFIASFRLFARTRSMWSFNPETNILLNVPLHGTILTRPLLESELVIGAVILRGHLRIAGHHLGRCDIKDLPKEITVATSRTLSYYKLGASQRVAGDSGFAAYSRYRIGNYKLNTDHSSSSDNIALLVQ

SEQ ID NO: 15281 - protein, 222 aa, Artificial Sequence
  SARS-CoV-2__MT641744.1__membrane protein (M)
MADSNGTITVEELKKLLEQWNLVIGFLFLTWICLLQFAYANRNRFLYIIKLIFLWLLWPVTLACFVLAAVYRINWITGGIAIAMACLVGLMWLSYFIASFRLFARTRSMWSFNPETNILLNVPLHGTILTRPLLESELVIGAVILHGHLRIAGHHLGRCDIKDLPKEITVATSRTLSYYKLGASQRVAGDSGFAAYSRYRIGNYKLNTDHSSSSDNIALLVQ

SEQ ID NO: 15282 - protein, 222 aa, Artificial Sequence
  SARS-CoV-2__MT642078.1__membrane protein (M)
MADSNGTITVEELKKLLEQWNLVIGFLFLTWICLLQFAYANRNRFLYIIKLIFLWLLWPVTLAFFVLAAVYRINWITGGIAIAMACLVGLMWLSYFIASFRLFARTRSMWSFNPETNILLNVPLHGTILTRPLLESELVIGAVILRGHLRIAGHHLGRCDIKDLPKEITVATSRTLSYYKLGASQRVAGDSGFAAYSRYRIGNYKLNTDHSSSSDNIALLVQ

SEQ ID NO: 15283 - protein, 222 aa, Artificial Sequence
  SARS-CoV-2__MT627217.1__membrane protein (M)
MADSNGTITVEELKKLLEQWNLVIVFLFLTWICLLQFAYANRNRFLYIIKLIFLWLLWPVTLACFVLAAVYRINWITGGIAIAMACLVGLMWLSYFIASFRLFARTRSMWSFNPETNILLNVPLHGTILTRPLLESELVIGAVILRGHLRIAGHHLGRCDIKDLPKEITVATSRTLSYYKLGASQRVAGDSGFAAYSRYRIGNYKLNTDHSSSSDNIALLVQ

SEQ ID NO: 15284 - protein, 222 aa, Artificial Sequence
  SARS-CoV-2__MT627751.1__membrane protein (M)
MADSNGTITVEELKKLLEQWNLVIGFLFLTWICLLQFAYANRNRFLYIIKLIFLWLLWPVTLACFVLAAIYRINWITGGIAIAMACLVGLMWLSYFIASFRLFARTRSMWSFNPETNILLNVPLHGTILTRPLLESELVIGAVILRGHLRIAGHHLGRCDIKDLPKEITVATSRTLSYYKLGASQRVAGDSGFAAYSRYRIGNYKLNTDHSSSSDNIALLVQ

SEQ ID NO: 15285 - protein, 197 aa, Artificial Sequence
  SARS-CoV-2__MT632615.1__membrane protein (M)
FLFLTWICLLQFAYANRNRFLYIIKLIFLWLLWPVTLACFVLAAVYRINWITGGIAIAMACLVGLMWLSYFIASFRLFARTRSMWSFNPETNILLNVPLHGTILTRPLLESELVIGAVILRGHLRIAGHHLGRCDIKDLPKEITVATSRTLSYYKLGASQRVAGDSGFAAYSRYRIGNYKLNTDHSSSSDNIALLVQ

SEQ ID NO: 15286 - protein, 222 aa, Artificial Sequence
  SARS-CoV-2__MT568645.1__membrane protein (M)
MADSNGTITVEEFKKLLEQWNLVIGFLFLTWICLLQFAYANRNRFLYIIKLIFLWLLWPVTLACFVLAAVYRINWITGGIAIAMACLVGLMWLSYFIASFRLFARTRSMWSFNPETNILLNVPLHGTILTRPLLESELVIGAVILRGHLRIAGHHLGRCDIKDLPKEITVATSRTLSYYKLGASQRVAGDSGFAAYSRYRIGNYKLNTDHSSSSDNIALLVQ

SEQ ID NO: 15287 - protein, 222 aa, Artificial Sequence
  SARS-CoV-2__MT520347.1__membrane protein (M)
MADSNGTITVEELKKLLEQWNLVIGFLFLTWICLLQFAYANRNRFLYIIKLIFLWLLWPVTLACFVLAAVYRINWITGGIAIAMACLVSLMWLSYFIASFRLFARTRSMWSFNPETNILLNVPLHGTILTRPLLESELVIGAVILRGHLRIAGHHLGRCDIKDLPKEITVATSRTLSYYKLGASQRVAGDSGFAAYSRYRIGNYKLNTDHSSSSDNIALLVQ

SEQ ID NO: 15288 - protein, 222 aa, Artificial Sequence
  SARS-CoV-2__MT520458.1__membrane protein (M)
MADSNGTITVEELKKLLEQWNLVIGFLFLTWICLLQFAYANRNRFLYIIKLIFLWLLWPVTLACFVLAAVYRINWITGGIAIAMACLVGLMWLSYFIASFRLFARTRSMWSFNPETNILLNVPLHGTILTRSLLESELVIGAVILRGHLRIAGHHLGRCDIKDLPKEITVATSRTLSYYKLGASQRVAGDSGFAAYSRYRIGNYKLNTDHSSSSDNIALLVQ

SEQ ID NO: 15289 - protein, 222 aa, Artificial Sequence
  SARS-CoV-2__MT558681.1__membrane protein (M)
MADSNGTITVEELKKLLEQWNLVIGFLFLTWICLLQFAYANRNRFLYIIKLIFLWLLWPVTLACFVLAAVYRINWITGGIAIAMACLVGLMWLSYFIASFRLFARTRSMWSFNPETNILLNVPLHGTILTRPLLESELVIGAVIFRGHLRIAGHHLGRCDIKDLPKEITVATSRTLSYYKLGASQRVAGDSGFAAYSRYRIGNYKLNTDHSSSSDNIALLVQ

SEQ ID NO: 15290 - protein, 222 aa, Artificial Sequence
  SARS-CoV-2__MT507282.1__membrane protein (M)
MADSNGTITVEELKKLLEQWNLVIGFLFLTWICLLQFAYANRNRFLYIIKLIFLWLLWPVTLACFVLAAVYRINWITGGIAIAMACLVGLMWLSYFIASFRLFARTRSMWSFNPETNILLNVPLHGTILTRPLLESEIVIGAVILRGHLRIAGHHLGRCDIKDLPKEITVATSRTLSYYKLGASQRVAGDSGFAAYSRYRIGNYKLNTDHSSSSDNIALLVQ

SEQ ID NO: 15291 - protein, 222 aa, Artificial Sequence
  SARS-CoV-2__MT477859.1__membrane protein (M)
MADSNGTITVEELKKLLEQWNLVIGFLFLTWICLLQFAYANRNRFLYIIKLIFLWLLWPVTLACFVLAAVYRINWITGGIAIAMACLVGLMWLSYFIASFRLFARTRSMWSFNPETNILLNVPFHGTILTRPLLESELVIGAVILRGHLRIAGHHLGRCDIKDLPKEITVATSRTLSYYKLGASQRVAGDSGFAAYSRYRIGNYKLNTDHSSSSDNIALLVQ

SEQ ID NO: 15292 - protein, 222 aa, Artificial Sequence
  SARS-CoV-2__MT470125.1__membrane protein (M)
MADSNGTITVEELKKLLEQWNLVIGFLFLTWICLLQFAYANRNRFLYIIKLIFLWLLWPVTLACFVLAVVYRINWITGGIAIAMACLVGLMWLSYFIASFRLFARTRSMWSFNPETNILLNVPLHGTILTRPLLESELVIGAVILRGHLRIAGHHLGRCDIKDLPKEITVATSRTLSYYKLGASQRVAGDSGFAAYSRYRIGNYKLNTDHSSSSDNIALLVQ

SEQ ID NO: 15293 - protein, 222 aa, Artificial Sequence
  SARS-CoV-2__MT451051.1__membrane protein (M)
MADSNGTITVEELKKLLEQWNLVIGFLFLTWICLLQFAYANRNRFLYIIKLIFLWLLWPVTLACFVLAAVYRINWITGGIAIAMACLVGLMWLSYFIASFRLFARTRSMWSFNPETNILLNVPLHGTILTRPLLESELVIGAVILRGHLRIAGHHLGRCDIKDLPKEITVATSRTLSYYKLGASQRVAGDSGFAAYSRYRIGNYKLNTDHSSSIDNIALLVQ

SEQ ID NO: 15294 - protein, 222 aa, Artificial Sequence
  SARS-CoV-2__MT429186.1__membrane protein (M)
MADSNGTITVEELKKLLEQWNLVIGFLFLTWICLLQFSYANRNRFLYIIKLIFLWLLWPVTLACFVLAAVYRINWITGGIAIAMACLVGLMWLSYFIASFRLFARTRSMWSFNPETNILLNVPLHGTILTRPLLESELVIGAVILRGHLRIAGHHLGRCDIKDLPKEITVATSRTLSYYKLGASQRVAGDSGFAAYSRYRIGNYKLNTDHSSSSDNIALLVQ

SEQ ID NO: 15295 - protein, 222 aa, Artificial Sequence
  SARS-CoV-2__MT358656.1__membrane protein (M)
MADSNGTITVEELKKLLEQWNLVIGFLFLTWICLLQFAYANRNRFLYIIKLIFLWLLWPVTLACFVLAAVYRINWITGGIAIAMACLVGLMWLSYFIASFRLFARTRSMWSFNPETNILLNVPLHGTILTRPLLESELVIGAVILRGHLRIAGHHLGRCDIKDLPKEITVATSRTLSYYKLGASQRVAGNSGFAAYSRYRIGNYKLNTDHSSSSDNIALLVQ

SEQ ID NO: 15296 - protein, 413 aa, Artificial Sequence
  MERS-CoV/MERS-CoV-Jeddah-human-1__KF958702.1__nucleocapsid protein (N)
MASPAAPRAVSFADNNDITNTNLSRGRGRNPKPRAAPNNTVSWYTGLTQHGKVPLTFPPGQGVPLNANSTPAQNAGYWRRQDRKINTGNGIKQLAPRWYFYYTGTGPEAALPFRAVKDGIVWVHEDGATDAPSTFGTRNPNNDSAIVTQFAPGTKLPKNFHIEGTGGNSQSSSRASSVSRNSSRSSSQGSRSGNSTRGTSPGPSGIGAVGGDLLYLDLLNRLQALESGKVKQSQPKVITKKDAAAAKNKMRHKRTSTKSFNMVQAFGLRGPGDLQGNFGDLQLNKLGTEDPRWPQIAELAPTASAFMGMSQFKLTHQNNDDHGNPVYFLRYSGAIKLDPKNPNYNKWLELLEQNIDAYKTFPKKEKKQKAPKEESTDQMSEPPKEQRVQGSITQRTRTRPSVQPGPMIDVNTD

SEQ ID NO: 15297 - protein, 413 aa, Artificial Sequence; identical to SEQ ID NO: 15296
  MERS-CoV/Al-Hasa_4_2013__KF186564.1__nucleocapsid protein (N)

SEQ ID NO: 15298 - protein, 413 aa, Artificial Sequence; identical to SEQ ID NO: 15296
  MERS-CoV/Riyadh_14_2013__KJ156934.1__nucleocapsid protein (N)

SEQ ID NO: 15299 - protein, 411 aa, Artificial Sequence [sequence omitted]

SEQ ID NO: 15300 - protein, 422 aa, Artificial Sequence
  SARS-CoV/Tor2__NC_004718.3__nucleocapsid protein (N)
MSDNGPQSNQRSAPRITFGGPTDSTDNNQNGGRNGARPKQRRPQGLPNNTASWFTALTQHGKEELRFPRGQGVPINTNSGPDDQIGYYRRATRRVRGGDGKMKELSPRWYFYYLGTGPEASLPYGANKEGIVWVATEGALNTPKDHIGTRNPNNNAATVLQLPQGTTLPKGFYAEGSRGGSQASSRSSSRSRGNSRNSTPGSSRGNSPARMASGGGETALALLLLDRLNQLESKVSGKGQQQQGQTVTKKSAAEASKKPRQKRTATKQYNVTQAFGRRGPEQTQGNFGDQDLIRQGTDYKHWPQIAQFAPSASAFFGMSRIGMEVTPSGTWLTYHGAIKLDDKDPQFKDNVILLNKHIDAYKTFPPTEPKKDKKKKTDEAQPLPQRQKKQPTVTLLPAADMDDFSRQLQNSMSGASADSTQA

SEQ ID NO: 15301 - protein, 448 aa, Artificial Sequence
  HCoV/OC43__NC_006213.1__nucleocapsid protein (N)
MSFTPGKQSSSRASSGNRSGNGILKWADQSDQFRNVQTRGRRAQPKQTATSQQPSGGNVVPYYSWFSGITQFQKGKEFEFVEGQGVPIAPGVPATEAKGYWYRHNRRSFKTADGNQRQLLPRWYFYYLGTGPHAKDQYGTDIDGVYWVASNQADVNTPADIVDRDPSSDEAIPTRFPPGTVLPQGYYIEGSGRSAPNSRSTSRTSSRASSAGSRSRANSGNRTPTSGVTPDMADQIASLVLAKLGKDATKPQQVTKHTAKEVRQKILNKPRQKRSPNKQCTVQQCFGKRGPNQNFGGGEMLKLGTSDPQFPILAELAPTAGAFFFGSRLELAKVQNLSGNPDEPQKDVYELRYNGAIRFDSTLSGFETIMKVLNENLNAYQQQDGMMNMSPKPQRQRGHKNGQGENDNISVAVPKSRVQQNKSRELTAEDISLLKKMDEPYTEDTSEI

SEQ ID NO: 15302 - protein, 441 aa, Artificial Sequence
  HCoV/HKU1__NC_006577.2__nucleocapsid protein (N)
MSYTPGHYAGSRSSSGNRSGILKKTSWADQSERNYQTFNRGRKTQPKFTVSTQPQGNTIPHYSWFSGITQFQKGRDFKFSDGQGVPIAFGVPPSEAKGYWYRHSRRSFKTADGQQKQLLPRWYFYYLGTGPYANASYGESLEGVFWVANHQADTSTPSDVSSRDPTTQEAIPTRFPPGTILPQGYYVEGSGRSASNSRPGSRSQSRGPNNRSLSRSNSNFRHSDSIVKPDMADEIANLVLAKLGKDSKPQQVTKQNAKEIRHKILTKPRQKRTPNKHCNVQQCFGKRGPSQNFGNAEMLKLGTNDPQFPILAELAPTPGAFFFGSKLDLVKRDSEADSPVKDVFELHYSGSIRFDSTLPGFETIMKVLEENLNAYVNSNQNTDSDSLSSKPQRKRGVKQLPEQFDSLNLSAGTQHISNDFTPEDHSLLATLDDPYVEDSVA

SEQ ID NO: 15303 - protein, 389 aa, Artificial Sequence
  HCoV/229E/BN1/GER/2015__KU291448.1__nucleocapsid protein (N)
MATVKWADASEPQRGRQGRIPYSLYSPLLVDSEQPWKVIPRNLVPVNKKDKNKLIGYWNVQKRFRTRKGKRVDLSPKLHFYYLGTGPHKDAKFRERVEGVVWVAVDGAKTEPTGYGVRRKNSEPEIPHFNQKLPNGVTVAEEPDSRAPSRSQSRSQSRSRGESKSQSRNPSSDRNHNSQDDIMKAVAAALKSLGFDKPQEKDKKSAKTGTPKPSRNQSPASSQSAAKILARSQSSETKEQKHEMQKPRWKRQPNDDVTSNVTQCFGPRDLDHNFGSAGVVANGVKAKGYPQFAELVPSTAAMLFDSHIVSKESGNTVVLTFTTRVTVPKDHPHLGKFLEELNAFTREMQQQPLLNPSALEFNPSQTSPATVEPVRDEVSIETDIIDEVN

SEQ ID NO: 15304 - protein, 377 aa, Artificial Sequence
  HCoV/NL63/RPTEC/2004__JX504050.1__nucleocapsid protein (N)
MASVNWADDRAARKKFPPPSFYMPLLVSSDKAPYRVIPRNLVPIGKGNKDEQIGYWNVQERWRMRRGQRVDLPPKVHFYYLGTGPHKDLKFRQRSDGVVWVAKEGAKTVNTSLGNRKRNQKPLEPKFSIALPPELSVVEFEDRSNNSSRASSRSSTRNNSRDSSRSTSRQQSRTRSDSNQSSSDLVAAVTLALKNLGFDNQSKSPSSSGTSTPKKPNKPLSQPRADKPSQLKKPRWKRVPTREENVIQCFGPRDFNHNMGDSDLVQNGVDAKGFPQLAELIPNQAALFFDSEVSTDEVGDNVQITYTYKMLVAKDNKNLPKFIEQISAFTKPSSIKEMQSQSSHVAQNTVLNASIPESKPLADDDSAIIEIVNEVLH

SEQ ID NO: 15305 - protein, 422 aa, Artificial Sequence
  Bat SARS-like CoV/WIV1__KF367457.1__nucleocapsid protein (N)
MSDNGPQSNQRSAPRITFGGPTDSTDNNQNGGRNGARPKQRRPQGLPNNTASWFTALTQHGKEELRFPRGQGVPINTNSGPDDQIGYYRRATRRVRGGDGKMKELSPRWYFYYLGTGPEASLPYGANKEGIVWVATEGALNTPKDHIGTRNPNNNAATVLQLPQGTTLPKGFYAEGSRGGSQASSRSSSRSRGNSRNSTPGSSRGNSPARMASGGGETALALLLLDRLNQLESKVSGKGQQQQGQTVTKKSAAEASRKPRQKRTATKQYNVTQAFGRRGPEQTQGNFGDQDLIRQGTDYKHWPQIAQFAPSASAFFGMSRIGMEVTPSGTWLTYHGAIKLDDKDPQFKDNVILLNKHIDAYKTFPPTEPKKDKKKKTDEAQPLPQRQKKQPTVTLLPAADMDDFSRQLQNSMSGASADSTQA

SEQ ID NO: 15306 - protein, 468 aa, Artificial Sequence
  BatCoV/HKU9-1 BF_005I__NC_009021.1__nucleocapsid protein (N)
MSGRNRSRSGTPSPKVTFKQESDGSDSESERRNGNRNGARPKNNNSRGSAPKPEKPKAAPPQNVSWFAPLVQTGKAELRFPRGEGVPVSQGVDSTYEHGYWLRTQRSFQKGGKQVLANPRWYFYYTGTGRFGDLRFGTKNPDIVWVGQEGANINRLGDMGTRNPSNDGAIPVQLAGGIPKGFYAEGRGSRGNSRSSSRNSSRASSRGNSRASSRGASPGRPAANPSTEPWMAYLVQKLERLESQVSGTKPATKNPVQVTKNEAAANAKKLRHKRTAHKGSGVTVNYGRRGPGDLEGNFGDREMIKLGTDDPRFAAAAQMAPNVSSFLFMSHLSTRDEDDALWLHYKGAIKLPKDDPNYEQWTKILAENLNAYKDFPPTEPKKDKKKKEETAQDTVIFEDASTGTDQTVVKVWVKDQDAQTDDEWLGGDETVYEDEDDRPKTQRRHKKRGSTASRVTIADPTNAGAERS

SEQ ID NO: 15307 - protein, 342 aa, Artificial Sequence
  PDCoV/Swine/Thailand/S5011/2015__KU051641.1__nucleocapsid protein (N)
MAAPVVPTTDASWFQVLKAQNKKATHPQFRGNGVPLNSAIKPAENHGYWLRYTRQKPGGTPIPPSYAFYYTGTGPRGNLKYGELPPNDTPATTRVTWVKGSGADTSIKPHVAKRNPNNPKHQLLPLRFPTGDGPAQGFRVDPFNARGRPQERGSGPRSQSVNPRGTGNQPRKRDQSAPAAVRRKTQHQAPKRTLPKGKTISQVFGNRSRTGANVGSADTEKTGMADPRIMALARHVPGVQEMLFAGHLESNFQAGAITLTFSYSMTVKEGSPDYERLKDALNTVVNQTYEPPTKPTKDKKPDKQDQSAKPKQQKKPKKVTLPADKQDWEWDDAFEIKQESAA

SEQ ID NO: 15308 - protein, 441 aa, Artificial Sequence
  PEDV/NPL-PEDv/2013/P10__KJ778616.1__nucleocapsid protein (N)
MASVSFQDRGRKRVPLSLYAPLRVTNDKPLSKVLANNAVPTNKGNKDQQIGYWNEQIRWRMRRGERIEQPSNWHFYYLGTGPHADLRYRTRTEGVFWVAKEGAKTEPTNLGVRKASEKPIIPNFSQQLPSVVEIVEPNTPPTSRANSRSRSRGNGNNRSRSPSNNRGNNQSRGNSQNRGNNQGRGASQNRGGNNNNNNKSRNQSKNRNQSNDRGGVTSRDDLVAAVKDALKSLGIGENPDKLKQQQKPKQERSDSSGKNTPKKNKSRATSKERDLKDIPEWRRIPKGENSVAACFGPRGGFKNFGDAEFVEKGVDASGYAQIASLAPNVAALLFGGNVAVRELADSYEITYNYKMTVPKSDPNVELLVSQVDAFKTGNAKPQRKKEKKNKRETTQQLNEEAIYDDVGVPSDVTHANLEWDTAVDGGDTAVEIINEIFDTGN

SEQ ID NO: 15309 - protein, 454 aa, Artificial Sequence
  MHV/A59__NC_048217.1__nucleocapsid protein (N)
MSFVPGQENAGGRSSSVNRAGNGILKKTTWADQTERGPNNQNRGRRNQPKQTATTQPNSGSVVPHYSWFSGITQFQKGKEFQFAEGQGVPIANGIPASEQKGYWYRHNRRSFKTPDGQQKQLLPRWYFYYLGTGPHAGASYGDSIEGVFWVANSQADTNTRSDIVERDPSSHEAIPTRFAPGTVLPQGFYVEGSGRSAPASRSGSRSQSRGPNNRARSSSNQRQPASTVKPDMAEEIAALVLAKLGKDAGQPKQVTKQSAKEVRQKILNKPRQKRTPNKQCPVQQCFGKRGPNQNFGGSEMLKLGTSDPQFPILAELAPTVGAFFFGSKLELVKKNSGGADEPTKDVYELQYSGAVRFDSTLPGFETIMKVLNENLNAYQKDGGADVVSPKPQRKGRRQAQEKKDEVDNVSVAKPKSSVQRNVSRELTPEDRSLLAQILDDGVVPDGLEDDSNV

SEQ ID NO: 15310 - protein, 419 aa, Artificial Sequence
  SARS-CoV-2/Wuhan-Hu-1__NC_045512.2/MN908947.2/EPI_ISL_402128__nuc leocapsid protein (N)
MSDNGPQNQRNAPRITFGGPSDSTGSNQNGERSGARSKQRRPQGLPNNTASWFTALTQHGKEDLKFPRGQGVPINTNSSPDDQIGYYRRATRRIRGGDGKMKDLSPRWYFYYLGTGPEAGLPYGANKDGIIWVATEGALNTPKDHIGTRNPANNAAIVLQLPQGTTLPKGFYAEGSRGGSQASSRSSSRSRNSSRNSTPGSSRGTSPARMAGNGGDAALALLLLDRLNQLESKMSGKGQQQQGQTVTKKSAAEASKKPRQKRTATKAYNVTQAFGRRGPEQTQGNFGDQELIRQGTDYKHWPQIAQFAPSASAFFGMSRIGMEVTPSGTWLTYTGAIKLDDKDPNFKDQVILLNKHIDAYKTFPPTEPKKDKKKKADETQALPQRQKKQQTVTLLPAADLDDFSKQLQQSMSSADSTQA

SEQ ID NO: 15311 - protein, 419 aa, Artificial Sequence
  SARS-CoV-2__MT919525.1__nucleocapsid protein (N)
MSDNGPQNQRNAPRITFGGPSDSTGSNQNGERSGARSKQRRPQGLPNNTASWFTALTQHGKEDLKFPRGQGVPINTNSSPDDQIGYYRRATRRIRGGDGKMKDLSPRWYFYYLGTGPEAGLPYGANKDGIIWVATEGALNTPKDHIGTRNPANNAAIVLQLPQGTTLPKGFYAEGSRGGSQASSRSSSRSRNSSRNSTPGSSKRTSPARMAGNGGDAALALLLLDRLNQLESKMSGKGQQQQGQTVTKKSAAEASKKPRQKRTATKAYNVTQAFGRRGPEQTQGNFGDQELIRQGTDYKHWPQIAQFAPSASAFFGMSRIGMEVTPSGTWLTYTGAIKLDDKDPNFKDQVILLNKHIDAYKTFPPTEPKKDKKKKADETQALPQRQKKQQTVTLLPAADLDDFSKQLQQSMSSADSTQA

SEQ ID NO: 15312 - protein, 419 aa, Artificial Sequence
  SARS-CoV-2__MT919768.1__nucleocapsid protein (N)
MSDNGPQNQRNALRITFGGPSDSTGSNQNGERSGARSKQRRPQGLPNNTASWFTALTQHGKEDLKFPRGQGVPINTNSSPDDQIGYYRRATRRIRGGDGKMKDLSPRWYFYYLGTGPEAGLPYGANKDGIIWVATEGALNTPKDHIGTRNPANNAAIVLQLPQGTTLPKGFYAEGSRGGSQASSRSSSRSRNSSRNSTPGSSRGTSPARMAGNGGDAALALLLLDRLNQLESKMSGKGQQQQGQTVTKKSAAEASKKPRQKRTATKAYNVTQAFGRRGPEQTQGNFGDQELIRQGTDYKHWPQIAQFAPSASAFFGMSRIGMEVTPSGTWLTYTGAIKLDDKDPNFKDQVILLNKHIDAYKTFPPTEPKKDKKKKADETQALPQRQKKQQTVTLLPAADLDDFSKQLQQSMSSADSTQA

SEQ ID NO: 15313 - protein, 419 aa, Artificial Sequence
  SARS-CoV-2__MT919770.1__nucleocapsid protein (N)
MSDNGPQNQRNAPRITFGGPSDSTGSNQNGERSGARSKQRRPQGLPNNTASWFTALTQHGKEDLKFPRGQGVPINTNSSPDDQIGYYRRATRRIRGGDGKMKDLSPRWYFYYLGTGPEAGLPYGANKDGIIWVATEGALNTPKDHIGTRNPANNAAIVLQLPQGTTLPKGFYAEGSRGGSQASSRSSSRSRNSSRNSTPGSSKRTSPARMAVNGGDAALALLLLDRLNQLESKMSGKGQQQQGQTVTKKSAAEASKKPRQKRTATKAYNVTQAFGRRGPEQTQGNFGDQELIRQGTDYKHWPQIAQFAPSASAFFGMSRIGMEVTPSGTWLTYTGAIKLDDKDPNFKDQVILLNKHIDAYKTFPPTEPKKDKKKKADETQALPQRQKKQQTVTLLPAADLDDFSKQLQQSMSSADSTQA

SEQ ID NO: 15314 - protein, 412 aa, Artificial Sequence
  SARS-CoV-2__MT919777.1__nucleocapsid protein (N)
MSDNGPQNQRNGPRITFGGPSDSTGSNQNGERSGARSKQRRPQGLPNNTASWFTALTQHGKEDLKFPRGQGVPINTNSSPDDQIGYYRRATRRIRGGDGKMKDLSPRWYFYYLGTGPEAGLPYGANKDGIIWVATEGALNTPKDHIGTRNPANNAAIVLQLPQGTTLPKGFYAEGSRGGSQASSRSSSRSRNSSRNSTPGSSKRTYGGDAALALLLLDRLNQLESKMSGKGQQQQGQTVTKKSAAEASKKPRQKRTATKAYNVTQAFGRRGPEQTQGNFGDQELIRQGTDYKHWPQIAQFAPSASAFFGMSRIGMEVTPSGTWLTYTGAIKLDDKDPNFKDQVILLNKHIDAYKTFPPTEPKKDKKKKADETQALPQRQKKQQTVTLLPAADLDDFSKQLQQSMSSADSTQA

SEQ ID NO: 15315 - protein, 419 aa, Artificial Sequence
  SARS-CoV-2__MT919782.1__nucleocapsid protein (N)
MSDNGPQNQRNAPRITFGGPSDSTGSNQNGERSGARSKQRRPQGLPNNTASWFTALTQHGKEDLKFPRGQGVPINTNSSPDDQIGYYRRATRRIRGGDGKMKDLSPRWYFYYLGTGPEAGLPYGANKDGIIWVATEGALNTPKDHIGTRNPANNAAIVLQLPQGTTLPKGFYAEGSRGGSQASSRSSSRSRNSSRNSTPGSSKRTSPAIMAGNGGDAALALLLLDRLNQLESKMSGKGQQQQGQTVTKKSAAEASKKPRQKRTATKAYNVTQAFGRRGPEQTQGNFGDQELIRQGTDYKHWPQIAQFAPSASAFFGMSRIGMEVTPSGTWLTYTGAIKLDDKDPNFKDQVILLNKHIDAYKTFPPTEPKKDKKKKADETQALPQRQKKQQTVTLLPAADLDDFSKQLQQSMSSADSTQA

SEQ ID NO: 15316 - protein, 419 aa, Artificial Sequence
  SARS-CoV-2__MT919994.1__nucleocapsid protein (N)
MSDNGPQNQRNATRITFGGPSDSTGSNQNGERSGARSKQRRPQGLPNNTASWFTALTQHGKEDLKFPRGQGVPINTNSSPDDQIGYYRRATRRIRGGDGKMKDLSPRWYFYYLGTGPEAGLPYGANKDGIIWVATEGALNTPKDHIGTRNPANNAAIVLQLPQGTTLPKGFYAEGSRGGIQASSRSSSRSRNSSRNSTPGSSRGTSPARMAGNGGDAALALLLLDRLNQLESKMSGKGQQQQGQTVTKKSAAEASKKPRQKRTATKAYNVTQAFGRRGPEQTQGNFGDQELIRQGTDYKHWPQIAQFAPSASAFFGMSRIGMEVTPSGTWLTYTGAIKLDDKDPNFKDQVILLNKHIDAYKTFPPTEPKKDKKKKADETQALPQRQKKQQTVTLLPAADLDDFSKQLQQSMSSADSTQA

SEQ ID NO: 15317 - protein, 419 aa, Artificial Sequence
  SARS-CoV-2__MT919995.1__nucleocapsid protein (N)
MSDNGPQNQRNAPRITFGGPSDSTGSNQNGERSGARSKQRRPQGLPNNTASWFTALTQHGKEDLKFPRGQGVPINTNSSPDDQIGYYRRATRRIRGGDGKMKDLSPRWYFYYLGTGPEAGLPYGANKDGIIWVATEGALNTPKDHIGTRNPANNAAIVLQLPQGTTLPKGFYAEGSRGGSQASFRSSSRSRNSSRNSTPGSSRGTSPARMAGNGGDAALALLLLDRLNQLESKMSGKGQQQQGQTVTKKSAAEASKKPRQKRTATKAYNVTQAFGRRGPEQTQGNFGDQELIRQGTDYKHWPQIAQFAPSASAFFGMSRIGMEVTPSGTWLTYTGAIKLDDKDPNFKDQVILLNKHIDAYKTFPPTEPKKDKKKKADETQALPQRQKKQQTVTLLPAADLDDFSKQLQQSMSSADSTQA

SEQ ID NO: 15318 - protein, 419 aa, Artificial Sequence
  SARS-CoV-2__MT920005.1__nucleocapsid protein (N)
MSDNGPQNQRNAPRITFGGPSDSTGSNQNGERSGARSKQRRPQGLPNNTASWFTALTQHGKEDLKFPRGQGVPINTNSSPDDQIGYYRRATRRIRGGDGKMKDLSPRWYFYYLGTGPEAGLPYGANKDGIIWVATEGALNTPKDHIGTRNPANNAAIVLQLPQGTTLPKGFYAEGSRGGIQASSRSSSRSRNSSRNSTPGSSRGTSPARMAGNGGDAALALLLLDRLNQLESKMSGKCQQQQGQTVTKKSAAEASKKPRQKRTATKAYNVTQAFGRRGPEQTQGNFGDQELIRQGTDYKHWPQIAQFAPSASAFFGMSRIGMEVTPSGTWLTYTGAIKLDDKDPNFKDQVILLNKHIDAYKTFPPTEPKKDKKKKADETQALPQRQKKQQTVTLLPAADLDDFSKQLQQSMSSADSTQA

SEQ ID NO: 15319 - protein, 419 aa, Artificial Sequence
  SARS-CoV-2__MT913038.1__nucleocapsid protein (N)
MSDNGPQNQRNAPRITFGGPSDSTGSNQNGERSGARSKQRRPQGLPNNTASWFTALTQHGKEDLKFPRGQGVPINTNSSPDDQIGYYRRATRRIRGGDGKMKDLSPRWYFYYLGTGPEAGLPYGANKDGIIWVATEGALNTPKDHIGTRNPANNAAIVLQLPQGTTLPKGFYAEGSRGGSQAYSRSSSRSRNSSRNSTPGSSRGTSPARMAGNGGDAALALLLLDRLNQLESKMSGKGQQQQGQTVTKKSAAEASKKPRQKRTATKAYNVTQAFGRRGPEQTQGNFGDQELIRQGTDYKHWPQIAQFAPSASAFFGMSRIGMEVTPSGTWLTYTGAIKLDDKDPNFKDQVILLNKHIDAYKTFPPTEPKKDKKKKADETQALPQRQKKQQTVTLLPAADLDDFSKQLQQSMSSADSTQA

SEQ ID NO: 15320 - protein, 419 aa, Artificial Sequence
  SARS-CoV-2__MT913055.1__nucleocapsid protein (N)
MSDNGPQNQRNAPRITFGGPSDSTGSNQNGERSGARSKQRRPQGLPNNTASWFTALTQHGKEDLKFPRGQGVPINTNSSPDDQIGYYRRATRRIRGGDGKMKDLSPRWYFYYLGTGPEAGLPYGANKDGIIWVATEGALNTPKDHIGTRNPANNAAIVLQLPQGTTLPKGFYAEGSRGGSQASSRSSSRSRNSSRNSTPGSSRGTSPARMAGNGGDAALALLLLDRLNQLEIKMSGKGQQQQGQTVTKKSAAEASKKPRQKRTATKAYNVTQAFGRRGPEQTQGNFGDQELIRQGTDYKHWPQIAQFAPSASAFFGMSRIGMEVTPSGTWLTYTGAIKLDDKDPNFKDQVILLNKHIDAYKTFPPTEPKKDKKKKADETQALPQRQKKQQTVTLLPAADLDDFSKQLQQSMSSADSTQA

SEQ ID NO: 15321 - protein, 419 aa, Artificial Sequence
  SARS-CoV-2__MT913093.1__nucleocapsid protein (N)
MSDNGPQNQRNAPRITFGGPSDSTGSNQNGERSGARSKQRRPQGLPNNTASWFTALTQHGKEDLKFPRGQGVPINTNSSPDDQIGYYRRATRRIRGGDGKMKDLSPRWYFYYLGTGPEAGLPYGANKDGIIWVATEGALNTPKDHIGTRNPANNAAIVLQLPQGTTLPKGFYAEGSRGGSQASSRSSSRSRNSSRNSTPGSSRGTSPGRMAGNGGDAALALLLLDRLNQLESKMSGKGQQQQGQTVTKKSAAEASKKPRQKRTATKAYNVTQAFGRRGPEQTQGNFGDQELIRQGTDYKHWPQIAQFAPSASAFFGMSRIGMEVTPSGTWLTYTGAIKLDDKDPNFKDQVILLNKHIDAYKTFPPTEPKKDKKKKADETQALPQRQKKQQTVTLLPAADLDDFSKQLQQSMSSADSTQA

SEQ ID NO: 15322 - protein, 419 aa, Artificial Sequence
  SARS-CoV-2__MT913104.1__nucleocapsid protein (N)
MSDNGPQNQRNAPRITFGGPSDSTGSNQNGERSGARSKQRRPQGLPNNTASWFTALTQHGKEDLKFPRGQGVPINTNSSPDDQIGYYRRATRRIRGGDGKMKDLSPRWYFYYLGTGPEAGLPYGANKDGIIWVATEGALNTPKDHIGTRNPANNAAIVLQLPQGTTLPKGFYAEGSRGGSQASSRSSSRSRNSSRNSTPGSSRGISPARMAGNGGDAALALLLLDRLNQLESKMSGKGQQQQGQTVTKKSAAEASKKPRQKRTATKAYNVTQAFGRRGPEQTQGNFGDQELIRQGTDYKHWPQIAQFAPSASAFFGMSRIGMEVTPSGTWLTYTGAIKLDDKDPNFKDQVILLNKHIDAYKTFPPTEPKKDKKKKADETQALPQRQKKQQTVTLLPAADLDDFSKQLQQSMSSADSTQA

SEQ ID NO: 15323 - protein, 419 aa, Artificial Sequence
  SARS-CoV-2__MT913111.1__nucleocapsid protein (N)
MSDNGPQNQRNAPRITFGGPSDSTGSNQNGERSGARSKQRRPQGLPNNTASWFTALTQHGKEDLKFPRGQGVPINTNSSPDDQIGYYRRATRRIRGGDGKMKDLSPRWYFYYLGTGPEAGLPYGANKDGIIWVATEGALNTPKDHIGTRNPANNAAIVLQLPQGTTLPKGFYAEGSRGGSQASSRSSLRSRNSSRNSTPGSSRGTSPARMAGNGGDAALALLLLDRLNQLESKMSGKGQQQQGQTVTKKSAAEASKKPRQKRTATKAYNVTQAFGRRGPEQTQGNFGDQELIRQGTDYKHWPQIAQFAPSASAFFGMSRIGMEVTPSGTWLTYTGAIKLDDKDPNFKDQVILLNKHIDAYKTFPPTEPKKDKKKKADETQALPQRQKKQQTVTLLPAADLDDFSKQLQQSMSSADSTQA

SEQ ID NO: 15324 - protein, 419 aa, Artificial Sequence
  SARS-CoV-2__MT913112.1__nucleocapsid protein (N)
MSDNGPQNQRNAPRITFGGPSDSTGSNQNGERSGARSKQRRPQGLPNNTASWFTALTQHGKEDLKFPRGQGVPINTNSSPDDQIGYYRRATRRIRGGDGKMKDLSPRWYFYYLGTGPEAGLPYGANKDGIIWVATEGALNTPKDHIGTRNPANNAAIVLQLPQGTTLPKGFYAEGSRGGSQASSRSSSRSRNSSRNSTPGSSRGTSPARMAGNGGDAALALLLLDRLNQLESKMSGKGQQQQGQTVTKKSAAEASKKPRQKRTATKAYNVTQAFGRRGPEQTQGNFGDQELIRQGTDYKHWPQIAQFAPSASAFFGMSRIGMEVIPSGTWLTYTGAIKLDDKDPNFKDQVILLNKHIDAYKTFPPTEPKKDKKKKADETQALPQRQKKQQTVTLLPAADLDDFSKQLQQSMSSADSTQA

SEQ ID NO: 15325 - protein, 419 aa, Artificial Sequence
  SARS-CoV-2__MT913116.1__nucleocapsid protein (N)
MSDNGPQNQRNAPRITFGGPSDSTGSNQNGERSGARSKQRRPQGLPNNTASWFTALTQHGKEDLKFPRGQGVPINTNSSPDDQIGYYRRATRRIRGGDGKMKDLSPRWYFYYLGTGPEAGLPYGANKDGIIWVATEGALNTPKDHIGTRNPANNAAIVLQLPQGTTLPKGFYAEGSRGGSQASSRSSSRSRNSSRNSTPGSSRGTSPARMAGNGGDAALALLLLDRLNQLESKMSGKGQQQQGQTVTKKPAAEASKKPRQKRTATKAYNVTQAFGRRGPEQTQGNFGDQELIRQGTDYKHWPQIAQFAPSASAFFGMSRIGMEVTPSGTWLTYTGAIKLDDKDPNFKDQVILLNKHIDAYKTFPPTEPKKDKKKKADETQALPQRQKKQQTVTLLPAADLDDFSKQLQQSMSSADSTQA

SEQ ID NO: 15326 - protein, 419 aa, Artificial Sequence
  SARS-CoV-2__MT913134.1__nucleocapsid protein (N)
MSDNGPQNQRNAPRITFGGPSDSTGSNQNGERSGARSKQRRPQGLPNNTASWFTALTQHGKEDLKFPRGQGVPINTNSSPDDQIGYYRRATRRIRGGDGKMKDLSPRWYFYYLGTGPEAGLPYGANKDGIIWVATEGALNTPKDHIGTRNPANNAAIVLQLPQGTTLPKGFYAEGSRGGSQASSRSSSRSRNSSRNSTSGSSRGTSPARMAGNGGDAALALLLLDRLNQLESKMSGKGQQQQGQTVTKKSAAEASKKPRQKRTATKAYNVTQAFGRRGPEQTQGNFGDQELIRQGTDYKHWPQIAQFAPSASAFFGMSRIGMEVTPSGTWLTYTGAIKLDDKDPNFKDQVILLNKHIDAYKTFPPTEPKKDKKKKADETQALPQRQKKQQTVTLLPAADLDDFSKQLQQSMSSADSTQA

SEQ ID NO: 15327 - protein, 419 aa, Artificial Sequence
  SARS-CoV-2__MT913151.1__nucleocapsid protein (N)
MSDNGPQNQRNAPRITFGGPSDSTGSNQNGERSGARSKQRRPQGLPNNTASWFTALTQHGKEDLKFPRGQGVPINTNSSPDDQIGYYRRATRRIRGGDGKMKDLSPRWYFYYLGTGPEAGLPYGANKDGIIWVATEGALNTPKDHIGTRNPANNAAIVLQLPQGTTLPKGFYAEGSRGGSQASSRSSSRSRNISRNSTPGSSRGTSPARMAGNGGDAALALLLLDRLNQLESKMSGKGQQQQGQTVTKKSAAEASKKPRQKRTATKAYNVTQAFGRRGPEQTQGNFGDQELIRQGTDYKHWPQIAQFAPSASAFFGMSRIGMEVTPSGTWLTYTGAIKLDDKDPNFKDQVILLNKHIDAYKTFPPTEPKKDKKKKADETQALPQRQKKQQTVTLLPAADLDDFSKQLQQSMSSADSTQA

SEQ ID NO: 15328 - protein, 419 aa, Artificial Sequence
  SARS-CoV-2__MT907515.1__nucleocapsid protein (N)
MSDNGPQNQRNAPRITFGGPSDSTGSNQNGERSGARSKQRRPQGLPNNTASWFTALTQHGKEDLKFPRGQGVPINTNSSPDDQIGYYRRATRRIRGGDGKMKDLSPRWYFYYLGTGPEAGLPYGANKDGIIWVATEGALNTPKDHIGTRNPANNAAIVLQLPQGTTLPKGFYAEGSRGGSQASSRSSSRSRNSSRNLTPGSSRGTSPARMAGNGGDAALALLLLDRLNQLESKMSGKGQQQQGQTVTKKSAAEASKKPRQKRTATKAYNVTQAFGRRGPEQTQGNFGDQELIRQGTDYKHWPQIAQFAPSASAFFGMSRIGMEVTPSGTWLTYTGAIKLDDKDPNFKDQVILLNKHIDAYKTFPPTEPKKDKKKKADETQALPQRQKKQQTVTLLPAADLDDFSKQLQQSMSSADSTQA

SEQ ID NO: 15329 - protein, 419 aa, Artificial Sequence
  SARS-CoV-2__MT907519.1__nucleocapsid protein (N)
MSDNGPQNQRNAPRITFGGPSDSTGSNQNGERSGARSKQRRPQGLPNNTASWFTALTQHGKEDLKFPRGQGVPINTNSSPDDQIGYYRRATRRIRGGDGKMKDLSPRWYFYYLGTGPEAGLPYGANKDGIIWVATEGALNTPKDHIGTRNPANNAAIVLQLPQGTTLPKGFYAEGSRGGSQASSRSSSRSRNSSRNSTPGSSRGTSPARMAGNGGDAALALLLLDRLNQLESKMSGKGQQQQGQTVTKKSAAEASKKPRQKRTATKAYNVTQAFGRRGPEQTQGNFGDQELIRQGTDYKHWPQIAQFAPSASSFFGMSRIGMEVTPSGTWLTYTGAIKLDDKDPNFKDQVILLNKHIDAYKTFPPTEPKKDKKKKADETQALPQRQKKQQTVTLLPAADLDDFSKQLQQSMSSADSTQA

SEQ ID NO: 15330 - protein, 419 aa, Artificial Sequence
  SARS-CoV-2__MT911799.1__nucleocapsid protein (N)
MSDNGPQNQRNAPRITFGGPSDSTGSNQNGERSGARSKQRRPQGLPNNTASWFTALTQHGKEDLKFPRGQGVPINTNSSPDDQIGYYRRATRRIRGGDGKMKDLSPRWYFYYLGTGPEAGLPYGANKDGIIWVATEGALNTPKDHIGTRNPANNAAIVLQLPQGTTLPKGFYAEGSRGGSQASSRSSSRSRNSSRNSTPGSSRGTSPARMAGNGGDAALALLLLDRLNQLESKMSGKCQQQQGQTVTKKSAAEASKKPRQKRTATKAYNVTQAFGRRGPEQTQGNFGDQELIRQGTDYKHWPQIAQFAPSASAFFGMSRIGMEVTPSGTWLTYTGAIKLDDKDPNFKDQVILLNKHIDAYKTFPPTEPKKDKKKKADETQALPQRQKKQQTVTLLPAADLDDFSKQLQQSMSSADSTQA

SEQ ID NO: 15331 - protein, 419 aa, Artificial Sequence
  SARS-CoV-2__MT911819.1__nucleocapsid protein (N)
MSDNGPQNQRNAPRITFGGPSDSTGSNQYGERSGARSKQRRPQGLPNNTASWFTALTQHGKEDLKFPRGQGVPINTNSSPDDQIGYYRRATRRIRGGDGKMKDLSPRWYFYYLGTGPEAGLPYGANKDGIIWVATEGALNTPKDHIGTRNPANNAAIVLQLPQGTTLPKGFYAEGSRGGSQAYSRSSSRSRNSSRNSTPGSSRGTSPARMAGNGGDAALALLLLDRLNQLESKMSGKGQQQQGQTVTKKSAAEASKKPRQKRTATKAYNVTQAFGRRGPEQTQGNFGDQELIRQGTDYKHWPQIAQFAPSASAFFGMSRIGMEVTPSGTWLTYTGAIKLDDKDPNFKDQVILLNKHIDAYKTFPPTEPKKDKKKKADETQALPQRQKKQQTVTLLPAADLDDFSKQLQQSMSSADSTQA

SEQ ID NO: 15332 - protein, 419 aa, Artificial Sequence
  SARS-CoV-2__MT911820.1__nucleocapsid protein (N)
MSDNGPQNQRNAPRITFGGPSDSTGSNQNGERSGARSKQRRPQGLPNNTASWFTALTQHGKEDLKFPRGQGVPINTNSSPDDQIGYYRRATRRIRGGDGKMKDLSPRWYFYYLGTGPEAGLPYGANKDGIIWVATEGALNTPKDHIGTRNPANNAAIVLQLPQGTTLPKGFYAEGSRGGSQASSRSSSRSRNSSRNSTPGSSRGTSPARMAGNGGDAALALLLLDRLNQLESKMSGKGQQQQGQTVTKKSAAEASKKPRQKRTATKAYNVTQAFGRRGPEQTQGNFGDQELIRQGTDYKHWPQIAQFSPSASAFFGMSRIGMEVTPSGTWLTYTGAIKLDDKDPNFKDQVILLNKHIDAYKTFPPTEPKKDKKKKADETQALPQRQKKQQTVTLLPAADLDDFSKQLQQSMSSADSTQA

SEQ ID NO: 15333 - protein, 419 aa, Artificial Sequence
  SARS-CoV-2__MT911827.1__nucleocapsid protein (N)
MSDNGPQNQRNAPRITFGGPSDSTGSNQNGERSGARSKQRRPQGLPNNTASWFTALTQHGKEDLKFPRGQGVPINTNSSPDDQIGYYRRATRRIRGGDGKMKDLSPRWYFYYLGTGPEAGLPYGANKDGIIWVATEGALNTPKDHIGTRNPANNAAIVLQLPQGTTLPKGFYAEGSRGGSQAYSRSSSRSRNSSRNSTPGSSRGTSPARMAGNGGDAALALLLLDRLNQLESKMSGKGQQQQGQTVTKKSAAEASKKPRQKRTATKAYNVTQAFGRRGPEQTQGNFGDQELIRQGTDYKHWPQIAQFAPSASAFFGMSRIGMEVTPSGTWLTYTGAIKLDDKDPNFKDQVILLNKHIDSYKTFPPTEPKKDKKKKADETQALPQRQKKQQTVTLLPAADLDDFSKQLQQSMSSADSTQA

SEQ ID NO: 15334 - protein, 419 aa, Artificial Sequence
  SARS-CoV-2__MT893671.1__nucleocapsid protein (N)
MSDNGPQNQRNAPRITFGGPSDSTGSNQNGERSGARSKQRRPQGLPNNTASWFTALTQHGKEDLKFPRGQGVPINTNSSPDDQIGYYRRATRRIRGGDGKMKDLSPRWYFYYLGTGPEAGLPYGANKDGIIWVATEGALNTPKDHIGTRNPANNAAIVLQLPQGTTLPKGFYAEGSRGGSQASSRSSSRSRNSSRNSTPGSSRGTSPARMAGNGGDAALALLLLDRLNQLESKMSGKGQQQQGQTVNKKSAAEASKKPRQKRTATKAYNVTQAFGRRGPEQTQGNFGDQELIRQGTDYKHWPQIAQFAPSASAFFGMSRIGMEVTPSGTWLTYTGAIKLDDKDPNFKDQVILLNKHIDAYKTFPPTEPKKDKKKKADETQALPQRQKKQQTVTLLPAADLDDFSKQLQQSMSSADSTQA

SEQ ID NO: 15335 - protein, 419 aa, Artificial Sequence
  SARS-CoV-2__MT893675.1__nucleocapsid protein (N)
MSDNGPQNQRNAPRITFGGPSDSTGSNQNGERSGARSKQRRPQGLPNNTASWFTALTQHGKEDLKFPRGQGVPINTNSSPDDQIGYYRRATRRIRGGDGKMKDLSPRWYFYYLGTGPEAGLPYGANKDGIIWVATEGALNTPKDHIGTRNPANNAAIVLQLPQGTTLPKGFYAEGSRGGSQASSRSSSRSRNSSRNSTPGSSKRTSPARMAGNGGDAALALLLLDRLNQLESKMSGKGQQQQGQTVTKKSAAEASKKPRQKRTATKAYNVTQAFGRRGPEQTQGNFGDQELTRQGTDYKHWPQIAQFAPSASAFFGMSRIGMEVTPSGTWLTYTGAIKLDDKDPNFKDQVILLNKHIDAYKTFPPTEPKKDKKKKADETQALPQRQKKQQTVTLLPAADLDDFSKQLQQSMSSADSTQA

SEQ ID NO: 15336 - protein, 419 aa, Artificial Sequence
  SARS-CoV-2__MT893681.1__nucleocapsid protein (N)
MSDNGPQNQRNAPRITFGGPSDSTGSNQNGERSGARSKQRRPQGLPNNTASWFTALTQHGKEDLKFPRGQGVPINTNSSPDDQIGYYRRATRRIRGGDGKMKDLSPRWYFYYLGTGPEAGLPYGANKDGIIWVATEGALNTPKDHIGTRNPANNAAIVLQLPQGTILPKGFYAEGSRGGSQASSRSSSRSRNSSRNSTPGSSRGISPARMAGNGGDAALALLLLDRLNQLESKMSGKGQQQQGQTVTKKSAAEASKKPRQKRTATKAYNVTQAFGRRGPEQTQGNFGDQELIRQGTDYKHWPQIAQFAPSASAFFGMSRIGMEVTPSGTWLTYTGAIKLDDKDPNFKDQVILLNKHIDAYKTFPPTEPKKDKKKKADETQALPQRQKKQQTVTLLPAADLDDFSKQLQQSMSSADSTQA

SEQ ID NO: 15337 - protein, 419 aa, Artificial Sequence
  SARS-CoV-2__MT893685.1__nucleocapsid protein (N)
MSDNGPQNQRNAPRITFGGPSDSTGSNQNGERSGARSKQRRPRGLPNNTASWFTALTQHGKEDLKFPRGQGVPINTNSSPDDQIGYYRRATRRIRGGDGKMKDLSPRWYFYYLGTGPEAGLPYGANKDGIIWVATEGALNTPKDHIGTRNPANNAAIVLQLPQGTTLPKGFYAEGSRGGSQAYSRSSSRSRNSSRNSTPGSSRGTSPARMAGNGGDAALALLLLDRLNQLESKMSGKGQQQQGQTVTKKSAAEASKKPRQKRTATKAYNVTQAFGRRGPEQTQGNFGDQELIRQGTDYKHWPQIAQFAPSASAFFGMSRIGMEVTPSGTWLTYTGAIKLDDKDPNFKDQVILLNKHIDAYKTFPPTEPKKDKKKKADETQALPQRQKKQQTVTLLPAADLDDFSKQLQQSMSSADSTQA

SEQ ID NO: 15338 - protein, 419 aa, Artificial Sequence
  SARS-CoV-2__MT890230.1__nucleocapsid protein (N)
MSDNGPQNQRNAPRITFGGPSDSTGSNQNGERSGARSKQRRPQGLPNNTASWFTALTQHGKEDLKFPRGQGVPINTNSSPDDQIGYYRRATRRIRGGDGKMKDLSPRWYFYYLGTGPEAGLPYGANKDGIIWVATEGALNTPKDHIGTRNPANNAAIVLQLPQGTTLPKGFYAEGSRGGSQASSRSSSRSRNSSRNSTPGSNRGTSPARMAGNGGDAALALLLLDRLNQLESKMSGKGQQQQGQTVTKKSAAEASKKPRQKRTATKAYNVTQAFGRRGPEQTQGNFGDQELIRQGTDYKHWPQIAQFAPSASAFFGMSRIGMEVTPSGTWLTYTGAIKLDDKDPNFKDQVILLNKHIDAYKTFPPTEPKKDKKKKADETQALPQRQKKQQTVTLLPAADLDDFSKQLQQSMSSADSTQA

SEQ ID NO: 15339 - protein, 419 aa, Artificial Sequence
  SARS-CoV-2__MT890236.1__nucleocapsid protein (N)
MSDNGPQNQRNAPRITFGGPSDSTGSNQNGERSGARSKQRRPQGLPNNTASWFTALTQHGKEDLKFPRGQGVPINTNSSPDDQIGYYRRATRRIRGGDGKMKDLSPRWYFYYLGTGPEAGLPYGANKDGIIWVATEGALNTPKDHIGTRNPANNAAIVLQLPQGTTLPKGFYAEGSRGGSQASSRSSSRSRNSSRNSTPGSSRGISPARMAGNGGDAALALLLLDRLNQLETKMSGKGQQQQGQTVTKKSAAEASKKPRQKRTATKAYNVTQAFGRRGPEQTQGNFGDQELIRQGTDYKHWPQIAQFAPSASAFFGMSRIGMEVTPSGTWLTYTGAIKLDDKDPNFKDQVILLNKHIDAYKTFPPTEPKKDKKKKADETQALPQRQKKQQTVTLLPAADLDDFSKQLQQSMSSADSTQA

SEQ ID NO: 15340 - protein, 419 aa, Artificial Sequence
  SARS-CoV-2__MT890238.1__nucleocapsid protein (N)
MSDNGPQNQRNAPRITFGGPSDSTGSNQNGERSGARSKQRRPQGLPNNTASWFTALTQHGKEDLKFPRGQGVPINTNSSPDDQIGYYRRATRRIRGGDGKMKDLSPRWYFYYLGTGPEAGLPYGANKDGIIWVATEGALNTPKDHIGTRNPANNAAIVLQLPQGTTLPKGFYAEGSRGGSQASSRSSSRSRNSSRNSTPGSNRGTSPARMAGNGGDAALALLLLDRLNQLERKMSGKGQQQQGQTVTKKSAAEASKKPRQKRTATKAYNVTQAFGRRGPEQTQGNFGDQELIRQGTDYKHWPQIAQFAPSASAFFGMSRIGMEVTPSGTWLTYTGAIKLDDKDPNFKDQVILLNKHIDAYKTFPPTEPKKDKKKKADETQALPQRQKKQQTVTLLPAADLDDFSKQLQQSMSSADSTQA

SEQ ID NO: 15341 - protein, 419 aa, Artificial Sequence
  SARS-CoV-2__MT890293.1__nucleocapsid protein (N)
MSDNGPQNQRNAPRITFGGPSDSTGSNQNGERSGARSKQRRPQGLPNNTASWFTALTQHGKEDLKFPRGQGVPINTNSSPDDQIGYYRRATRRIRGGDGKMKDLSPRWYFYYLGTGPEAGLPYGANKDGIIWVATEGALNTPKDYIGTRNPANNAAIVLQLPQGTTLPKGFYAEGSRGGSQASSRSSSRSRNSSRNSTPGSSRGTSPARMAGNGGDAALALLLLDRLNQLESKMSGKGQQQQGQTVTKKSAAEASKKPRQKRTATKAYNVTQAFGRRGPEQTQGNFGDQELIRQGTDYKHWPQIAQFAPSASAFFGMSRIGMEVTPSGTWLTYTGAIKLDDKDPNFKDQVILLNKHIDAYKTFPPTEPKKDKKKKADETQALPQRQKKQQTVTLLPAADLDDFSKQLQQSMSSADSTQA

SEQ ID NO: 15342 - protein, 419 aa, Artificial Sequence
  SARS-CoV-2__MT890316.1__nucleocapsid protein (N)
MSDNGPQNQRNAPRITFGGPSDSTGSNQNGERSGARSKQRRPQGLPNNTASWFTALTQHGKEDLKFPRGQGVPINTNSSPDDQIGYYRRATRRIRGGDGKMKDLSPRWYFYYLGTGPEAGLPYGANKDGIIWVATEGALNTPKDHIGTRNPANNAAIVLQLPQGTTLPKGFYAEGSRGGSQASSRSSSRSRNSSRNSTPGSSRGTSPARMAGNGGDAALALLLLDRLNQLESKMSGKGQQQQGQTVTKKSAAEASKKPRQKRTATKAYNVTQAFGRRGPEQTQGNFGDQELIRQGTDYKHWPQIAQFAPSASAFFGMSRIGMEVTPSGTWLTYTGAIKLDDKDPNFKDQVILLNKHIDAYKTFPPTEPKKDKKKKADETQALPQRQNKQQTVTLLPAADLDDFSKQLQQSMSSADSTQA

SEQ ID NO: 15343 - protein, 419 aa, Artificial Sequence
  SARS-CoV-2__MT890320.1__nucleocapsid protein (N)
MSDNGPQNQRNAPRITFGGPSDSTGSNQNGERSGARSKQRRPQGLPNNTASWFTALTQHGKEDLKFPRGQGVPINTNSSPDDQIGYYRRATRRIRGGDGKMKDLSPRWYFYYLGTGPEAGLPYGANKDGIIWVATEGALNTPKDHIGTRNPANNAAIVLQLPQGTTLPKGFYAEGSRGGSQASSRSSSRIRNSSRNSTPGSSRGTSPARMAGNGGDAALALLLLDRLNQLESKMSGKGQQQQGQTVTKKSAAEASKKPRQKRTATKAYNVTQAFGRRGPEQTQGNFGDQELIRQGTDYKHWPQIAQFAPSASAFFGMSRIGMEVTPSGTWLTYTGAIKLDDKDPNFKDQVILLNKHIDAYKTFPPTEPKKDKKKKADETQALPQRQKKQQTVTLLPAADLDDFSKQLQQSMSSADSTQA

SEQ ID NO: 15344 - protein, 419 aa, Artificial Sequence
  SARS-CoV-2__MT890321.1__nucleocapsid protein (N)
MSDNGPQNQRNAPRITFGGPSDSTGSNQNGERSGARSKQRRPQGLPNNTASWFTALTQHGKEDLKFPRGQGVPINTNSSPDDQIGYYRRATRRIRGGDGKMKDLSPRWYFYYLGTGPEAGLPYGANKDGIIWVATEGALNTPKDHIGTRNPANNAAIVLQLPQGTTLPKGFYAEGSRGGSQASSRSSSRSRNSSRNSTPGSSGGTSPARMAGNGGDAALALLLLDRLNQLESKMSGKGQQQQGQTVTKKSAAEASKKPRQKRTATKAYNVTQAFGRRGPEQTQGNFGDQELIRQGTDYKHWPQIAQFAPSASAFFGMSRIGMEVTPSGTWLTYTGAIKLDDKDPNFKDQVILLNKHIDAYKTFPPTEPKKDKKKKADETQALPQRQKKQQTVTLLPAADLDDFSKQLQQSMSSADSTQA

SEQ ID NO: 15345 - protein, 419 aa, Artificial Sequence
  SARS-CoV-2__MT892973.1__nucleocapsid protein (N)
MSDNGPQNQRNAPRITFGGPSDSTGSNQNGERSGARSKQRRPQGLPNNTASWFTALTQHGKEDLKFPRGQGVPINTNSSPDDQIGYYRRATRRIRGGDGKMKDLSPRWYFYYLGTGPEAGLPYGANKDGIIWVATEGALNTPKDHIGTRNPANNAAIVLQLPQGTTLPKGFYAEGSRGGSQASSRSSSRSRNSSRNSTPGSSRGTSPARMAGNGGDAALALLLLDRLNQLESKMFGKGQQQQGQTVTKKSAAEASKKPRQKRTATKAYNVTQAFGRRGPEQTQGNFGDQELIRQGTDYKHWPQIAQFAPSASAFFGMSRIGMEVTPSGTWLTYTGAIKLDDKDPNFKDQVILLNKHIDAYKTFPPTEPKKDKKKKADETQALPQRQKKQQTVTLLPAADLDDFSKQLQQSMSSADSTQA

SEQ ID NO: 15346 - protein, 419 aa, Artificial Sequence
  SARS-CoV-2__MT892974.1__nucleocapsid protein (N)
MSDNGPQNQRNAPRITFGGPSDSTGSNQNGERSGARSKQRRPQGLPNNTASWFTALTQHGKEDLKFPRGQGVPINTNSSPDDQIGYYRRATRRIRGGDGKMKDLSPRWYFYYLGTGPEAGLPYGANKDGIIWVATEGALNTPKDHIGTRNPANNAAIVLQLPQGTTLPKGFYAEGSRGGSQASSRSSSRSRNSLRNSTPGSSRGTSPARMAGNGGDAALALLLLDRLNQLESKMSGKGQQQQGQTVTKKSAAEASKKPRQKRTATKAYNVTQAFGRRGPEQTQGNFGDQELIRQGTDYKHWPQIAQFAPSASAFFGMSRIGMEVTPSGTWLTYTGAIKLDDKDPNFKDQVILLNKHIDAYKTFPPTEPKKDKKKKADETQALPQRQKKQQTVTLLPAADLDDFSKQLQQSMSSADSTQA

SEQ ID NO: 15347 - protein, 419 aa, Artificial Sequence
  SARS-CoV-2__MT892993.1__nucleocapsid protein (N)
MSDNGPQNQRNAPRITFGGPSDSTGSNQNGERSGARSKQRRPQGLPNNTASWFTALTQHGKEDLKFPRGQGVPINTNSSPDDQIGYYRRATRRIRGGDGKMKDLSPRWYFYYLGTGPEAGLPYGANKDGIIWVATEGALNTPKDHIGTRNPANNAAIVLQLPQGTTLPKGFYAEGSRGGIQASSRSSSRSRNSSRNSTPGSSRGTSPARMAGNGGDAALALLLLDRLNQLESKMSGKGQQQQGQTVTKKSAAEASKKPRQKRTATKAYNVTQAFGRRGPEQTQGNFGDQELIRQGTDYKHWPQIAQFAPSASAFFGMSRIGMEVTPSGTWLTYTGAIKLDDKDPNFKDQVILLNKHIDAYKTFPPTEPKKDKKKKADETQALPQRQKKQQTVTLLPAADLDDFSKQLQQSMSSADSTQA

SEQ ID NO: 15348 - protein, 419 aa, Artificial Sequence
  SARS-CoV-2__MT893011.1__nucleocapsid protein (N)
MSDNGPQNQRNAPRITFGGPSDSTGSNQNGERSGARSKQRRPQGLPNNTASWFTALTQHGKEDLKFPRGQGVPINTNSSPDDQIGYYRRATRRIRGGDGKMKDLSPRWYFYYLGTGPEAGLPYGANKDGIIWVATEGALNTPKDHIGTRNPANNAAIVLQLPQGTTLPKGFYAEGSRGGSQASSRSSSRSRNTSRNSTPGSSRGTSPARMAGNGGDAALALLLLDRLNQLESKMSGKGQQQQGQTVTKKSAAEASKKPRQKRTATKAYNVTQAFGRRGPEQTQGNFGDQELIRQGTDYKHWPQIAQFAPSASAFFGMSRIGMEVTPSGTWLTYTGAIKLDDKDPNFKDQVILLNKHIDAYKTFPPTEPKKDKKKKADETQALPQRQKKQQTVTLLPAADLDDFSKQLQQSMSSADSTQA

SEQ ID NO: 15349 - protein, 419 aa, Artificial Sequence
  SARS-CoV-2__MT893013.1__nucleocapsid protein (N)
MSDNGPQNQRNAPRITFGGPSDSTGSNQNGERSGARSKQRRPQGLPNNTASWFTALTQHGKEDLKFPRGQGVPINTNSSPDDQIGYYRRTTRRIRGGDGKMKDLSPRWYFYYLGTGPEAGLPYGANKDGIIWVATEGALNTPKDHIGTRNPANNAAIVLQLPQGTTLPKGFYAEGSRGGSQASSRSSSRSRNSSRNSTPGSSRGTSPARMAGNGGDAALALLLLDRLNQLESKMSGKGQQQQGQTVTKKSAAEASKKPRQKRTATKAYNVTQAFGRRGPEQTQGNFGDQELIRQGTDYKHWPQIAQFAPSASAFFGMSRIGMEVTPSGTWLTYTGAIKLDDKDPNFKDQVILLNKHIDAYKTFPPTEPKKDKKKKADETQALPQRQKKQQTVTLLPAADLDDFSKQLQQSMSSADSTQA

SEQ ID NO: 15350 - protein, 419 aa, Artificial Sequence
  SARS-CoV-2__MT883501.1__nucleocapsid protein (N)
MSDNGPQNQRNAPRITFGGPSDSTGSNQNGERSGARSKQRRPQGLPNNTASWFTALTQHGKEDLKFPRGQGVPINTNSSPDDQIGYYRRATRRIRGGDGKMKDLSPRWYFYYLGTGPEAGLPYGANKDGIIWVATEGALNTPKDHIGTRNPANNAAIVLQLPQGTTLPKGFYAEGSRGGSQASSRSSSRSRNSSRNSTPGSSRGTSPARMAGYGGDAALALLLLDRLNQLESKMSGKGQQQQGQTVTKKSAAEASKKPRQKRTATKAYNVTQAFGRRGPEQTQGNFGDQELIRQGTDYKHWPQIAQFAPSASAFFGMSRIGMEVTPSGTWLTYTGAIKLDDKDPNFKDQVILLNKHIDAYKTFPPTEPKKDKKKKADETQALPQRQKKQQTVTLLPAADLDDFSKQLQQSMSSADSTQA

SEQ ID NO: 15351 - protein, 419 aa, Artificial Sequence
  SARS-CoV-2__MT883502.1__nucleocapsid protein (N)
MSDNGPQNQRNAPRITFGGPSDSTGSNQNGERSGARSKQRRPQGLPNNTASWFTALTQHGKEDLKFPRGQGVPINTNSSPDDQIGYYRRATRRIRGGDGKMKDLSPRWYFYYLGTGPEAGLPYGANKDGIIWVATEGALNTPKDHIGTRNPANNAAIVLQLPQGTTLPKGFYAEGSRGGSQASSRSSSRSRNSSRNSTPGSSKRTSPARMAGNGGDAALALLLLDRLNQLESKMSGKGQQQQGQTVTKKSAAEASKKPRQKRTATKAYNVTQAFGRRGPEQTQGNFGDQELIRQGTDYKHWPQIAQFAPSASAFFGMSRIGMEVTPSGTWLTYTGAIKLDDKDPNFKDQVILLNKHIDAYKTFPPTEPKKDKKKKADETQALPQRQKKQQTVTLLPAADLDDFSKQLQQSMSIADSTQA

SEQ ID NO: 15352 - protein, 419 aa, Artificial Sequence
  SARS-CoV-2__MT883503.1__nucleocapsid protein (N)
MSDNGPQNQRNAPRITFGGPSDSTGSNQNGERSGARSKQRRPQGLPNNTASWFTALTQHGKEDLKFPRGQGVPINTNSSPDDQIGYYRRATRRIRGGDGKMKDLSPRWYFYYLGTGPEAGLPYGANKDGIIWVVTEGALNTPKDHIGTRNPANNAAIVLQLPQGTTLPKGFYAEGSRGGSQASSRSSSRSRNSSRNSTPGSSKRTSPARMAGNGGDAALALLLLDRLNQLESKMSGKGQQQQGQTVTKKSAAEASKKPRQKRTATKAYNVTQAFGRRGPEQTQGNFGDQELIRQGTDYKHWPQIAQFAPSASAFFGMSRIGMEVTPSGTWLTYTGAIKLDDKDPNFKDQVILLNKHIDAYKTFPPTEPKKDKKKKADETQALPQRQKKQQTVTLLPAADLDDFSKQLQQSMSSADSTQA

SEQ ID NO: 15353 - protein, 419 aa, Artificial Sequence
  SARS-CoV-2__MT886312.1__nucleocapsid protein (N)
MSDNGPQNQRNAPRITFGGPSDSTGSNQNGERSGARSKQRRPQGLPNNTASWFTALTQHGKEDLKFPRGQGVPINTNSSPDDQIGYYRRATRRIRGGDGKMKDLSPRWYFYYLGTGPEAGLPYGANKDGIIWVATEGALNTPKDHIGTRNPANNAAIVLQLPQGTTLPKGFYAEGSRGGSQASSRSSSRSRNSSRNSTPGSSRGTSPARMAGNGGDAALALLLLDRLNQLESKMSGKGQQQQGQTVTKKSAAEASKKPRQKRTATKAYNVTQAFGRRGPEQTQGNFGDQELIRQGTDYKHWPQIAQFAPSASAFFGMSRIGMEVTPLGTWLTYTGAIKLDDKDPNFKDQVILLNKHIDAYKTFPPTEPKKDKKKKADETQALPQRQKKQQTVTLLPAADLDDFSKQLQQSMSSADSTQA

SEQ ID NO: 15354 - protein, 419 aa, Artificial Sequence
  SARS-CoV-2__MT886346.1__nucleocapsid protein (N)
MSDNGPQNQRNAPRITFGGPSDSTGSNQNGERSGARSKQRRPQGLPNNTASWFTALTQHGKEDLKFPRGQGVPINTNSSPDDQIGYYRRATRRIRGGDGKMKDLSPRWYFYYLGTGPEAGLPYGANKDGIIWVATEGAFNTPKDHIGTRNPANNAAIVLQLPQGTTLPKGFYAEGSRGGSQASSRSSSRSRNSSRNSTPGSSKRTSPARMAGNGGDAALALLLLDRLNQLESKMSGKGQQQQGQTVTKKSAAEASKKPRQKRTATKAYNVTQAFGRRGPEQTQGNFGDQELIRQGTDYKHWPQIAQFAPSASAFFGMSRIGMEVTPSGTWLTYTGAIKLDDKDPNFKDQVILLNKHIDAYKTFPPTEPKKDKKKKADETQALPQRQKKQQTVTLLPAADLDDFSKQLQQSMSSADSTQA

SEQ ID NO: 15355 - protein, 419 aa, Artificial Sequence
  SARS-CoV-2__MT886413.1__nucleocapsid protein (N)
MSDNGPQNQRNAPRITFGGPSDSTGSNQNGERSGARSKQRRPQGLPNNTASWFTALTQHGKEDLKFTRGQGVPINTNSSPDDQIGYYRRATRRIRGGDGKMKDLSPRWYFYYLGTGPEAGLPYGANKDGIIWVATEGALNTPKDHIGTRNPANNAAIVLQLPQGTTLPKGFYAEGSRGGSQASSRSSSRSRNSSRNSTPGSSRGTSPARMAGNGGDAALALLLLDRLNQLESKMSGKGQQQQGQTVTKKSAAEASKKPRQKRTATKAYNVTQAFGRRGPEQTQGNFGDQELIRQGTDYKHWPQIAQFAPSASAFFGMSRIGMEVTPSGTWLTYTGAIKLDDKDPNFKDQVILLNKHIDAYKTFPPTEPKKDKKKKADETQALPQRQKKQQTVTLLPAADLDDFSKQLQQSMSSADSTQA

SEQ ID NO: 15356 - protein, 419 aa, Artificial Sequence
  SARS-CoV-2__MT880886.1__nucleocapsid protein (N)
MSDNGPQNQRNAPRITFGGPSDSTGSNQNGERSGARSKQRRPQGLPNNTASWFTALTQHGKEDLKFPRGQGVPINTNSSPDDQIGYYRRATRRIRGGDGKMKDLSPRWYFYYLGTGPEAGLPYGANKDGIIWVATEGALNTPKDHIGTRNPANNAAIVLQLPQGTTLPKGFYAEGSRGGSQSSSRSSSRSRNSSRNSTPGSSKRTSPARMAGNGGDAALALLLLDRLNQLESKMSGKGQQQQGQTVTKKSAAEASKKPRQKRTATKAYNVTQAFGRRGPEQTQGNFGDQELIRQGTDYKHWPQIAQFAPSASAFFGMSRIGMEVTPSGTWLTYTGAIKLDDKDPNFKDQVILLNKHIDAYKTFPPTEPKKDKKKKADETQALPQRQKKQQTVTLLPAADLDDFSKQLQQSMSSADSTQA

SEQ ID NO: 15357 - protein, 419 aa, Artificial Sequence
  SARS-CoV-2__MT882317.1__nucleocapsid protein (N)
MSDNGPQNQRNAPRITFGGPSDSTGSNQNRERSGARSKQRRPQGLPNNTASWFTALTQHGKEDLKFPRGQGVPINTNSSPDDQIGYYRRATRRIRGGDGKMKDLSPRWYFYYLGTGPEAGLPYGANKDGIIWVATEGALNTPKDHIGTRNPANNAAIVLQLPQGTTLPKGFYAEGSRGGSQASSRSSSRSRNSSRNSTPGSSKRTSPARMAGNGGDAALALLLLDRLNQLESKMSGKGQQQQGQTVTKKSAAEASKKPRQKRTATKAYNVTQAFGRRGPEQTQGNFGDQELIRQGTDYKHWPQIAQFAPSASAFFGMSRIGMEVTPSGTWLTYTGAIKLDDKDPNFKDQVILLNKHIDAYKTFPPTEPKKDKKKKADETQALPQRQKKQQTVTLLPAADLDDFSKQLQQSMSSADSTQA

SEQ ID NO: 15358 - protein, 419 aa, Artificial Sequence
  SARS-CoV-2__MT873051.1__nucleocapsid protein (N)
MSDNGPQNQRNAPRITFGGPSDSTGSNQNGERSGARSKQRRPQGLPNNTASWFTALTQHGKEDLKFPRGQGVPINTNSSPDDQIGYYRRATRRIRGGDGKMKDLSPRWYFYYLGTGPEAGLPYGANKDGIIWVATEGALNTPKDHIGTRNPANNAAIVLQLPQGTTLPKGFYAEGSRGGSQASSRSSSRSRNSSRNSTPGSSRGTSPAIMAGNGGDAALALLLLDRLNQLESKMSGKGQQQQGQTVTKKSAAEASKKPRQKRTATKAYNVTQAFGRRGPEQTQGNFGDQELIRQGTDYKHWPQIAQFAPSASAFFGMSRIGMEVTPSGTWLTYTGAIKLDDKDPNFKDQVILLNKHIDAYKTFPPTEPKKDKKKKADETQALPQRQKKQQTVTLLPAADLDDFSKQLQQSMSSADSTQA

SEQ ID NO: 15359 - protein, 419 aa, Artificial Sequence
  SARS-CoV-2__MT873056.1__nucleocapsid protein (N)
MSDNGPQNQRNAPRITFGGPSDSTGSNQNGERSGARSKQRRPQGLPNNTASWFTALTQHGKEDLKFPRGQGVPINTNSSPDDQIGYYRRATRRIRGGDGKMKDLSPRWYFYYLGTGPEAGLPYGANKDGIIWVATEGALNTPKDHIGTRNPANNAAIVLQLPQGTTLPKGFYAEGSRGGSQASSRSSSRSRNSSRNSTPGSSRGTSPARMAGNGGDAALALLLLDRLNQLESKMSGKGQQQQGQTVTKKSAAEASKKPRQKRTATKAYNVTQAFGRRGPEQTQGNFGDQELIRQGTDYKYWPQIAQFAPSASAFFGMSRIGMEVTPSGTWLTYTGAIKLDDKDPNFKDQVILLNKHIDAYKTFPPTEPKKDKKKKADETQALPQRQKKQQTVTLLPAADLDDFSKQLQQSMSSADSTQA

SEQ ID NO: 15360 - protein, 419 aa, Artificial Sequence
  SARS-CoV-2__MT873062.1__nucleocapsid protein (N)
MSDNGPQNQRNAPRITFGGPSDSTGSNQNGERSGARSKQRRPQGLPNNTASWFTALTQHGKEDLKFPRGQGVPINTNSSPDDQIGYYRRATRRIRGGDGKMKDLSPRWYFYYLGTGPEAGLPYGANKDGIIWVATEGALNTPKDHIGTRNPANNAAIVLQLPQGTTLPKGFYAEGSRGGSQASSRSSSRSRNSSRNSTPGSSRGTSPARMAGNGGDAALALLLLDRLNQLESKMSGKGQQQQGQTVTKKSAAEASKKPRQKRTATKAYNVTQAFGRRGPEQTQGNFGDQELIRQGTDYKHWPQIAQFAPSASAFFGMSRIGMEVTPSGTWLTYTGAIKLDDKDPNFKDQVILLNKHIDAYKTFPPTEPKKDKKKKADETQALPQRQKKQQTVTLLPAADLYDFSKQLQQSMSSADSTQA

SEQ ID NO: 15361 - protein, 419 aa, Artificial Sequence
  SARS-CoV-2__MT873087.1__nucleocapsid protein (N)
MSDNGPQNHRNAPRITFGGPSDSTGSNQNGERSGARSKQRRPQGLPNNTASWFTALTQHGKEDLKFPRGQGVPINTNSSPDDQIGYYRRATRRIRGGDGKMKDLSPRWYFYYLGTGPEAGLPYGANKDGIIWVATEGALNTPKDHIGTRNPANNAAIVLQLPQGTTLPKGFYAEGSRGGSQASSRSSSRSRNSSRNSTPGSSRGTSPARMAGNGGDAALALLLLDRLNQLESKMSGKGQQQQGQTVTKKSAAEASKKPRQKRTATKAYNVTQAFGRRGPEQTQGNFGDQELIRQGTDYKHWPQIAQFAPSASAFFGMSRIGMEVTPSGTWLTYTGAIKLDDKDPNFKDQVILLNKHIDAYKTFPPTEPKKDKKKKADETQALPQRQKKQQTVTLLPAADLDDFSKQLQQSMSSADSTQA

SEQ ID NO: 15362 - protein, 419 aa, Artificial Sequence
  SARS-CoV-2__MT873108.1__nucleocapsid protein (N)
MSDNGPQNQRNAPRITFGGPSDSTGSNQNGERSGARSKQRRPQGLPNNTASWFTALTQHGKEDLKFPRGQGVPINTNSSPDDQIGYYRRATRRIRGGDGKMKDLSPRWYFYYLGTGPEAGLPYGANKDGIIWVATEGALNTPKDHIGTRNPANNAAIVLQLPQGTTLPKGFYAEGSRGGSQASSRSSSRSRNSSRNSTPGSSRGTFPARMAGNGGDAALALLLLDRLNQLESKMSGKGQQQQGQTVTKKSAAEASKKPRQKRTATKAYNVTQAFGRRGPEQTQGNFGDQELIRQGTDYKHWPQIAQFAPSASAFFGMSRIGMEVTPSGTWLTYTGAIKLDDKDPNFKDQVILLNKHIDAYKTFPPTEPKKDKKKKADETQALPQRQKKQQTVTLLPAADLDDFSKQLQQSMSSADSTQA

SEQ ID NO: 15363 - protein, 419 aa, Artificial Sequence
  SARS-CoV-2__MT873173.1__nucleocapsid protein (N)
MSDNGPQNQRNAPRITFGGPSDSTGSNQNGERSGARSKQRRPQGLPNNTASWFTALTQHGKEDLKFPRGQGVPINTNSSPDDQIGYYRRATRRIRGGDGKMKDLSPRWYFYYLGTGPEAGLPYGANKDGIIWVATEGALNTPKDHIGTRNPANNAAIVLQLPQGTTLPKGFYAEGSRGGSQASSRSSSRSRNSSRNSTPGSSKGTSPGRMAGNGGDAALALLLLDRLNQLESKMSGKGQQQQGQTVTKKSAAEASKKPRQKRTATKAYNVTQAFGRRGPEQTQGNFGDQELIRQGTDYKHWPQIAQFAPSASAFFGMSRIGMEVTPSGTWLTYTGAIKLDDKDPNFKDQVILLNKHIDAYKTFPPTEPKKDKKKKADETQALPQRQKKQQTVTLLPAADLDDFSKQLQQSMSSADSTQA

SEQ ID NO: 15364 - protein, 419 aa, Artificial Sequence
  SARS-CoV-2__MT873184.1__nucleocapsid protein (N)
MSDNGPQNQRNAPRITFGGPSDSTGSNQNGERSGARSKQRRPQGLPNNTASWFTALTQHGKEDLKFPRGQGVPINTNSSPDDQIGYYRRATRRIRGGDGKMKDLSPRWYFYYLGTGPEAGLPYGANKDGIIWVATEGALNTPKDHIGTRNPANNAAIVLQLPQGTTLPKGFYAEGSRGCSQASSRSSSRSRNSSRNSTPGSSRGTSPARMAGNGGDAALALLLLDRLNQLESKMSGKGQQQQGQTVTKKSAAEASKKPRQKRTATKAYNVTQAFGRRGPEQTQGNFGDQELIRQGTDYKHWPQIAQFAPSASAFFGMSRIGMEVTPSGTWLTYTGAIKLDDKDPNFKDQVILLNKHIDAYKTFPPTEPKKDKKKKADETQALPQRQKKQQTVTLLPAADLDDFSKQLQQSMSSADSTQA

SEQ ID NO: 15365 - protein, 419 aa, Artificial Sequence
  SARS-CoV-2__MT873208.1__nucleocapsid protein (N)
MSDNGPQNQRNAPRITFGGPSDSTGSNQNGERGGARSKQRRPQGLPNNTASWFTALTQHGKEDLKFPRGQGVPINTNSSPDDQIGYYRRATRRIRGGDGKMKDLSPRWYFYYLGTGPEAGLPYGANKDGIIWVATEGALNTPKDHIGTRNPANNAAIVLQLPQGTTLPKGFYAEGSRGGSQASSRSSSRSRNSSRNSTPGSSRGTSPARMAGNGGDAALALLLLDRLNQLESKMSGKGQQQQGQTVTKKSAAEASKKPRQKRTATKAYNVTQAFGRRGPEQTQGNFGDQELIRQGTDYKHWPQIAQFAPSASAFFGMSRIGMEVTPSGTWLTYTGAIKLDDKDPNFKDQVILLNKHIDAYKTFPPTEPKKDKKKKADETQALPQRQKKQQTVTLLPAADLDDFSKQLQQSMSSADSTQA

SEQ ID NO: 15366 - protein, 419 aa, Artificial Sequence
  SARS-CoV-2__MT873268.1__nucleocapsid protein (N)
MSDNGPQNQRNAPRITFGGPSDSTGSNQNGERSGARSKQRRPQGLPNNTASWFTALTQHGKEDLKFPRGQGVPINTNSSPDDQIGYYRRATRRIRGGDGKMKDLSPRWYFYYLGTGPEAGLPYGANKDGIIWVATEGALNTPKDHIGTRNPANNAAIVLQLPQGTTLPKGFYAEGSRGGSQASSRSSSRSRNSSRNSTPGSSRGTSPARMAGNGGDAALALLLLDRLNQLESKMSGKGQQQQGQTVTKKSAAEASKKPRQKRTATKAYNVTQAFGRRGPEQTQGNFGDQELIRQGTDYKHWPQIAQFAPSASAFFGMSRIGMEVTLSGTWLTYTGAIKLDDKDPNFKDQVILLNKHIDAYKTFPPTEPKKDKKKKADETQALPQRQKKQQTVTLLPAADLDDFSKQLQQSMSSADSTQA

SEQ ID NO: 15367 - protein, 419 aa, Artificial Sequence
  SARS-CoV-2__MT873270.1__nucleocapsid protein (N)
MSDNGPQNQRNAPRITFGGPSDSTGSNQNGERIGARSKQRRPQGLPNNTASWFTALTQHGKEDLKFPRGQGVPINTNSSPDDQIGYYRRATRRIRGGDGKMKDLSPRWYFYYLGTGPEAGLPYGANKDGIIWVATEGALNTPKDHIGTRNPANNAAIVLQLPQGTTLPKGFYAEGSRGGSQASSRSSSRSRNSSRNSTPGSSRGTSPARMAGNGGDAALALLLLDRLNQLESKMSGKGQQQQGQTVTKKSAAEASKKPRQKRTATKAYNVTQAFGRRGPEQTQGNFGDQELIRQGTDYKHWPQIAQFAPSASAFFGMSRIGMEVTPSGTWLTYTGAIKLDDKDPNFKDQVILLNKHIDAYKTFPPTEPKKDKKKKADETQALPQRQKKQQTVTLLPAADLDDFSKQLQQSMSSADSTQA

SEQ ID NO: 15368 - protein, 419 aa, Artificial Sequence
  SARS-CoV-2__MT873290.1__nucleocapsid protein (N)
MSDNGPQNQRNAPRITFGGPSDSTGSNQNGERSGARSKQRRPQGLPNNTASWFTALTQHGKEDLKFPRGQGVPINTNSSPDDQIGYYRRATRRIRGGDGKMKDLSPRWYFYYLGTGPEAGLPYGANKDGIIWVATEGALNTPKDHIGTRNPANNAAIVLQLSQGTTLPKGFYAEGSRGGSQASSRSSSRSRNSSRNSTPGSSRGTSPARMAGNGGDAALALLLLDRLNQLESKMSGKGQQQQGQTVTKKSAAEASKKPRQKRTATKAYNVTQAFGRRGPEQTQGNFGDQELIRQGTDYKHWPQIAQFAPSASAFFGMSRIGMEVTPSGTWLTYTGAIKLDDKDPNFKDQVILLNKHIDAYKTFPPTEPKKDKKKKADETQALPQRQKKQQTVTLLPAADLDDFSKQLQQSMSSADSTQA

SEQ ID NO: 15369 - protein, 419 aa, Artificial Sequence
  SARS-CoV-2__MT873300.1__nucleocapsid protein (N)
MSDNGPQNQRNAPRITFGGPSDSTGSNQNGERSGSRSKQRRPQGLPNNTASWFTALTQHGKEDLKFPRGQGVPINTNSSPDDQIGYYRRATRRIRGGDGKMKDLSPRWYFYYLGTGPEAGLPYGANKDGIIWVATEGALNTPKDHIGTRNPANNAAIVLQLPQGTTLPKGFYAEGSRGGSQASSRSSSRSRNSSRNSTPGSSRGTSPARMAGNGGDAALALLLLDRLNQLESKMSGKGQQQQGQTVTKKSAAEASKKPRQKRTATKAYNVTQAFGRRGPEQTQGNFGDQELIRQGTDYKHWPQIAQFAPSASAFFGMSRIGMEVTPSGTWLTYTGAIKLDDKDPNFKDQVILLNKHIDAYKTFPPTEPKKDKKKKADETQALPQRQKKQQTVTLLPAADLDDFSKQLQQSMSSADSTQA

SEQ ID NO: 15370 - protein, 419 aa, Artificial Sequence
  SARS-CoV-2__MT873324.1__nucleocapsid protein (N)
MSDNGPQNQRNAPRITFGGPSDSTGSNQNGERSGARSKQRRPQGLPNNTASWFTALTQHGKEDLKFPRGQGVPINTNSSPDDQIGYYRRATRRIRGGDGKMKDLSPRWYFYYLGTGPEAGLPYGANKDGIIWVATEGALNTPKDHIGTRNPANNAAIVLQLPQGTTLPKGFYAEGSRGGSQASSRSSSRSRNSSRNSTPGSSRGTSPARMAGNGGDAALALLLLDRLNQLESKMSGKGQQQQGQTVTKKSAAEASKKPRQKRTATKAYNVTQAFGRRGPEQTQGNFGDQELIRQGTDYKHWPQIAQFAPSASAFFGMSRIGMEVTPSGTWLTYTGSIKLDDKDPNFKDQVILLNKHIDAYKTFPPTEPKKDKKKKADETQALPQRQKKQQTVTLLPAADLDDFSKQLQQSMSSADSTQA

SEQ ID NO: 15371 - protein, 419 aa, Artificial Sequence
  SARS-CoV-2__MT873376.1__nucleocapsid protein (N)
MSDNGPQNQRNAPRITFGGPSDSTGSNQNGERSGARSKQRRPQGLPNNTASWFTALTQHGKEDLKFPRGQGVPINTNSSPDDQIGYYRRATRRIRGGDGKMKDLSPRWYFYYLGTGPEAGLPYGANKDGIIWVATEGALNTPKDHIGTRNPANNAAIVLQLPQGTTLPKGFYAEGSRGGSQASSRSSSRSRNSSRNSTPGSSRGTSPARMAGNGGDAALALLLLDRLNQLESKMSGKGQQQQGQTVTKKSAAEASKKPRQKRTATKAYNVTQAFGRRGPEQTQGNFGDQELIRQGTDYKHWPQIAQFAPSASAFFGMSRIGMEVTPSGTWLTYTGAIKLDDKDPNFKDQVILLNKHIDAYKTFPPTEPKKDKKKKAYETQALPQRQKKQQTVTLLPAADLDDFSKQLQQSMSSADSTQA

SEQ ID NO: 15372 - protein, 419 aa, Artificial Sequence
  SARS-CoV-2__MT873378.1__nucleocapsid protein (N)
MSDNGPQNQRNAPRITFGGPSDSTGSNQNGERSGARSKQRRPQGLPNNTASWFTALTQHGKEYLKFPRGQGVPINTNSSPDDQIGYYRRATRRIRGGDGKMKDLSPRWYFYYLGTGPEAGLPYGANKDGIIWVATEGALNTPKDHIGTRNPANNAAIVLQLPQGTTLPKGFYAEGSRGGSQASSRSSSRSRNSSRNSTPGSSRGTSPARMAGNGGDAALALLLLDRLNQLESKMSGKGQQQQGQTVTKKSAAEASKKPRQKRTATKAYNVTQAFGRRGPEQTQGNFGDQELIRQGTDYKHWPQIAQFAPSASAFFGMSRIGMEVTPSGTWLTYTGAIKLDDKDPNFKDQVILLNKHIDAYKTFPPTEPKKDKKKKADETQALPQRQKKQQTVTLLPAADLDDFSKQLQQSMSSADSTQA

SEQ ID NO: 15373 - protein, 419 aa, Artificial Sequence
  SARS-CoV-2__MT873381.1__nucleocapsid protein (N)
MSDNGPQNQRNAPRITFGGPSDSTGSNQNGERSGARSKQRRPQGLPNNTASWFTALTQHGKEDLKFPRGQGVPINTNSSPDDQIGYYRRATRRIRGGDGKMKDLSPRWYFYYLGTGPEAGLPYGANKDGIIWVATEGALNTPKDHIGTRNPANNAAIVLQLPQGTTLPKGFYAEGSRGGSQASSRSSSRSRNSSRNSTPGSSRGTSPARMAGNGGDAALALLLLDRLNQLESKMSGKGQQQQGQTVTKKSAAEASKKPRQKRTATKAYNVTQAFGRRGPEQTQGNFGDQELIRQGTDYKHWPQIAQFAPSASAFFGMSRIGMEVTPSGTWLTYTGAIKLDDKDPNFKDQVILLNKHIDAYKTFPPTEPKKDKKKKADETQALPQRQKKQQTVILLPAADLDDFSKQLQQSMSSADSTQA

SEQ ID NO: 15374 - protein, 419 aa, Artificial Sequence
  SARS-CoV-2__MT873396.1__nucleocapsid protein (N)
MSDNGPQNQRNAPRITFGGPSDSTGSNQNGERSGARSKQRRPQGLPNNTASWFTALTQHGKEDLKFPRGQGVPINTNSSPDDQIGYYRRATRRIRGGDGKMKDLSPRWYFYYLGTGPEAGLPYGANKDGIIWVATEGALNTPKDHIGTRNPANNAAIVLQLPQGTTLPKGFYAEGSRGGSQASSRSSSRSRNSSRNSTPGSSRGTSPARMVGNGGDAALALLLLDRLNQLESKMSGKGQQQQGQTVTKKSAAEASKKPRQKRTATKAYNVTQAFGRRGPEQTQGNFGDQELIRQGTDYKHWPQIAQFAPSASAFFGMSRIGMEVTPSGTWLTYTGAIKLDDKDPNFKDQVILLNKHIDAYKTFPPTEPKKDKKKKADETQALPQRQKKQQTVTLLPAADLDDFSKQLQQSMSSADSTQA

SEQ ID NO: 15375 - protein, 419 aa, Artificial Sequence
  SARS-CoV-2__MT873497.1__nucleocapsid protein (N)
MSDNGPQNQRNAPRITFGGPSDSTGSNQNGERSGARSKQRRPQGLPNNTASWFTALTQHGKEDLKFPRGQGVPINTNSSPDDQIGYYRRATRRIRGGDGKMKDLSPRWYFYYLGTGPEAGLPYGANKDGIIWVATEGALNTPKDHIGTRNPANNAAIVLQLPQGTTLPKGFYAEGSRGGSQASSRSSSRSRNSSRNSTPGSSRGTSPSRMAGNGGDAALALLLLDRLNQLESKMSGKGQQQQGQTVTKKSAAEASKKPRQKRTATKAYNVTQAFGRRGPEQTQGNFGDQELIRQGTDYKHWPQIAQFAPSASAFFGMSRIGMEVTPSGTWLTYTGAIKLDDKDPNFKDQVILLNKHIDAYKTFPPTEPKKDKKKKADETQALPQRQKKQQTVTLLPAADLDDFSKQLQQSMSSADSTQA

SEQ ID NO: 15376 - protein, 419 aa, Artificial Sequence
  SARS-CoV-2__MT876556.1__nucleocapsid protein (N)
MSDNGPQNQRDAPRITFGGPSDSTGSNQNGERSGARSKQRRPQGLPNNTASWFTALTQHGKEDLKFPRGQGVPINTNSSPDDQIGYYRRATRRIRGGDGKMKDLSPRWYFYYLGTGPEAGLPYGANKDGIIWVATEGALNTPKDHIGTRNPANNAAIVLQLPQGTTLPKGFYAEGSRGGSQASSRSSSRSRNSSRNSTPGSSKRTSPARMAGNGGDAALALLLLDRLNQLESKMSGKGQQQQGQTVTKKSAAEASKKPRQKRTATKAYNVTQAFGRRGPEQTQGNFGDQELIRQGTDYKHWPQIAQFAPSASAFFGMSRIGMEVTPSGTWLTYTGAIKLDDKDPNFKDQVILLNKHIDAYKTFPPTEPKKDKKKKADETQALPQRQKKQQTVTLLPAADLDDFSKQLQQSMSSADSTQA

SEQ ID NO: 15377 - protein, 419 aa, Artificial Sequence
  SARS-CoV-2__MT877324.1__nucleocapsid protein (N)
MSDNGPQNQRNAPRITFGGPSDSTGSNQNGERSGARSKQRRPQGLPNNTASWFTALTQHGKEDLKFPRGQGVPINTNSSPDDQIGYYRRATRRIRGGDGKMKDLSPRWYFYYLGTGPEAGLPYGANKDGIIWVATEGALNTPKDHIGTRNPANNAAIVLQLPQGTTLPKGFYAEGSRGGSQASSRSSLRSRNSSRNSTPGSSRGTSPARMAGNGGDAALALLLLDRLNQLESKMSGKGQQQQCQTVTKKSAAEASKKPRQKRTATKAYNVTQAFGRRGPEQTQGNFGDQELIRQGTDYKHWPQIAQFAPSASAFFGMSRIGMEVTPSGTWLTYTGAIKLDDKDPNFKDQVILLNKHIDAYKTFPPTEPKKDKKKKADETQALPQRQKKQQTVTLLPAADLDDFSKQLQQSMSSADSTQA

SEQ ID NO: 15378 - protein, 419 aa, Artificial Sequence
  SARS-CoV-2__MT872501.1__nucleocapsid protein (N)
MSDNGPQNQRNAPRITFGGPSDSTGSNQNGERSGARSKQRRPQGLPNNTASWFTALTQHGKEDLKFPRGQGVPINTNSSPDDQIGYYRRATRRIRGGDGKMKDLSPRWYFYYLGTGPEAGLPYGANKDGIIWVATEGALNTPKDHIGTRNPANNAAIVLQLPQGTTLPKGFYAEGSRGGSQASSRSSSRSRNSSRNSTPGSNRGISPARMAGNGGDAALALLLLDRLNQLESKMSGKGQQQQGQTVTKKSAAEASKKPRQKRTATKAYNVTQAFGRRGPEQTQGNFGDQELIRQGTDYKHWPQIAQFAPSASAFFGMSRIGMEVTPSGTWLTYTGAIKLDDKDPNFKDQVILLNKHIDAYKTFPPTEPKKDKKKKADETQALPQRQKKQQTVTLLPAADLDDFSKQLQQSMSSADSTQA

SEQ ID NO: 15379 - protein, 419 aa, Artificial Sequence
  SARS-CoV-2__MT856459.1__nucleocapsid protein (N)
MSDNGPQNQRNASRITFGGPSDSTGSNQNGERSGARSKQRRPQGLPNNTASWFTALTQHGKEDLKFPRGQGVPINTNSSPDDQIGYYRRATRRIRGGDGKMKDLSPRWYFYYLGTGPEAGLPYGANKDGIIWVATEGALNTPKDHIGTRNPANNAAIVLQLPQGTTLPKGFYAEGSRGGSQASSRSSSRSRNSSRNSTPGSSKRTSPARMAGNGGDAALALLLLDRLNQLESKMSGKGQQQQGQTVTKKSAAEASKKPRQKRTATKAYNVTQAFGRRGPEQTQGNFGDQELIRQGTDYKHWPQIAQFAPSASAFFGMSRIGMEVTPSGTWLTYTGAIKLDDKDPNFKDQVILLNKHIDAYKTFPPTEPKKDKKKKADETQALPQRQKKQQTVTLLPAADLDDFSKQLQQSMSSADSTQA

SEQ ID NO: 15380 - protein, 419 aa, Artificial Sequence
  SARS-CoV-2__MT846004.1__nucleocapsid protein (N)
MSDNGPQNQRNAPRITFGGPSDSTGSNQNGERSGARSKQRRPQGLPNNTASWFTALTQHGKEDLKFPRGQGVPINTNSSPDDQIGYYRRATRRIRGGDGKMKDLSPRWYFYYLGTGPEAGLPYGANKDGIIWVATEGALNTPKDHIGTRNPANNAAIVLQLPQGTTLPKGFYAEGSRGGSQASSRSSSRSRNSSRNSTPGSSKRTSPARMAGNGGDAALALLLLDRLNQLESKMSGKGQQQQGQTVTKKSAAEASKKPRQKRTATKAYNVTQAFGRRGPEQIQGNFGDQELIRQGTDYKHWPQIAQFAPSASAFFGMSRIGMEVTPSGTWLTYTGAIKLDDKDPNFKDQVILLNKHIDAYKTFPPTEPKKDKKKKADETQALPQRQKKQQTVTLLPAADLDDFSKQLQQSMSSADSTQA

SEQ ID NO: 15381 - protein, 419 aa, Artificial Sequence
  SARS-CoV-2__MT846007.1__nucleocapsid protein (N)
MSDNGPQNQRNAPRITFGGPSDSTGSNQNGERSGARSKQRRPQGLPNNTASWFTALTQHGKEDLKFPRGQGVPINTNSSPDDQIGYYRRATRRIRGGDGKMKDLSPRWYFYYLGTGPEAGLPYGANKDGIIWVATEGALNTPKDHIGTRNPANNAAIVLQLPQGTTLPKGFYAEGSRGGSQASSRSSSRSRNSSRNSTPGSSKRTSPARMAGNGGDAALALLLLDRLNQLESKMSGKGQQQQGQTVTKKSAAEASKKPRQKRTATKAYNVTQAFGRRGPEQTQGNFGDQELIRQGTDYKHWPQIAQFAPSASAFFGMSRIGMEVTPSGTWLTYTGAIKLDDKDPNFKDQVILLNKHIDAYKTFPPTEPKKDKKKKAYETQALPQRQKKQQTVTLLPAADLDDFSKQLQQSMSSADSTQA

SEQ ID NO: 15382 - protein, 419 aa, Artificial Sequence
  SARS-CoV-2__MT846010.1__nucleocapsid protein (N)
MSDNGPQNQRNAPRITFGGPSDSTGSNQNGERSGARSKQRRPQGLPNNTASWFTALTQHGKEDLKFPRGQGVPINTNSSPHDQIGYYRRATRRIRGGDGKMKDLSPRWYFYYLGTGPEAGLPYGANKDGIIWVATEGALNTPKDHIGTRNPANNAAIVLQLPQGTTLPKGFYAEGSRGGSQASSRSSSRSRNSSRNSTPGSSKRTSPARMAGNGGDAALALLLLDRLNQLESKMSGKGQQQQGQTVTKKSAAEASKKPRQKRTATKAYNVTQAFGRRGPEQTQGNFGDQELIRQGTDYKHWPQIAQFAPSASAFFGMSRIGMEVTPSGTWLTYTGAIKLDDKDPNFKDQVILLNKHIDAYKTFPPTEPKKDKKKKADETQALPQRQKKQQTVTLLPAADLDDFSKQLQQSMSSADSTQA

SEQ ID NO: 15383 - protein, 419 aa, Artificial Sequence
  SARS-CoV-2__MT846480.1__nucleocapsid protein (N)
MSDNGPQNQRNAPRITFGGPSDSTGSNQNGERSGARSKQRRPQGLPNNTASWFTALTQHGKEDLKFPRGQGVPINTNSSPDDQIGYYRRATRRIRGGDGKMKDLSPRWYFYYLGTGPEAGLPYGANKDGIIWVATEGALNTPKDHIGTRNPANNAAIVLQLPQGTTLPKGFYAEGSRGGSQASSRSSSRSRNSSRNSTPGSSGGTSPARMAGNGGDAALALLLLDRLNQLESKMSGKGQQQQGQTVTKKSAAEASKKPRQKRTATKAYNVTQAFGRRGPEQTQGNFGDQELIRQGTDYKHWPQIAQFAPSASAFFGMSRIGMEVTPSGTWLTYTGAIKLDDKDPNFKDQVILLNKHIDAYKTFSPTEPKKDKKKKADETQALPQRQKKQQTVTLLPAADLDDFSKQLQQSMSSADSTQA

SEQ ID NO: 15384 - protein, 419 aa, Artificial Sequence
  SARS-CoV-2__MT846494.1__nucleocapsid protein (N)
MSDNGPQNQRNAPRITFGGPSDSTGSNQNGERSGARSKQRRPQGLPNNTASWFTALTQHGKEDLKFPRGQGVPINTNSSPDDQIGYYRRATRRIRGGDGKMKDLSPRWYFYYLGTGPEAGLPYGANKDGIIWVATEGALNTPKDHIGTRNPANNAAIVLQLPQGTTLPKGFYAEGSRGGSQASSRSSSRSRNSSRNSTPGSSSGTSPARMAGNGGDAALALLLLDRLNQLESKMSGKGQQQQGQTVTKKSAAEASKKPRQKRTATKAYNVTQAFGRRGPEQTQGNFGDQELIRQGTDYKHWPQIAQFAPSASAFFGMSRIGMEVTPSGTWLTYTGAIKLDDKDPNFKDQVILLNKHIDAYKTFPPTEPKKDKKKKADETQALPQRQKKQQTVTLLPAADLDDFSKQLQQSMSSADSTQA

SEQ ID NO: 15385 - protein, 419 aa, Artificial Sequence
  SARS-CoV-2__MT846526.1__nucleocapsid protein (N)
MSDNGPQNQRNAPRITFGGPSDSTGSNQNGERSGARSKQRRPQGLPNNTASWFTALTQHGKEDLKFPRGQGVPINTNSSPDDQIGYYRRATRRIRGGDGKMKDLSPRWYFYYLGTGPEAGLPYGANKDGIIWVATEGALNTPKDHIGTRNPANNAAIVLQLPQGTTLPKGFYAEGSRGGSQASSRSSSRSRNSSRNSTPGSSRGTSPARMAGNGGDAALALLLLDRLNQLESKMSGKGQQQQGQTVTKKSAAEASKKPRQKRTATKAYNVTQAFGRRGPEQTQGNFGDQELIRQGTDYKHWPQIAQFAPSASAFFGMSRIGMEVTPSGTWLTYTGAIKLDDKDPNFKDQVILLNKHIDAYKTFPPTEPKKDKKKKADEIQALPQRQKKQQTVTLLPAADLDDFSKQLQQSMSSADSTQA

SEQ ID NO: 15386 - protein, 419 aa, Artificial Sequence
  SARS-CoV-2__MT846598.1__nucleocapsid protein (N)
MSDNGPQNQRNAPRITFGGPSDSTGSNQNGERSGARSKQRRPQGLPNNTASWFTALTQHGKEDLKFPRGQGVPINTNSSPDDQIGYYRRATRRIRGGDGKMKDLSPRWYFYYLGTGPEAGLPYGANKDGIIWVATEGALNTPKDHIGTRNPANNAAIVLQLPQGTTLPKGFYAEGSRGGSQASSRSSSRSRNSSRNSTPGSSRGTSPARMAGNGGDAALALLLLDRLNQLESKMSGKGQQQQGQTVTKKSAAEASKKPRQKRTATKAYNVTQAFGRRGPEQTQGNFGDQELIRQGTDYKHWPQIAQFAPSASAFFGMSRIGMEVTPSGTWLTYTGAIKLDDKDPNFKDQVILLNKHIDAYKTFPPTEPKKDKKKKADATQALPQRQKKQQTVTLLPAADLDDFSKQLQQSMSSADSTQA

SEQ ID NO: 15387 - protein, 419 aa, Artificial Sequence
  SARS-CoV-2__MT846653.1__nucleocapsid protein (N)
MSDNGPQNQRNAPRITFGGPSDSTGSNQNGERSGARSKQRRPQGLPNNTASWFTALTQHGKEDLKFPRGQGVPINTNSSPDDQIGYYRRATRRIRGGDGKMKDLSPRWYFYYLGTGPEAGLPYGANKDGIIWVATEGALNTPKDHIGTRNPANNAAIVLQLPQGTTLPKGFYAEGSRGGSQASSRSSSRSRNSSRNSTPGSSRGTSPARMAGNGGDAALALLLLDRLNQLESKMSGKGQQQQGQTVTKKSAAEASKKPRQKRTATKAYNVTQAFGRRGPEQTQGNFGDQELIRQGTDYKHWPQIAQFAPSASAFFGMSRIGMEVTPSGTWLTYTGAIKLDDKDPNFKDQVILLNKHIDAYKTFPPTESKKDKKKKADETQALPQRQKKQQTVTLLPAADLDDFSKQLQQSMSSADSTQA

SEQ ID NO: 15388 - protein, 419 aa, Artificial Sequence
  SARS-CoV-2__MT846665.1__nucleocapsid protein (N)
MSDNGPQNQRNAPRITFGGPSDSTGSNQNGERSGARSKQRRPQGLPNNTASWFTALTQHGKEDLKFPRGQGVPINTNSSPDDQIGYYRRATRRIRGGDGKMKDLSPRWYFYYLGTGPEAGLHYGANKDGIIWVATEGALNTPKDHIGTRNPANNAAIVLQLPQGTTLPKGFYAEGSRGGSQASSRSSSRSRNSSRNSTPGSSKRTSPARMAGNGGDAALALLLLDRLNQLESKMSGKGQQQQGQTVTKKSAAEASKKPRQKRTATKAYNVTQAFGRRGPEQTQGNFGDQELIRQGTDYKHWPQIAQFAPSASAFFGMSRIGMEVTPSGTWLTYTGAIKLDDKDPNFKDQVILLNKHIDAYKTFPPTEPKKDKKKKADETQALPQRQKKQQTVTLLPAADLDDFSKQLQQSMSSADSTQA

SEQ ID NO: 15389 - protein, 419 aa, Artificial Sequence
  SARS-CoV-2__MT846681.1__nucleocapsid protein (N)
MSDNGPQNQRNAPRITFGGPSDSTGSNQNGERSGARSKQRRPQGLPNNTASWFTALTQHGKEDLKFPRGQGVPINTNSSPDDQIGYYRRATRRIRGGDGKMKDLSPRWYFYYLGTGPEAGLPYGANKDGIIWVATEGALNTPKDHIGTRNPANNAAIVLQLPQGTTLPKGFYAEGSRGGSQASSRSSSRSRNSSRNSTPGSSRGTSSARMAGNGGDAALALLLLDRLNQLESKMSGKGQQQQGQTVTKKSAAEASKKPRQKRTATKAYNVTQAFGRRGPEQTQGNFGDQELIRQGTDYKHWPQIAQFAPSASAFFGMSRIGMEVTPSGTWLTYTGAIKLDDKDPNFKDQVILLNKHIDAYKTFPPTEPKKDKKKKADETQALPQRQKKQQTVTLLPAADLDDFSKQLQQSMSSADSTQA

SEQ ID NO: 15390 - protein, 419 aa, Artificial Sequence
  SARS-CoV-2__MT847216.1__nucleocapsid protein (N)
MSDNGPQNQRNALRITFGGPSDSTGSNQNGERSGARSKQRRPQGLPNNTASWFTALTQHGKEDLKFPRGQGVPINTNSSPDDQIGYYRRATRRIRGGDGKMKDLSPRWYFYYLGTGPEAGLPYGANKDGIIWVATEGALNTPKDHIGTRNPANNAAIVLQLPQGTTLPKGFYAEGSRGGSQASSRSSSRSRNSSRNSTPGSSKRTSPARMAGNGGDAALALLLLDRLNQLESKMSGKGQQQQGQTVTKKSAAEASKKPRQKRTATKAYNVTQAFGRRGPEQTQGNFGDQELIRQGTDYKHWPQIAQFAPSASAFFGMSRIGMEVTPSGTWLTYTGAIKLDDKDPNFKDQVILLNKHIDAYKTFPPTEPKKDKKKKADETQALPQRQKKQQTVTLLPAADLDDFSKQLQQSMSSADSTQA

SEQ ID NO: 15391 - protein, 419 aa, Artificial Sequence
  SARS-CoV-2__MT847220.1__nucleocapsid protein (N)
MSDNGPQNQRNAPRITFGGPSDSTGSNQNGERSGARSKQRRPQGLPNNTASWFTALTQHGKEDLKFPRGQGVPINTNSSPDDQIGYYRRATRRIRGGDGKMKDLSPRWYFYYLGTGPEAGLPYGANKDGIIWVATEGALNTPKDHIGTRNPANNAAIVLQLPQGTTLPKGFYAEGSRGGSQASSRSSSRSRNSSRNSTPGSSKRTSPARMSGNGGDAALALLLLDRLNQLESKMSGKGQQQQGQTVTKKSAAEASKKPRQKRTATKAYNVTQAFGRRGPEQTQGNFGDQELIRQGTDYKHWPQIAQFAPSASAFFGMSRIGMEVTPSGTWLTYTGAIKLDDKDPNFKDQVILLNKHIDAYKTFPPTEPKKDKKKKADETQALPQRQKKQQTVTLLPAADLDDFSKQLQQSMSSADSTQA

SEQ ID NO: 15392 - protein, 419 aa, Artificial Sequence
  SARS-CoV-2__MT847221.1__nucleocapsid protein (N)
MSDNGPQNQRNAPRITFGGPSDSTGSNQNGERSGARSKQRRPQGLPNNTASWFTALTQHGKEDLKFPRGQGVPINTNSSPDDQIGYYRRATRRIRGGDGKMKDLSPRWYFYYLGTGPEAGLPYGANKDGIIWVATEGALNTPKDHIGTRNPANNAAIVLQLPQGTTLPKGFYAEGSRGGSQASSRSSSRSRNSSRNSTPGSSKRTSPARMAGNGGDAALALLLLDRLNQLESKMSGKGQQQQGQTVTKKSAAEASKKPRQKRTATKAYNVTQAFGRRGPEQTQGNFGDQELIRQGTDYKHWPQIAQFAPSASAFFGMSRIGMEVTPSGTWLTYTGAIKLDDKDPNFKDQVILLNKHIDAYKTFPPTEPKKDKKKKADATQALPQRQKKQQTVTLLPAADLDDFSKQLQQSMSSADSTQA

SEQ ID NO: 15393 - protein, 419 aa, Artificial Sequence
  SARS-CoV-2__MT847223.1__nucleocapsid protein (N)
MSDNGPQNHRNAPRITFGGPSDSTGSNQNGERSGARSKQRRPQGLPNNTASWFTALTQHGKEDLKFPRGQGVPINTNSSPDDQIGYYRRATRRIRGGDGKMKDLSPRWYFYYLGTGPEAGLPYGANKDGIIWVATEGALNTPKDHIGTRNPANNAAIVLQLPQGTTLPKGFYAEGSRGGSQASSRSSSRSRNSSRNSTPGSSKRTSPARMAGNGGDAALALLLLDRLNQLESKMSGKGQQQQGQTVTKKSAAEASKKPRQKRTATKAYNVTQAFGRRGPEQTQGNFGDQELIRQGTDYKHWPQIAQFAPSASAFFGMSRIGMEVTPSGTWLTYTGAIKLDDKDPNFKDQVILLNKHIDAYKTFPPTEPKKDKKKKADETQALPQRQKKQQTVTLLPAADLDDFSKQLQQSMSSADSTQA

SEQ ID NO: 15394 - protein, 419 aa, Artificial Sequence
  SARS-CoV-2__MT847226.1__nucleocapsid protein (N)
MSDNGPQNQRNAPRITFGGPSDSTGSNQNGERSGARSKQRRPQGLPNNTASWFTALTQHGKEDLKFPRGQGVPINTNSSPDDQIGYYRRATRRIRGGDGKMKDLSPRWYFYYLGTGPEAGLPYGANKDGIIWVATEGAFNTPKDHIGTRNPANNAAIVLQLPQGTTLPKGFYAEGSRGGSQASSRSSSRSRNSSRNSTPGSSKRTSPARMAGNGGDAALALLLLDRLNQLESKMSGKGQQQQGQTVTKKSAAEASKKPRQKRTATKAYNVTQAFGRRGPEQTQGNFGDQELIRQGTDYKHWPQIAQFAPSASAFFGMSRIGMEVTPSGTWLTYTGAIKLDDKDPNFKDQVILLNKHIDAYKTFPPTEPKKDKKKKAYETQALPQRQKKQQTVTLLPAADLDDFSKQLQQSMSSADSTQA

SEQ ID NO: 15395 - protein, 419 aa, Artificial Sequence
  SARS-CoV-2__MT843286.1__nucleocapsid protein (N)
MSDNGPQNQRNAPRITFGGPSDSTGSNQNGERSGARSKQRRPQGLPNNTASWFTALTQHGKEDLKFPRGQGVPINTNSSPDDQIGYYRRATRRIRGGDGKMKDLSPRWYFYYLGTGPEAGLPYGANKDGIIWVATEGALNTPKDHIGTRNPANNAAIVLQLPQGTTLPKGFYAEGSRGGSQASSRSSSRSRNSSRNSTPGSSRGTSPARMAGNGGDAALALLLLDRLNQLESKISGKGQQQQGQTVTKKSAAEASKKPRQKRTATKAYNVTQAFGRRGPEQTQGNFGDQELIRQGTDYKHWPQIAQFAPSASAFFGMSRIGMEVTPSGTWLTYTGAIKLDDKDPNFKDQVILLNKHIDAYKTFPPTEPKKDKKKKADETQALPQRQKKQQTVTLLPAADLDDFSKQLQQSMSSADSTQA

SEQ ID NO: 15396 - protein, 419 aa, Artificial Sequence
  SARS-CoV-2__MT843316.1__nucleocapsid protein (N)
MSDNGPQNQRNAPRITFGGPSDSTGSNQNGERSGARSKQRRPQGLPNNTASWFTALTQHGKEDLKFPRGQGVPINTNSSPDDQIGYYRRATRRIRGGDGKMKDLSPRWYFYYLGTGPEAGLPYGANKDGIIWVATEGALNTPKDHIGTRNPANNAAVVLQLPQGTTLPKGFYAEGSRGGSQAYSRSSSRSRNSSRNSTPGSSRGTSPARMAGNGGDAALALLLLDRLNQLESKMSGKGQQQQGQTVTKKSAAEASKKPRQKRTATKAYNVTQAFGRRGPEQTQGNFGDQELIRQGTDYKHWPQIAQFAPSASAFFGMSRIGMEVTPSGTWLTYTGAIKLDDKDPNFKDQVILLNKHIDAYKTFPPTEPKKDKKKKADETQALPQRQKKQQTVTLLPAADLDDFSKQLQQSMSSADSTQA

SEQ ID NO: 15397 - protein, 419 aa, Artificial Sequence
  SARS-CoV-2__MT844022.1__nucleocapsid protein (N)
MSDNGPQNQRNAPRITFGGPSDSTGSNQNGERSGARSKQRRPQGLPNNTASWFTALTQHGKEDLKFPRGQGVPINTNSSPDDQIGYYRRATRRIRGGDGKMKDLSPRWYFYYLGTGPEAGLPYGANKDGIIWVATEGALNTPKDHIGTRNPANNAAIVLQLPQGTTLPKGFYAEGSRGGSQASSRSSSRSRNSSRNSTPGSSRGTSPARMAGNGGDAALALLLLDRLNQLESKMSGKGQQQQGQTVTKKSAAEASKKPRQKRTATKAYNVTQAFGRRGPEQTQGNFGDQELIRQGTDYKHWPQIAQFAPSASAFFGMSRVGMEVTPSGTWLTYTGAIKLDDKDPNFKDQVILLNKHIDAYKTFPPTEPKKDKKKKADETQALPQRQKKQQTVTLLPAADLDDFSKQLQQSMSSADSTQA

SEQ ID NO: 15398 - protein, 419 aa, Artificial Sequence
  SARS-CoV-2__MT844044.1__nucleocapsid protein (N)
MSDNGPQNQRNAPRITFGGPSDSTGSNQNGERSGARSKQRRPQGLPNNTASWFTALTQHGKEDLKFPRGQGVPINTNSSPDDQIGYYRRATRRIRGGDGKMKDLSPRWYFYYLGTGPEAGLPYGANKDGIIWVATEGALNTPKDHIGSRNPANNAAIVLQLPQGTTLPKGFYAEGSRGGSQASSRSSSRSRNSSRNSTPGSSRGTSPARMAGNGGDAALALLLLDRLNQLESKMSGKGQQQQGQTVTKKSAAEASKKPRQKRTATKAYNVTQAFGRRGPEQTQGNFGDQELIRQGTDYKHWPQIAQFAPSASAFFGMSRIGMEVTPSGTWLTYTGAIKLDDKDPNFKDQVILLNKHIDAYKTFPPTEPKKDKKKKADETQALPQRQKKQQTVTLLPAADLDDFSKQLQQSMSSADSTQA

SEQ ID NO: 15399 - protein, 419 aa, Artificial Sequence
  SARS-CoV-2__MT831123.1__nucleocapsid protein (N)
MSDNGPQNQRNAPRITFGEPSDSTGSNQNGERSGARSKQRRPQGLPNNTASWFTALTQHGKEDLKFPRGQGVPINTNSSPDDQIGYYRRATRRIRGGDGKMKDLSPRWYFYYLGTGPEAGLPYGANKDGIIWVATEGALNTPKDHIGTRNPANNAAIVLQLPQGTTLPKGFYAEGSRGGSQASSRSSSRSRNSSRNSTPGSSKRTSPARMAGNGGDAALALLLLDRLNQLESKMSGKGQQQQGQTVTKKSAAEASKKPRQKRTATKAYNVTQAFGRRGPEQTQGNFGDQELIRQGTDYKHWPQIAQFAPSASAFFGMSRIGMEVTPSGTWLTYTGAIKLDDKDPNFKDQVILLNKHIDAYKTFPPTEPKKDKKKKADETQALPQRQKKQQTVTLLPAADLDDFSKQLQQSMSSADSTQA

SEQ ID NO: 15400 - protein, 419 aa, Artificial Sequence
  SARS-CoV-2__MT831131.1__nucleocapsid protein (N)
MSDNGPQNQRNAPRITFGGPSDSTGSNQNGERSGARSKQRRPQGLPNNTASWFTALTQHGKEDLKFPRGQGVPINTNSSPDDQIGYYRRATRRIRGGDGKMKDLSPRWYFYYLGTGPEAGLPYGANKDGIIWVATEGALNTPKDHIGTRNPANNAAIVLQLPQGTTLPKGFYAEGSRGGSQASSRSSSRSRNSSRNSTPGSSKRTSPARMAGNGGDAALALLLLDRLNQLESKMSGKGQQQQGQTVTKKSAAEASKKPRQKRTATKAYNVTQAFGRRGPEQTQGNFGDQELIRQGTDYKHWPQIAQFAPSASAFFGMSRIGMEVTLSGTWLTYTGAIKLDDKDPNFKDQVILLNKHIDAYKTFPPTEPKKDKKKKADETQALPQRQKKQQTVTLLPAADLDDFSKQLQQSMSSADSTQA

SEQ ID NO: 15401 - protein, 419 aa, Artificial Sequence
  SARS-CoV-2__MT831148.1__nucleocapsid protein (N)
MSDNGPQNQRNAPRITFGGPSDSTGSNQNGERSGARSKQRRPQGLPNNTASWFTALTQHGKEDLKFPRGQGVPININSSPDDQIGYYRRATRRIRGGDGKMKDLSPRWYFYYLGTGPEAGLPYGANKDGIIWVATEGALNTPKDHIGTRNPANNAAIVLQLPQGTTLPKGFYAEGSRGGSQASSRSSSRSRNSSRNSTPGSSKRTSPARMAGNGGDAALALLLLDRLNQLESKMSGKGQQQQGQTVTKKSAAEASKKPRQKRTATKAYNVTQAFGRRGPEQTQGNFGDQELIRQGTDYKHWPQIAQFAPSASAFFGMSRIGMEVTPSGTWLTYTGAIKLDDKDPNFKDQVILLNKHIDAYKTFPPTEPKKDKKKKADETQALPQRQKKQQTVTLLPAADLDDFSKQLQQSMSSADSTQA

SEQ ID NO: 15402 - protein, 419 aa, Artificial Sequence
  SARS-CoV-2__MT831153.1__nucleocapsid protein (N)
MSDNGPQNQRNAPRITFGGPSDSTGSNQNGERSGARSKQRRPQGLPNNTASWFTALTQHGKEDLKFPRGQGVPINTNSSPDDQIGYYRRATRRIRGGDGKMKDLSPRWYFYYLGTGPEAGLPYGANKDGIIWVATEGALNTPKDHIGTRNLANNAAIVLQLPQGTTLPKGFYAEGSRGGSQASSRSSSRSRNSSRNSTPGSSKRTSPARMAGNGGDAALALLLLDRLNQLESKMSGKGQQQQGQTVTKKSAAEASKKPRQKRTATKAYNVTQAFGRRGPEQTQGNFGDQELIRQGTDYKHWPQIAQFAPSASAFFGMSRIGMEVTPSGTWLTYTGAIKLDDKDPNFKDQVILLNKHIDAYKTFPPTEPKKDKKKKADETQALPQRQKKQQTVTLLPAADLDDFSKQLQQSMSSADSTQA

SEQ ID NO: 15403 - protein, 419 aa, Artificial Sequence
  SARS-CoV-2__MT831158.1__nucleocapsid protein (N)
MSDNGPQNQRNAPRITFGGPSDSTGSNQNGERSGARSKQRRPQGLPNNTASWFTALTQHGKEDLKFPRGQGVPINTNSSPDDQIGYYRRATRRIRGGDGKMKDLSPRWYFYYLGTGPEAGLPYGANKDGIIWVATEGALNTPKDHIGTRNPANNAAIVLQLPQGTTLPKGFYAEGSRGGSQASSRSSSRSRNSSRNSTPGSSKRTSPARMAGNGGDAALALLLLDRLNQLESKMSGKGQQQQGQTVTKKSAAEASKKPRQKRTATKAYNVTQAFGRRGPEQTQGNFGDQELIRQGTDYKHWPQIAQFAPSASAFFGMSRIGMEVTPSGTWLTYTGAIKLDDKDPNFKDQVILLNKHIDAYKTFPPTEPKKDKKKKADETQALPQRHKKQQTVTLLPAADLDDFSKQLQQSMSSADSTQA

SEQ ID NO: 15404 - protein, 419 aa, Artificial Sequence
  SARS-CoV-2__MT831179.1__nucleocapsid protein (N)
MSDNGPQNQRNAPRITFGGPSDSTGSNQNGERSGARSKQRRPQGLPNNTASWFTALTQHGKEDLKFPRGQGVPINTNSSPDDQIGYYRRATRRIRGGDGKMKDLSPRWYFYYLGTGPEAGLPYGANKDGIIWVATEGALNTPKDHIGTRNPANNAAIVLQLPQGTTLPKGFYAEGSRGGSQASSRSSSRSRNSSRNSTPGSSKRTSPARMAGNGGDAALALLLLDRLNQLESKMSGKGQQQQGQTVTKKSAAEASKKPRQKRTATKAYNVTQAFGRRGPEQTQGNFGDQELIRQGTDYKHWPQIAQFAPSASAFFGMSRIGMEVTPSGTWLTYTGAIKLDDKDPNFKDQVILLNKHIDAYKTFPPTEPKKDKKKKADETQASPQRQKKQQTVTLLPAADLDDFSKQLQQSMSSADSTQA

SEQ ID NO: 15405 - protein, 419 aa, Artificial Sequence
  SARS-CoV-2__MT831196.1__nucleocapsid protein (N)
MSDNGPQNQRNAPRITFGGPSDSTGSNQNGERSGARSKQRRPQGLPNNTASWFTALTQHGKEDLKFPRGQGVPINTNSSPDDQIGYYRRATRRIRGGDGKMKDLSPRWYFYYLGTGPEAGLPYGANKDGIIWVATEGALNTPKDHIGTRNPANNAAIVLQLPQGTTLPKGFYAEGSRGGSQASSRSSSRSRNSSRNSTPGSSKRTSPARMAGNGGDAALALLLLDRLNQLESKMSGKGQQQQGQTVTKKSAAEASKKPRQKRTATKAYNVTQAFGRRGPEQTQGNFGDQELIRQGTDYKHWPQIAQFAPSASAFFGMSRIGMEVTPSGTWLTYTGAIKLDDKDPNFKDQVILLNKHIDAYKTFPPTEPKKDKNKKADETQALPQRQKKQQTVTLLPAADLDDFSKQLQQSMSSADSTQA

SEQ ID NO: 15406 - protein, 419 aa, Artificial Sequence
  SARS-CoV-2__MT831223.1__nucleocapsid protein (N)
MSDNGPQNQRNAPRITFGGPSDSTGSNQNGERSGARSKQRRPQGLPNNTASWFTALTQHGKEDLKFPRGQGVPINTNSSPDDQIGYYRRATRRIRGGYGKMKDLSPRWYFYYLGTGPEAGLPYGANKDGIIWVATEGALNTPKDHIGTRNPANNAAIVLQLPQGTTLPKGFYAEGSRGGSQASSRSSSRSRNSSRNSTPGSSKRTSPARMAGNGGDAALALLLLDRLNQLESKMSGKGQQQQGQTVTKKSAAEASKKPRQKRTATKAYNVTQAFGRRGPEQTQGNFGDQELIRQGTDYKHWPQIAQFAPSASAFFGMSRIGMEVTPSGTWLTYTGAIKLDDKDPNFKDQVILLNKHIDAYKTFPPTEPKKDKKKKADETQALPQRQKKQQTVTLLPAADLDDFSKQLQQSMSSADSTQA

SEQ ID NO: 15407 - protein, 419 aa, Artificial Sequence
  SARS-CoV-2__MT831224.1__nucleocapsid protein (N)
MSDNGPQNQRNAPRITFGGPSDSTGSNQNGERSGARSKQRRPQGLPNNTASWFTALTQHGKEDLKFPRGQGVPINTNSSPDDQIGYYRRATRRIRGGDGKMKDLSPRWYFYYLGTGPEAGLPYGANKDGIIWVATEGALNTPKDHIGTRNLANNAAIVLQLPQGTTLPKGFYAEGSRGGSQASSRSSSRSRNSSRNSTPGSSRGTSPARMAGNGGDAALALLLLDRLNQLESKMSGKGQQQQGQTVTKKSAAEASKKPRQKRTATKAYNVTQAFGRRGPEQTQGNFGDQELIRQGTDYKHWPQIAQFAPSASAFFGMSRIGMEVTPSGTWLTYTGAIKLDDKDPNFKDQVILLNKHIDAYKTFPPTEPKKDKKKKADETQALPQRQKKQQTVTLLPAADLDDFSKQLQQSMSSADSTQA

SEQ ID NO: 15408 - protein, 419 aa, Artificial Sequence
  SARS-CoV-2__MT831284.1__nucleocapsid protein (N)
MSDNGPQNQRNAPRITFGGPSDSTGSNQNGERSGARSKQRRPQGLPNNTASWFTALTQHGKEDLKFPRGQGVPINTNSSPDDQIGYYRRATRRIRGGDGKMKDLSPRWYFYYLGTGPEAGLPYGANKDGIIWVATEGALNTPKDHIGTRNPANNAAIVLQLPQGTTLPKGFYAEGSRGGSQASSRSSSRSRNSSRNSTPGSSKRTSPARMAGNGGDAALALLLLDRLNQLESKMSGKSQQQQGQTVTKKSAAEASKKPRQKRTATKAYNVTQAFGRRGPEQTQGNFGDQELIRQGTDYKHWPQIAQFAPSASAFFGMSRIGMEVTPSGTWLTYTGAIKLDDKDPNFKDQVILLNKHIDAYKTFPPTEPKKDKKKKADETQALPQRQKKQQTVTLLPAADLDDFSKQLQQSMSSADSTQA

SEQ ID NO: 15409 - protein, 419 aa, Artificial Sequence
  SARS-CoV-2__MT831285.1__nucleocapsid protein (N)
MSDNGPQNQRNAPRITFGGPSDSTGSNQNGERSGARSKQRRPQGLPNNTASWFTALTQHGKEDLKFPRGQGVPINTNSSPDDQIGYYRRATRRIRGGDGKMKDLSPRWYFYYLGTGPEAGLPYGANKDGIIWVATEGALNTPKDHIGTRNPANNAAIVLQLPQGTTLPKGFYAEGSRGGSQASSRSSSRSRNSSRNSTPGSSKRTSPARMAGNGGDAALALLLLDRLNHLESKMSGKGQQQQGQTVTKKSAAEASKKPRQKRTATKAYNVTQAFGRRGPEQTQGNFGDQELIRQGTDYKHWPQIAQFAPSASAFFGMSRIGMEVTPSGTWLTYTGAIKLDDKDPNFKDQVILLNKHIDAYKTFPPTEPKKDKKKKADETQALPQRQKKQQTVTLLPAADLDDFSKQLQQSMSSADSTQA

SEQ ID NO: 15410 - protein, 419 aa, Artificial Sequence
  SARS-CoV-2__MT831300.1__nucleocapsid protein (N)
MSDNGPQNQRNAPRITFGGPSDSTGSNQNGERSGARSKQRRPQGLPNNTASWFTALTQHGKEDLKFPRGQGVPINTNSSPDDQIGYYRRATRRIRGGDGKMKDLSPRWYFYYLGTGPEAGLPYGANKDGIIWVATEGALNTPKYHIGTRNPANNAAIVLQLPQGTTLPKGFYAEGSRGGSQASSRSSSRSRNSSRNSTPGSSKRTSPARMAGNGGDAALALLLLDRLNQLESKMSGKGQQQQGQTVTKKSAAEASKKPRQKRTATKAYNVTQAFGRRGPEQTQGNFGDQELIRQGTDYKHWPQIAQFAPSASAFFGMSRIGMEVTPSGTWLTYTGAIKLDDKDPNFKDQVILLNKHIDAYKTFPPTEPKKDKKKKADETQALPQRQKKQQTVTLLPAADLDDFSKQLQQSMSSADSTQA

SEQ ID NO: 15411 - protein, 419 aa, Artificial Sequence
  SARS-CoV-2__MT831333.1__nucleocapsid protein (N)
MSDNGPKNQRNAPRITFGGPSDSTGSNQNGERSGARSKQRRPQGLPNNTASWFTALTQHGKEDLKFPRGQGVPINTNSSPDDQIGYYRRATRRIRGGDGKMKDLSPRWYFYYLGTGPEAGLPYGANKDGIIWVATEGALNTPKDHIGTRNPANNAAIVLQLPQGTTLPKGFYAEGSRGGSQASSRSSSRSRNSSRNSTPGSSRGTSPARMAGNGGDAALALLLLDRLNQLESKMSGKGQQQQGQTVTKKSAAEASKKPRQKRTATKAYNVTQAFGRRGPEQTQGNFGDQELIRQGTDYKHWPQIAQFAPSASAFFGMSRIGMEVTPSGTWLTYTGAIKLDDKDPNFKDQVILLNKHIDAYKTFPPTEPKKDKKKKADETQALPQRQKKQQTVTLLPAADLDDFSKQLQQSMSSADSTQA

SEQ ID NO: 15412 - protein, 419 aa, Artificial Sequence
  SARS-CoV-2__MT831357.1__nucleocapsid protein (N)
MSDNGPQNQRNAPRITFGGPSDSTGSNQNGERSGARSKQRRPQGLPNNTASWFTALTQHGKEDLKFPRGQGVPINTNSSPDDQIGYYRRATRRIRGGDGKMKDLSPRWYFYYLGTGPEAGLPYGANKDGIIWVATEGALNTPKDHIGTRNPANNAAIVLQLPQGTTLPKGFYAEGSRGGSQASSRSSSRSRNSSRNSTPGSSKRTSPARMAGNGGDAALALLLLDRLNQLESKMSGKGQQQQGQTVTKKSAAEASKKPRQKRTATKAYNVTQAFGRRGPEQTQGNFGDQELIRRGTDYKHWPQIAQFAPSASAFFGMSRIGMEVTPSGTWLTYTGAIKLDDKDPNFKDQVILLNKHIDAYKTFPPTEPKKDKKKKADETQALPQRQKKQQTVTLLPAADLDDFSKQLQQSMSSADSTQA

SEQ ID NO: 15413 - protein, 419 aa, Artificial Sequence
  SARS-CoV-2__MT831359.1__nucleocapsid protein (N)
MSDNGPQNQRNAPRITFGGPSDSTGSNQNGERSGARSKQRRPQGLPNNTASWFTALTQHGKEDLKFPRGQGVPINTNSSPDDQIGYYRRATRRIRGGDGKMKDLSPRWYFYYLGTGPEAGLPYGANKDGIIWVATEGALNTPKDHIGTRNPANNAAIVLQLPQGTTLPKGFYAEGSRGGSQASSRSSSRSRNSSRNSTPGSSKRTSPARMAGNGGDAALALLLLDRLNQLESKMSGKGQQQQGQTVTKKSAAEASKKPRQKRTATKAYNVTQAFGRRGPEQTQGNFGDQELIRQGTDYKHWPQIAQFAPSASAFFGMSRIGMEVIPSGTWLTYTGAIKLDDKDPNFKDQVILLNKHIDAYKTFPPTEPKKDKKKKADETQALPQRQKKQQTVTLLPAADLDDFSKQLQQSMSSADSTQA

SEQ ID NO: 15414 - protein, 419 aa, Artificial Sequence
  SARS-CoV-2__MT831366.1__nucleocapsid protein (N)
MSDNGPQNQRNAPRITFGGPSDSTGSNQNGERSGARSKQRRPQGLPNNTASWFTALTQHGKEDLKFPRGQGVPINTNSSPDDQIGYYRRATRRIRGGDGKMKDLSPRWYFYYLGTGPEAGLPYGANKDGIIWVATEGALNTPKDHIGTRNPANNAAIVLQLPQGTTLPKGFYAEGSRGGSQASSRSSSRSRNSSRNSTPGSSRGTSPARMAGNGGDAALALLLLDRLNQLESKMSGKGQQQQGQTVTKKSAAEASKKPRQKRTATKAYNVTQAFGRRGPEQTQGNFGDQELIRQGTDYKHWPQIAQFAPSASAFFGMSRIGMEVTPSGTWLTYTGAIKLDDKDPNFKDQVILLNKHIDAYKTFPPTEPKKDKKKKADETQALPQRQKKQQTVTLLPAADLDDFSKQLQQSMSSADSIQA

SEQ ID NO: 15415 - protein, 419 aa, Artificial Sequence
  SARS-CoV-2__MT831409.1__nucleocapsid protein (N)
MSDNGPQNQRNAPRITFGGPSDSTGSNQNGERSGARSKQRRPQGLPNNTASWFTALTQHGKEDLKFPRGQGVPINTNSSPDDQIGYYRRATRRIRGGDGKMKDLSPRWYFYYLGTGPEAGLPYGANKDGIIWVATEGALNTPKDHIGTRNPANNAAIVLQLPQGTTLPKGFYAEGSRGGSQASSRSSSRSRNSSRNSTPGSSKRTSPARMAGNGGDAALALLLLDRLNQLESKMSGKGQQQQGQTVTKKSAAEASKKPRQKRTATKAYNVTQAFGRRGPEQTQGNFGDQELIRQGTDYKHWPQIAQFAPSASAFFGMSRIGMEVTPSGTWLTYTGAIKLDDKDPNFKDQVILLNKHIDAYKTFPPTEPKKDKKKKADETQALPQRQKKQQTVTLLPAVDLDDFSKQLQQSMSSADSTQA

SEQ ID NO: 15416 - protein, 419 aa, Artificial Sequence
  SARS-CoV-2__MT831449.1__nucleocapsid protein (N)
MSDNGPQNQRNAPRITFGGPSDSTGSNQNGERSGARSKQRRPQGLPNNTASWFTALTQHGKEDLKFPRGQGVPINTNSSPDDQIGYYRRATRRIRGGDGKMKDLSPRWYFYYLGTGPEAGLPYGANKDGIIWVATEGALNTPKDHIGTRNPANNAAIVLQLPQGTTLPKGFYAEGSRGGSQASSRSSSRSRNSSRNSIPGSSRGTSPARMAGNGGDAALALLLLDRLNQLESKMSGKGQQQQGQTVTKKSAAEASKKPRQKRTATKAYNVTQAFGRRGPEQTQGNFGDQELIRQGTDYKHWPQIAQFAPSASAFFGMSRIGMEVTPSGTWLTYTGAIKLDDKDPNFKDQVILLNKHIDAYKTFPPTEPKKDKKKKADETQALPQRQKKQQTVTLLPAADLDDFSKQLQQSMSSADSTQA

SEQ ID NO: 15417 - protein, 419 aa, Artificial Sequence
  SARS-CoV-2__MT831483.1__nucleocapsid protein (N)
MSDNGPQNQRNAPRITFGGPSDSTGSNQNGERSGARSKQRRPQGLPNNTASWFTALTQHGKEDLKFPRGQGVPINTNSSPDDQIGYYRRATRRIRGGDGKMKDLSPRWYFYYLGTGPEAGLPYGANKDGIIWVATEGALNTPKDHIGTRNPANNAAIVLQLPQGTILPKGFYAEGSRGGSQASSRSSSRSRNSSRNSTPGSSRGTSPARMAGNGGDAALALLLLDRLNQLESKMSGKGQQQQGQTVTKKSAAEASKKPRQKRTATKAYNVTQAFGRRGPEQTQGNFGDQELIRQGTDYKHWPQIAQFAPSASAFFGMSRIGMEVTPSGTWLTYTGAIKLDDKDPNFKDQVILLNKHIDAYKTFPPTEPKKDKKKKADETQALPQRQKKQQTVTLLPAADLDDFSKQLQQSMSSADSTQA

SEQ ID NO: 15418 - protein, 419 aa, Artificial Sequence
  SARS-CoV-2__MT831593.1__nucleocapsid protein (N)
MSDNGPQNQRNAPRITFGGPSDSTGSNQNGERSGARSKQRRPQGLPNNTASWFTALTQHGKEDLKFSRGQGVPINTNSSPDDQIGYYRRATRRIRGGDGKMKDLSPRWYFYYLGTGPEAGLPYGANKDGIIWVATEGALNTPKDHIGTRNPANNAAIVLQLPQGTTLPKGFYAEGSRGGSQASSRSSSRSRNSSRNSTLGSSRGTSPARMAGNGGDAALALLLLDRLNQLESKMSGKGQQQQGQTVTKKSAAEASKKPRQKRTATKAYNVTQAFGRRGPEQTQGNFGDQELIRQGTDYKHWPQIAQFAPSASAFFGMSRIGMEVTPSGTLLTYTGAIKLDDKDPNFKDQVILLNKHIDAYKTFPPTEPKKDKKKKADETQALPQRQKKQQTVTLLPAADLDDFSKQLQQSMSSADSTQA

SEQ ID NO: 15419 - protein, 419 aa, Artificial Sequence
  SARS-CoV-2__MT831658.1__nucleocapsid protein (N)
MSDNGPQNQRNAPRITFGGPSDSTGSNQNGERSGARSKQRRPQGLPNNTASWFTALTQHGKEDLKFPRGQGVPINTNSSPDDQIGYYRRATRRIRGGDGKMKDLSPRWYFYYLGTGPEAGLPYGANKDGIIWVATEGALNTPKDHIGTRNPANNAAIVLQLPQGTTLPKGFYAEGSRGGSQASSRSSSRSRNSSRNSTPGSSKRTSPARMAGNGGDAALALLLLDRLNQLESKMSGKGQQQQGQTVTKKSAAEASKKPRQKRTATKAYNVTQAFGRRGPEQTQGNFGDQELIRQGTDYKHWPQIAQFAPSASAFFGMSRIGMEVTPSGTWLTYTGAIKLDDKDPNFKDQVILLNKHIDAYKTFPPTEPKKDKKKKADETQALPQRQKKQQTVTLLPAADLDDFSKQLQQSMGSADSTQA

SEQ ID NO: 15420 - protein, 419 aa, Artificial Sequence
  SARS-CoV-2__MT831701.1__nucleocapsid protein (N)
MSDNGPQNQRNAPRITFGGPSDSTGSNQNGERSGARSKQRRPQGLPNNTASWFTALTQHGKEDLKFPRGQGVPINTNSSPDDQIGYYRRATRRIRGGDGKMKDLSPRWYFYYLGTGPEAGLPYGANKDGIIWVATEGALNTPKDHIGTRNPANNAAIVLQLPQGTTLPKGFYAEGSRGGSQASSRSSSRSRNSSRNSTPGSSKRTSPARMAGNGGDAALALLLLDRLNQLESKMSGKGQQQQGQTVTKKSSAEASKKPRQKRTATKAYNVTQAFGRRGPEQTQGNFGDQELIRQGTDYKHWPQIAQFAPSASAFFGMSRIGMEVTPSGTWLTYTGAIKLDDKDPNFKDQVILLNKHIDAYKTFPPTEPKKDKKKKADETQALPQRQKKQQTVTLLPAADLDDFSKQLQQSMSSADSTQA

SEQ ID NO: 15421 - protein, 419 aa, Artificial Sequence
  SARS-CoV-2__MT831717.1__nucleocapsid protein (N)
MSDNGPQNQRNAPRITFGGPSDSTGSNQNGERSGARSKQRRPQGLPNNTASWFTALTQHGKEDLKFPRGQGVPINTNSSPDDQIGYYRRATRRIRGGDGKMKDLSPRWYFYYLGTGPEAGLPYGANKDGIIWVATEGALNTPKDHIGTRNPANNAAIVLQLPQGTTLPKGFYAEGSRGGSQASSRSSSRSRNSARNSTPGSSRGTSPARMAGNGGDAALALLLLDRLNQLESKMSGKGQQQQGQTVTKKSAAEASKKPRQKRTATKAYNVTQAFGRRGPEQTQGNFGDQELIRQGTDYKHWPQIAQFAPSASAFFGMSRIGMEVTPSGTWLTYTGAIKLDDKDPNFKDQVILLNKHIDAYKTFPPTEPKKDKKKKADETQALPQRQKKQQTVTLLPAADLDDFSKQLQQSMSSADSTQA

SEQ ID NO: 15422 - protein, 419 aa, Artificial Sequence
  SARS-CoV-2__MT831745.1__nucleocapsid protein (N)
MSDNGPQNQRNAPRITFGGPSDSTGSNQNGERSGARSKQRRPQGLPNNTASWFTALTQHGKEDLKFPRGQGVPINTNSSPDDQIGYYRRATRRIRGGDGKMKDLSPRWYFYYLGTGPEAGLPYGANKDGIIWVATEGALNTPKDHIGTRNPANNAAIVLQLPQGTTLPKGFYAEGSRGGSQASSRSSSRSRNSSRNSTPGSSRGTSPARMAGNGGDAALALLLLDRLNQLESKMSGKGQQQQGQTVTKKSAAEASKKPRQKRTATKAYNVTQAFGRRGPEQTQGNFGDQELIRQGTDYKHWPQIAQFAPSASAFFGMSRIGMEVTPSGTWLTYTGAIKLDDKDPTFKDQVILLNKHIDAYKTFPPTEPKKDKKKKADETQALPQRQKKQQTVTLLPAADLDDFSKQLQQSMSSADSTQA

SEQ ID NO: 15423 - protein, 419 aa, Artificial Sequence
  SARS-CoV-2__MT831837.1__nucleocapsid protein (N)
MSDNGPQNQRNAPRITFGGPSDSTGSNQNGERSGARSKQRRPQGLPNNTASWFTALTQHGKEDLKFPRGQGVPINTNSSPDDQIGYYRRATRRIRGGDGKMKDLSPRWYFYYLGTGPEAGLPYGANKDGIIWVATEGALNTPKDHIGTRNPANNAAIVLQLPQGTTLPKGFYAEGSRGGSQASSRSSSRSRNSSRNSTPGSSRGTSPARVAGNGGDAALALLLLDRLNQLESKMSGKGQQQQGQTVTKKSAAEASKKPRQKRTATKAYNVTQAFGRRGPEQTQGNFGDQELIRQGTDYKHWPQIAQFAPSASAFFGMSRIGMEVTPSGTWLTYTGAIKLDDKDPNFKDQVILLNKHIDAYKTFPPTEPKKDKKKKADETQALPQRQKKQQTVTLLPAADLDDFSKQLQQSMSSADSTQA

SEQ ID NO: 15424 - protein, 419 aa, Artificial Sequence
  SARS-CoV-2__MT833958.1__nucleocapsid protein (N)
MSDNGPQNQRNAPRITFGGPSDSTGSNQNGKRSGARSKQRRPQGLPNNTASWFTALTQHGKEDLKFPRGQGVPINTNSSPDDQIGYYRRATRRIRGGDGKMKDLSPRWYFYYLGTGPEAGLPYGANKDGIIWVATEGALNTPKDHIGTRNPANNAAIVLQLPQGTTLPKGFYAEGSRGGSQASSRSSSRSRNSSRNSTPGSSKRTSPARMAGNGGDAALALLLLDRLNQLESKMSGKGQQQQGQTVTKKSAAEASKKPRQKRTATKAYNVTQAFGRRGPEQTQGNFGDQELIRQGTDYKHWPQIAQFAPSASAFFGMSRIGMEVTPSGTWLTYTGAIKLDDKDPNFKDQVILLNKHIDAYKTFPPTEPKKDKKKKADETQALPQRQKKQQTVTLLPAADLDDFSKQLQQSMSSADSTQA

SEQ ID NO: 15425 - protein, 419 aa, Artificial Sequence
  SARS-CoV-2__MT833965.1__nucleocapsid protein (N)
MSDNGPQNQRNAPRITFGGPSDSTGSNQNGERSGARSKQRRPQGLPNNTASWFTALTQHGKEDLKFPRGQGVPINTNSSPDDQIGYYRRATRRIRGGDGKMKDLSPRWYFYYLGTGPEAGLPYGANKDGIIWVATEGALNTPKDHIGTRNPANNAAIVLQLPQGTTLPKGFYVEGSRGGSQASSRSSSRSRNSSRNSTPGSSRGTSPARMAGNGGDAALALLLLDRLNQLESKMSGKGQQQQGQTVTKKSAAEASKKPRQKRTATKAYNVTQAFGRRGPEQTQGNFGDQELIRQGTDYKHWPQIAQFAPSASAFFGMSRIGMEVTPSGTWLTYTGAIKLDDKDPNFKDQVILLNKHIDAYKTFPPTEPKKDKKKKADETQALPQRQKKQQTVTLLPAADLDDFSKQLQQSMSSADSTQA

SEQ ID NO: 15426 - protein, 419 aa, Artificial Sequence
  SARS-CoV-2__MT833974.1__nucleocapsid protein (N)
MSDNGPQNQRNAPRITFGGPSDSTGSNQNGERSGARSKQRRPQGLPNNTASWFTALTQHGKEDLKFPRGQGVPINTNSSPDDQIGYYRRATRRIRGGDGKMKDLSPRWYFYYLGTGPEAGLPYGANKDGIIWVATEGALNTPKDHIGTRNPANNAAIVLQLPQGTTLPKGFYAEGSRGGSQASSRSSSRSRNSSRNSTSGSSKRTSPARMAGNGGDAALALLLLDRLNQLESKMSGKGQQQQGQTVTKKSAAEASKKPRQKRTATKAYNVTQAFGRRGPEQTQGNFGDQELIRQGTDYKHWPQIAQFAPSASAFFGMSRIGMEVTPSGTWLTYTGAIKLDDKDPNFKDQVILLNKHIDAYKTFPPTEPKKDKKKKADETQALPQRQKKQQTVTLLPAADLDDFSKQLQQSMSSADSTQA

SEQ ID NO: 15427 - protein, 419 aa, Artificial Sequence
  SARS-CoV-2__MT834002.1__nucleocapsid protein (N)
MSDNGPQNQRNAPRITFGGPSDSTGSNQNGERSGARSKQRRPQGLPNNTASWFTALTQHGKEDLKFPRGQGVPINTNSSPDDQIGYYRRATRRIRGGDGKMKDLSPRWYFYYLGTGPEAGLPYGANKDGIIWVATEGALNTPKDHIGTRNPANNVAIVLQLPQGTTLPKGFYAEGSRGGSQASSRSSSRSRNSSRNSTPGSSKRTSPARMAGNGGDAALALLLLDRLNQLESKMSGKGQQQQGQTVTKKSAAEASKKPRQKRTATKAYNVTQAFGRRGPEQTQGNFGDQELIRQGTDYKHWPQIAQFAPSASAFFGMSRIGMEVTPSGTWLTYTGAIKLDDKDPNFKDQVILLNKHIDAYKTFPPTEPKKDKKKKADETQALPQRQKKQQTVTLLPAADLDDFSKQLQQSMSSADSTQA

SEQ ID NO: 15428 - protein, 419 aa, Artificial Sequence
  SARS-CoV-2__MT834031.1__nucleocapsid protein (N)
MSDNGPQNQRNAPRITFGGPSDSTGSNQNGERSGARSKQRRPQGLPNNTASWFTALTQHGKEDLKFPRGQGVPINTNSSPDDQIGYYRRATRRIRGGDGKMKDLSPRWYFYYLGTGPEAGLPYGANKDGIIWVATEGALNTPKDHIGTRNPANNAAIVLQLPQGTTLPKGFYAEGSRGGSQASSRSSSRSRNSSRNSTPGSSKRTSPARMAGNGGDAALALLLLDRLNQLESKMSGKGQQQQGQTVTKKSAAEASKKPRQKRTATKAYNVTQAFGRRGPEQTQGNFGDQELIRQGTDYKHWPQIAQFAPSASAFFGMSRIGMEVTPSGTWLTYIGAIKLDDKDPNFKDQVILLNKHIDAYKTFPPTEPKKDKKKKADETQALPQRQKKQQTVTLLPAADLDDFSKQLQQSMSSADSTQA

SEQ ID NO: 15429 - protein, 419 aa, Artificial Sequence
  SARS-CoV-2__MT834038.1__nucleocapsid protein (N)
MSDNGPQNQRNAPRITFGGPSDSTGSNQNGERSGARSKQRRPQGLPNNTASWFTALTQHGKEDLKFPRGQGVPINTNSSPDDQIGYYRRATRRIRGGDGKMKDLSPRWYFYYLGTGPEAGLPYGANKDGIIWVATEGALNTPKDHIGTRNPANNAAIVLQLPQGTTLPKGFYAEGSRGGSQASSRSSSRSRNSSRNSTPGSSRGTSPARMAGNGGDAALALLLLDRLNQLESKMSGKGQQQQGQTVTKKSAAEASKKPRQKRTATKAYNVTQAFGRRGPEQTQGNFGDQELIRQGTDYKHWPQIAQFAPSASAFFGMSRIGMEVTPSGTWLTYTGAIKLDDKDPNFKDQVILLNKHIDAYKTFPPTEPKKDKKKKAGETQALPQRQKKQQTVTLLPAADLDDFSKQLQQSMSSADSTQA

SEQ ID NO: 15430 - protein, 419 aa, Artificial Sequence
  SARS-CoV-2__MT834043.1__nucleocapsid protein (N)
MSDNGPQNQRNAPRITFGGPSDSTGSNQNGERSGARSKQRRPQGLPNNTASWFTALTQHGKVDLKFPRGQGVPINTNSSPDDQIGYYRRATRRIRGGDGKMKDLSPRWYFYYLGTGPEAGLPYGANKDGIIWVATEGALNTPKDHIGTRNPANNAAIVLQLPQGTTLPKGFYAEGSRGGSQASSRSSSRSRNSLRNSTPGSSRGTSPARMAGNGGDAALALLLLDRLNQLESKMSGKGQQQQGQTVTKKSAAEASKKPRQKRTATKAYNVTQAFGRRGPEQTQGNFGDQELIRQGTDYKHWPQIAQFAPSASAFFGMSRIGMEVTPSGTWLTYTGAIKLDDKDPNFKDQVILLNKHIDAYKTFPPTEPKKDKKKKADETQALPQRQKKQQTVILLPAADLDDFSKQLQQSMSSADSTQA

SEQ ID NO: 15431 - protein, 419 aa, Artificial Sequence
  SARS-CoV-2__MT834069.1__nucleocapsid protein (N)
MSDNGPQNQRNAPHITFGGPSDSTGSNQNGERSGARSKQRRPQGLPNNTASWFTALTQHGKEDLKFPRGQGVPINTNSSPDDQIGYYRRATRRIRGGDGKMKDLSPRWYFYYLGTGPEAGLPYGANKDGIIWVATEGALNTPKDHIGTRNPANNAAIVLQLPQGTTLPKGFYAEGSRGGSQASSRSSSRSRNSSRNSTPGSSKRTSPARMAGNGGDAALALLLLDRLNQLESKMSGKGQQQQGQTVTKKSAAEASKKPRQKRTATKAYNVTQAFGRRGPEQTQGNFGDQELIRQGTDYKHWPQIAQFAPSASAFFGMSRIGMEVTPSGTWLTYTGAIKLDDKDPNFKDQVILLNKHIDAYKTFPPTEPKKDKKKKADETQALPQRQKKQQTVTLLPAADLDDFSKQLQQSMSSADSTQA

SEQ ID NO: 15432 - protein, 419 aa, Artificial Sequence
  SARS-CoV-2__MT834123.1__nucleocapsid protein (N)
MSDNGPQNQRNAPRITFGGPSDSTGSNQNGERSGARSKQRRPQGLSNNTASWFTALTQHGKEDLKFPRGQGVPINTNSSPDDQIGYYRRATRRIRGGDGKMKDLSPRWYFYYLGTGPEAGLPYGANKDGIIWVATEGALNTPKDHIGTRNPANNAAIVLQLPQGTTLPKGFYAEGSRGGSQASSRSSSRSRNSSRNSTPGSSKRTSPARMAGNGGDAALALLLLDRLNQLESKMSGKGQQQQGQTVTKKSAAEASKKPRQKRTATKAYNVTQAFGRRGPEQTQGNFGDQELIRQGTDYKHWPQIAQFAPSASAFFGMSRIGMEVTPSGTWLTYTGAIKLDDKDPNFKDQVILLNKHIDAYKTFPPTEPKKDKKKKADETQALPQRQKKQQTVTLLPAADLDDFSKQLQQSMSSADSTQA

SEQ ID NO: 15433 - protein, 419 aa, Artificial Sequence
  SARS-CoV-2__MT834129.1__nucleocapsid protein (N)
MSDNGPQNQRNAPRITFGGPSDSTGSNQNGERSGARSKQRRPQGLPNNTASWFTALTQHGKEDLKFPRGQGVPINTNSSPDDQIGYYRRATRRIRGGDGKMKDLSPRWYFYYLGTGPEAGLPYGANKDGIIWVATEGALNTPKDHIGTRNPANNAAIVLQLPQGTTLPKGFYAEGSRGGSQASSRSSSRSRNSSRNSTPGSSKRTSPARMAGNGGDAALALLLLDRLNQLESKMSGKGQQQQGQTVTKKSAAEASKKPRQKRTATKAYNVTQAFGRRGPEQTQGNFGDQELIRQGTDYKHWPQIAQFAPSASAFFGMSRIGMEVTPSGMWLTYTGAIKLDDKDPNFKDQVILLNKHIDAYKTFPPTEPKKDKKKKADETQALPQRQKKQQTVTLLPAADLDDFSKQLQQSMSSADSTQA

SEQ ID NO: 15434 - protein, 419 aa, Artificial Sequence
  SARS-CoV-2__MT834213.1__nucleocapsid protein (N)
MSDNGPQNQRNAPRITFGGPSDSTGSNQNGERSGARSKQRRPQGLPNNTASWFTALTQHGKEDLKFPRGQGVPINTNSSPDDQIGYYRRATRRIRGGDGKMKDLSPRWYFYYLGTGPEAGLPYGANKDGIIWVATEGALNTPKDHIGTRNPANNAAIVLQLPQGTTLPKGFYAEGSRGGSQASSRSSSRSRNSSRNSTPGSSRGTSPARMAGNGGDAALALLLLDRLNQLESKMSGKGQQQQGQTVTKKSAAEASKKPRQKRTATKAYNVTQAFGRRGPEQTQGNFGDQELIRQGTDYKHWPQIAQFAPSASAFFGMSRIGMEVTPSGMWLTYTGAIKLDDKDPNFKDQVILLNKHIDAYKTFPPTEPKKDKKKKADETQALPQRQKKQQTVTLLPAADLDDFSKQLQQSMSSADSTQA

SEQ ID NO: 15435 - protein, 419 aa, Artificial Sequence
  SARS-CoV-2__MT834233.1__nucleocapsid protein (N)
MSDNGPQNQRNAPRITFGGPSDSTGSNQNGERSGARSKQRRPQGLPNNTASWFTALTQHGKEDLKFPRGQGVPINTNSSPDDQIGYYRRATRRIRGGDGKMKDLSPRWYFYYLGTGPEAGLPYGANKDGIIWVATEGALNTPKDHIGTRNPANNAAIVLQLPQGTTLPKGFYAEGSRGGSQASSRSSSRSRNSSRNSTPGSSRGTSPARMAGNGGDAALALLLLDRLNQLESKMSGKGQQQQGQTVTKKSAAEASKKPRQKRTATKAYNVTQAFGRRGPEQTQGNFGDQELIRQGTDYKHWPQIAQFAPSASAFFGMSRIGMEVTPSGTWLTYTGAIKLDDKDPNFKDQVILLNKHIDAYKTFPLTEPKKDKKKKADETQALPQRQKKQQTVTLLPAADLDDFSKQLQQSMSSADSTQA

SEQ ID NO: 15436 - protein, 419 aa, Artificial Sequence
  SARS-CoV-2__MT834245.1__nucleocapsid protein (N)
MSDNGPQNQRNAPRITFGGPSDSTGSNQNGERSGARSKQRRPQGLPNNTASWFTALTQHGKEDLKFPRGQGVPINTNSSPDDQIGYYRRATRRIRGGDGKMKDLSPRWYFYYLGTGPEAGLPYGANKDGIIWVATEGALNTPKDHIGTRNPANNAAIVLQLPQGTTLPKGFYAEGSRGGSQASSRSSSRSRNSSRNSTPGSSKRTSPARMAGNGGDAALALLLLDRLNQLESKMSGKGQQQQCQTVTKKSAAEASKKPRQKRTATKAYNVTQAFGRRGPEQTQGNFGDQELIRQGTDYKHWPQIAQFAPSASAFFGMSRIGMEVTPSGTWLTYTGAIKLDDKDPNFKDQVILLNKHIDAYKTFPPTEPKKDKKKKADETQALPQRQKKQQTVTLLPAADLDDFSKQLQQSMSSADSTQA

SEQ ID NO: 15437 - protein, 419 aa, Artificial Sequence
  SARS-CoV-2__MT834281.1__nucleocapsid protein (N)
MSDNGPQNQRNAPRITFGGPSDSTGSNQNGERSGARSKQRRPQGLPNNTASWFTALTQHGKEDLKFPRGQGVPINTNSSPDDQIGYYRRATRRIRGGDGKMKDLSPRWYFYYLGTGPEAGLPYGANKDGIIWVATEGALNTPKDHIGTRNPANNAAIVLQLPQGTTLPKGFYAEGSRGGSQASSRSSSRSRNSSRNSTPGSSRRTSPARMAGNGGDAALALLLLDRLNQLESKMSGKGQQQQGQTVTKKSAAEASKKPRQKRTATKAYNVTQAFGRRGPEQTQGNFGDQELIRQGTDYKHWPQIAQFAPSASAFFGMSRIGMEVTPSGTWLTYTGAIKLDDKDPNFKDQVILLNKHIDAYKTFPPTEPKKDKKKKADETQALPQRQKKQQTVTLLPAADLDDFSKQLQQSMSSADSTQA

SEQ ID NO: 15438 - protein, 419 aa, Artificial Sequence
  SARS-CoV-2__MT834348.1__nucleocapsid protein (N)
MSDNGPQNQRNAPRITFGGPSDSTGSNQNGERSGARSKQRRPQGLPNNTASWFTALTQHGKEDLKFPRGQGVPINTNSSPDDQIGYYRRATRRIRGGDGKMKDLSPRWYFYYLGTGPEVGLPYGANKDGIIWVATEGALNTPKDHIGTRNPANNAAIVLQLPQGTTLPKGFYAEGSRGGSQASSRSSSRSRNSSRNSTPGSSKRTSPARMAGNGGDAALALLLLDRLNQLESKMSGKGQQQQGQTVTKKSAAEASKKPRQKRTATKAYNVTQAFGRRGPEQTQGNFGDQELIRQGTDYKHWPQIAQFAPSASAFFGMSRIGMEVTPSGTWLTYTGAIKLDDKDPNFKDQVILLNKHIDAYKTFPPTEPKKDKKKKADETQALPQRQKKQQTVTLLPAADLDDFSKQLQQSMSSADSTQA

SEQ ID NO: 15439 - protein, 419 aa, Artificial Sequence
  SARS-CoV-2__MT834661.1__nucleocapsid protein (N)
MSDNGPQNQRNAPRITFGGPSDSTGSNQNGERSGARSKQRRPQGLPNNTASWFTALTQHGKEDLKFPRGQGVPINTNSSPDDQIGYYRRATRRIRGGDGKMKDLSPRWYFYYLGTGPEAGLPYGANKDGIIWVATEGALNTPKDHIGTRNPANNAAIVLQLPQGTTLPKGFYAEGSRGGSQTSSRSSSRSRNSSRNSTPGSSRGTSPARMAGNGGDAALALLLLDRLNQLESKMSGKGQQQQGQTVTKKSAAEASKKPRQKRTATKAYNVTQAFGRRGPEQTQGNFGDQELIRQGTDYKHWPQIAQFAPSASAFFGMSRIGMEVTPSGTWLTYTGAIKLDDKDPNFKDQVILLNKHIDAYKTFPPTEPKKDKKKKADETQALPQRQKKQQTVTLLPAADLDDFSKQLQQSMSSADSTQA

SEQ ID NO: 15440 - protein, 419 aa, Artificial Sequence
  SARS-CoV-2__MT834687.1__nucleocapsid protein (N)
MSDNGPQNQRNAPRITFGGPSDSTGSNQNGERSGARSKQRRPQGLPNNTASWFTALTQHGKEDLKFPRGQGVPINTNSSPDDQIGYYRRATRRIRGGDGKMKDLSPRWYFYYLGTGPEAGLPYGANKDGIIWVATEGALNTPKDHIGTRNPANNAAIVLQLPQGTTLPKGFYAEGSRGGSQASSRSSSRSRNSSRNSTPGSSRGTSLAKMAGNGGDAALALLLLDRLNQLESKMSGKGQQQQGQTVTKKSAAEASKKPRQKRTATKAYNVTQAFGRRGPEQTQGNFGDQELIRQGTDYKHWPQIAQFAPSASAFFGMSRIGMEVTPSGTWLTYTGAIKLDDKDPNFKDQVILLNKHIDAYKTFPPTEPKKDKKKKADETQALSQRQKKQQTVTLLPAADLDDFSKQLQQSMSSADSTQA

SEQ ID NO: 15441 - protein, 419 aa, Artificial Sequence
  SARS-CoV-2__MT834689.1__nucleocapsid protein (N)
MSDNGPQNQRNAPRITFGGPSDSTGSNQNGERSGARSKQRRPQGLPNNTASWFTALTQHGKEDLKFPRGQGVPINTNSSPDDQIGYYRRATRRIRGGDGKMKDLSPRWYFYYLGTGPEAGLPYGANKDGIIWVATEGALNTPKDHIGTRNPANNAAIVLQLPQGTTLPKGFYAEGSRGGSQASSRSSSRNRNSSRNSTPGSSRGTSPARMAGNGGDAALALLLLDRLNQLESKMSGKGQQQQGQTVTKKSAAEASKKPRQKRTATKAYNVTQAFGRRGPEQTQGNFGDQELIRQGTDYKHWPQIAQFAPSASAFFGMSRIGMEVTPSGTWLTYTGAIKLDDKDPNFKDQVILLNKHIDAYKTFPPTEPKKDKKKKADETQALPQRQKKQQTVTLLPAADLDDFSKQLQQSMSSADSTQA

SEQ ID NO: 15442 - protein, 419 aa, Artificial Sequence
  SARS-CoV-2__MT834715.1__nucleocapsid protein (N)
MSDNGPQNQRNAPRITFGGPSDSTGSNQNGERSGARSKQRRPQGLPNNTASWFTALTQHGKEDLKFPRGQGVPINTNSSPDDQIGYYRRATRRIRGGDGKMKDLSPRWYFYYLGTGPEAGLPYGANKDGIIWVATEGALNTPKDHIGTRNPANNAAIVLQLPQGTTLPKGFYAEGSRGGSQASSRSSSRSRNSSRNSTPGSSRGTSPGRMAGNGGDAALALLLLDRLNQLESKMSGKGQQQQGQTVTKKSAAEASKKPRQKRTATKAYNVTQAFGRRGPEQTQGNFGDQELIRQGTDYKHWPQIAQFAPSASAFFGMSRIGMEVTPSGTWLTYTGAIKLDDKDPNFKDQVILLNKHIDAYKTFPPTEPKKDKKKKADETQALPQRQKKQQTVILLPAADLDDFSKQLQQSMSSADSTQA

SEQ ID NO: 15443 - protein, 419 aa, Artificial Sequence
  SARS-CoV-2__MT827212.1__nucleocapsid protein (N)
MSDNGPQNQRNAPRITFGGPSDSTGSNQNGERSGARSKQRRPQGLPNNTASWFTALTQHGKEDLKFPRGQGVPINTNSSPDDQIGYYRRATRRIRGGDGKMKDLSPRWYFYYLGTGPEAGLPYGANKDGIIWVATEGALNTPKDHIGTRNPANNAAIVLQLPQGTTLPKGFYAEGSRGGSQASSRSSSRSRNSSRNSTPGSSRGTSPARMAGNGGDAALALLLLDRLNQLESKMSGKGQQQQGQTVTKKSVAEASKKPRQKRTATKAYNVTQAFGRRGPEQTQGNFGDQELIRQGTDYKHWPQIAQFAPSASAFFGMSRIGMEVTPSGTWLTYTGAIKLDDKDPNFKDQVILLNKHIDAYKTFPPTEPKKDKKKKADETQALPQRQKKQQTVTLLPAADLDDFSKQLQQSMSSADSTQA

SEQ ID NO: 15444 - protein, 419 aa, Artificial Sequence
  SARS-CoV-2__MT825091.1__nucleocapsid protein (N)
MSDNGPQNQQNAPRITFGGHSDSTGSNQNGERSGARSKQRRPQGLPNNTASWFTALTQHGKEDLKFPRGQGVPINTNSSPDDQIGYYRRATRRIRGGDGKMKDLSPRWYFYYLGTGPEAGLPYGANKDGIIWVATEGALNTPKDHIGTLNPANNAAIVLQLPQGTTLPKGFYAEGSRGGSQASSRSSSRSRNSLRNSTPGSSRGTSPARMAGNGGDAALALLLLDRLNQLESKMSGKGQQQQGQTVTKKSAAEASKKPRQKRTATKAYNVTQAFGRRGPEQTQGNFGDQELIRQGTDYKHWPQIAQFAPSASAFFGMSRIGMEVTPSGTWLTYTGAIKLDDKDPNFKDQVILLNKHIDAYKTFPPTEPKKDKKKKADETQALPQRQKKQLTVTLLPAADLDDFSKQLQQSMSSADSTQA

SEQ ID NO: 15445 - protein, 419 aa, Artificial Sequence
  SARS-CoV-2__MT821594.1__nucleocapsid protein (N)
MSDNGPQNQRNAPRITFGGPSDSTGSNQNGERSGARSKQRRPQGLPNNTASWFTALTQHGKEDLKFPRGQGVPINTNSSPDDQIGYYRRATRRIRGGDGKMKDLSPRWYFYYLGTGPEAGLPYGANKDGIIWVATEGALNTPKDHIGTRNPANNAAIVLQLPQGTTLPKGFYAEGSRGGSQASSRSSSRSRNSSRNSTPGSSRGTSPARMAGNGGDAALALLLLDRLNQLESKMSGKGQQQQGQTVTKKSAAEASKKPRQKRTATKAYNVTQAFGRRGPEQTQGNFGDQELIRQGTDYKHWPQIAQFAPSASAFFGMSRIGMEVTPSGTWLTYTGAIKLDDKDPNFKDQVILLNKHIDAYKTFPSTEPKKDKKKKADETQALPQRQKKQQTVTLLPAADLDDFSKQLQQSMSSADSTQA

SEQ ID NO: 15446 - protein, 419 aa, Artificial Sequence
  SARS-CoV-2__MT821646.1__nucleocapsid protein (N)
MSDNGPQNQRNAPRITFGGPSDSTGSNQNGERSGARSKQRRPQGLPNNTASWFTALTQHGKEDLKFPRGQGVPINTNSSPDDQIGYYRRATRRIRGGDGKMKDLSPRWYFYYLGTGPEAGLPYGANKDGIIWVATEGALNTPKDHIGTRNPANNAAIVLQLPQGTTLPKGFYAEGSRGGSQASSRSSSRSRNSSRNSTPGSSKGTSPARMAGNGGDAALALLLLDRLNQLESKMSGKGQQQQGQTVTKKSAAEASKKPRQKRTATKAYNVTQAFGRRGPEQTQGNFGDQELIRQGTDYKHWPQIAQFAPSASAFFGMSRIGMEVTPSGTWLTYTGAIKLDDKDPNFKDQVILLNKHIDAYKTFPPTEPKKDKKKKADETQALPQRQKKQQTVTLLPAADLDDFSKQLQQSMSSADSTQA

SEQ ID NO: 15447 - protein, 419 aa, Artificial Sequence
  SARS-CoV-2__MT821766.1__nucleocapsid protein (N)
MSDNGPQNQRNAPRITFGGPSDSTGSNQNGERSGARSKQRRPQGLPNNTASWFTALTQHGKEDLKFPRGQGVPINTNSSPDDQIGYYRRATRRIRGGDGKMKDLSPRWYFYYLGTGPEAGLPYGANKDGIIWVAIEGALNTPKDHIGTRNPANNAAIVLQLPQGTTLPKGFYAEGSRGGSQASSRSSSRSRNSSRNSTPGSSRGTSPARMAGNGGDAALALLLLDRLNQLESKMSGKGQQQQGQTVTKKSAAEASKKPRQKRTATKAYNVTQAFGRRGPEQTQGNFGDQELIRQGTDYKHWPQIAQFAPSASAFFGMSRIGMEVTPSGTWLTYTGAIKLDDKDPNFKDQVILLNKHIDAYKTFPPTEPKKDKKKKADETQALPQRQKKQQTVTLLPAADLDDFSKQLQQSMSSADSTQA

SEQ ID NO: 15448 - protein, 419 aa, Artificial Sequence
  SARS-CoV-2__MT821773.1__nucleocapsid protein (N)
MSDNGPQNQRNAPRITFGGPSDSIGSNQNGERSGARSKQRRPQGLPNNTASWFTALTQHGKEDLKFPRGQGVPINTNSSPDDQIGYYRRATRRIRGGDGKMKDLSPRWYFYYLGTGPEAGLPYGANKDGIIWVATEGALNTPKDHIGTRNPANNAAIVLQLPQGTTLPKGFYAEGSRGGSQASSRSSSRSRNSSRNSTPGSSRGTSPARMAGNGGDAALALLLLDRLNQLESKMSGKGQQQQGQTVTKKSAAEASKKPRQKRTATKAYNVTQAFGRRGPEQTQGNFGDQELIRQGTDYKHWPQIAQFAPSASAFFGMSRIGMEVTPSGTWLTYTGAIKLDDKDPNFKDQVILLNKHIDAYKTFPPTEPKKDKKKKADETQALPQRQKKQQTVTLLPAADLDDFSKQLQQSMSSADSTQA

SEQ ID NO: 15449 - protein, 419 aa, Artificial Sequence
  SARS-CoV-2__MT821776.1__nucleocapsid protein (N)
MSDNGPQNQRNAPRITFGGPSDSTGSNQNGERSGARSKQRRPQGLPNNTASWFTALTQHGKEDLKFPRGQGVPINTNSSPDDQIGYYRRATRRIRGGDGKMKDLSPRWYFYYLGTGPEAGLPYGANKDGIIWVATEGAFNTPKDHIGTRNPANNAAIVLQLPQGTTLPKGFYAEGSRGGSQASSRSSSRSRNSSRNSTPGSSRGTSPARMAGNGGDAALALLLLDRLNQLESKMSGKGQQQQGQTVTKKSAAEASKKPRQKRTATKAYNVTQAFGRRGPEQTQGNFGDQELIRQGTDYKHWPQIAQFAPSASAFFGMSRIGMEVTPSGTWLTYTGAIKLDDKDPNFKDQVILLNKHIDAYKTFPPTEPKKDKKKKADETQALPQRQKKQQTVTLLPAADLDDFSKQLQQSMSSADSTQA

SEQ ID NO: 15450 - protein, 419 aa, Artificial Sequence
  SARS-CoV-2__MT821778.1__nucleocapsid protein (N)
MSDNGPQNQRNAPRITFGGPSDSTGSNQNGERSGARSKQRRPQGLPNNTASWFTALTQHGKEDLKFPRGQGVPINTNSSPDDQIGYYRRATRRIRGGDGKMKDLSPRWYFYYLGTGPEAGLPYGANKDGIIWVATEGALNTPKDHIGTRNPANNAAIVLQLPQGTTLPKGFYAEGSRGGSQASSCSSSRSRNSSRNSTPGSSRGTSPARMAGNGGDAALALLLLDRLNQLESKMSGKGQQQQGQTVTKKSAAEASKKPRQKRTATKAYNVTQAFGRRGPEQTQGNFGDQELIRQGTDYKHWPQIAQFAPSASAFFGMSRIGMEVTPSGTWLTYTGAIKLDDKDPNFKDQVILLNKHIDAYKTFPPTEPKKDKKKKADETQALPQRQKKQQTVTLLPAADLDDFSKQLQQSMSSADSTQA

SEQ ID NO: 15451 - protein, 419 aa, Artificial Sequence
  SARS-CoV-2__MT820465.1__nucleocapsid protein (N)
MSDNGPQNQRNAPRITFGGPSDSTGSNQNGERSGARSKQRRPQGLPNNTASWFTALTQHGKEDLKFPRGQGVPINTNSSPDDQIGYYRRATRRIRGGDGKMKDLSPRWYFYYLGTGPEAGLPYGANKDGIIWVATEGALNTPKDHIGTRNPANNAAIVLQLPQGTTLPKGFYAEGSRGGSQASSRSSSRSRNSSRNSTPGSSKRTSPARMAGNGGDAALALLLLDRLNQLESKMSGKGQQQQGQTVTKKSAAEASKKPRQKRTATKAYNVTQAFGRRGPEQTQGNFGDQELIRQGTDYKHWPQIAQFAPSASAFFGMSRIGMEVTPSGTWLTYTGAIKLDDKDPNFKDQVILLNKHIDAYKTFPPTEPKMDKKKKADETQALPQRQKKQQTVTLLPAADLDDFSKQLQQSMSSADSTQA

SEQ ID NO: 15452 - protein, 419 aa, Artificial Sequence
  SARS-CoV-2__MT810677.1__nucleocapsid protein (N)
MSDNGPKNQRNAPRITFGGPSDSTGSNQNGERSGARSKQRRPQGLPNNTASWFTALTQHGKEDLKFPRGQGVPINTNSSPDDQIGYYRRATRRIRGGDGKMKDLSPRWYFYYLGTGPEAGLPYGANKDGIIWVATEGALNTPKDHIGTRNPANNAAIVLQLPQGTTLPKGFYAEGSRGGSQASSRSSSRSRNSLRNSTPGSSRGTSPARMAGNGGDAALALLLLDRLNQLESKMSGKGQQQQGQTVTKKSAAEASKKPRQKRTATKAYNVTQAFGRRGPEQTQGNFGDQELIRQGTDYKHWPQIAQFAPSASAFFGMSRIGMEVTPSGTWLTYTGAIKLDDKDPNFKDQVILLNKHIDAYKTFPPTEPKKDKKKKADETQALPQRQKKQQTVTLLPAADLDDFSKQLQQSMSSADSTQA

SEQ ID NO: 15453 - protein, 419 aa, Artificial Sequence
  SARS-CoV-2__MT810703.1__nucleocapsid protein (N)
MSDNGPQNQRNAPRITFGGPSDSTGSNQNGERSGARSKQRRPQGLPNNTASWFTALTQHGKEDLKFPRGQGVPINTNSSPDDQIGYYRRATRRIRGGDGKMKDLSPRWYFYYLGTGPEAGLPYGANKDGIIWVATEGALNTPKDHIGTRNPANNAAIVLQLPQGTTLPKGFYAEGSRGGSQASSRSSSRSRNSLRNSTPGSSRGTSPARMAGNGGDAALALLLLDRLNQLESKMSGKGQQQQGQTVTKKSAAEASKKPRQKRTATKAYNVTQAFGRRGPEQTQGNFGDQELIRKGTDYKHWPQIAQFAPSASAFFGMSRIGMEVTPSGTWLTYTGAIKLDDKDPNFKDQVILLNKHIDAYKTFPPTEPKKDKKKKADETQALPQRQKKQQTVTLLPAADLDDFSKQLQQSMSSADSTQA

SEQ ID NO: 15454 - protein, 419 aa, Artificial Sequence
  SARS-CoV-2__MT810718.1__nucleocapsid protein (N)
MSDNGPQNQRNAPRITFGGPSDSTGSNQNGERSGARSKQRRPQGLPNNTASWFTALTQHGKEDLKFPRGQGVPINTNSSPDDQIGYYRRATRRIRGGDGKMKDLSPRWYFYYLGTGPEAGLPYGANKDGIIWVATEGALNTPKDHIGTRNPANNAAIVLQLPQGTTLPKGFYAEGSRGGSQASSRSSSRSRNSLRNSTPGSSRGTSPARMAGNGGDAALALLLLDRLNQLESKMSGKGQQQQGQTVTKKSAAEASKKPRQKRTATKAYNVTQAFGRRGPEQTQGNFGDHELIRQGTDYKHWPQIAQFAPSASAFFGMSRIGMEVTPSGTWLTYTGAIKLDDKDPNFKDQVILLNKHIDAYKTFPPTEPKKDKKKKADETQALPQRQKKQQTVTLLPAADLDDFSKQLQQSMSSADSTQA

SEQ ID NO: 15455 - protein, 419 aa, Artificial Sequence
  SARS-CoV-2__MT810839.1__nucleocapsid protein (N)
MSDNGPQNQRNAPRITFGGPSDSTGSNQNGERSGARSKQRRPQGLPNNTASWFTALTQHGKEDLKFPRGQGVPINTNSSPDDQIGYYRRATRRIRGGDGKMKDLSPRWYFYYLGTGPEAGLPYGANKDGIIWVATEGALNTPKDHIGTRNPANNAAIVLQLPQGTTLPKGFYAEGSRGGSQASSRSSSRSRNSLRNSTPGSSRGTSPARMAGNGGDAALALLLLDRLNQLESKMSGKGQQQQGQTVTKKSAAEASKKPRQKRTATKAYNVTQAFGRRGPEQIQGNFGDQELIRQGTDYKHWPQIAQFAPSASAFFGMSRIGMEVTPSGTWLTYTGAIKLDDKDPNFKDQVILLNKHIDAYKTFPPTEPKKDKKKKADETQALPQRQKKQQTVTLLPAADLDDFSKQLQQSMSSADSTQA

SEQ ID NO: 15456 - protein, 419 aa, Artificial Sequence
  SARS-CoV-2__MT810848.1__nucleocapsid protein (N)
MSDNGPQNHRNAPRITFGGPSDSTGSNQNGERSGARSKQRRPQGLPNNTASWFTALTQHGKEDLKFPRGQGVPINTNSSPDDQIGYYRRATRRIRGGDGKMKDLSPRWYFYYLGTGPEAGLPYGANKDGIIWVATEGALNTPKDHIGTRNPANNAAIVLQLPQGTTLPKGFYAEGSRGGSQASSRSSSRSRNSLRNSTPGSSRGTSPARMAGNGGDAALALLLLDRLNQLESKMSGKGQQQQGQTVTKKSAAEASKKPRQKRTATKAYNVTQAFGRRGPEQTQGNFGDQELIRQGTDYKHWPQIAQFAPSASAFFGMSRIGMEVTPSGTWLTYTGAIKLDDKDPNFKDQVILLNKHIDAYKTFPPTEPKKDKKKKADETQALPQRQKKQQTVTLLPAADLDDFSKQLQQSMSSADSTQA

SEQ ID NO: 15457 - protein, 419 aa, Artificial Sequence
  SARS-CoV-2__MT810855.1__nucleocapsid protein (N)
MSDNGPQNQRNAPRITFGGPSDSTGSNQNGERSGARSKQRRPQGLPNNTASWFTALTQHGKEDLKFPRGQGVPINTNSSPDDQIGYYRRATRRIRGGDGKMKDLSPRWYFYYLGTGPEAGLPYGANKDGIIWVATEGALNTPKDHIGTRNPANNAAIVLQLPQGTTLPKGFYAEGSRGGSQASSRSSSRSRNSSRNSTPGSSMGTSPARMAGNGGDAALALLLLDRLNQLESKMSGKGQQQQGQTVTKKSAAEASKKPRQKRTATKAYNVTQAFGRRGPEQTQGNFGDQELIRQGTDYKHWPQIAQFAPSASAFFGMSRIGMEVTPSGTWLTYTGAIKLDDKDPNFKDQVILLNKHIDAYKTFPPTEPKKDKKKKADETQALPQRQKKQQTVTLLPAADLDDFSKQLQQSMSSADSTQA

SEQ ID NO: 15458 - protein, 419 aa, Artificial Sequence
  SARS-CoV-2__MT810952.1__nucleocapsid protein (N)
MSDNGPQNQRNAPRITFGGPSDSTGSNQNGERSGARSKQRRPQGLPNNTASWFTALTQHGKEDLKFPRGQGVPINTNSSPDDQIGYYRRATRRIRGGDGKMKDLSPRWYFYYLGTGPEAGLPYGANKDGIIWVATEGALNTPKDHIGTRNPANNAAIVLQLPQGTTLPKGFYAEGSRGGSQASSRSSSRSRNSSRNSTPGSSRGTSPARMAGNGGDAALALLLLDRLNQLESKMSGKGQQQQGQTVTKKSAAEASKKPRQKRTATKAYNVTQAFGRRGPEQTQGNFGDQELIRQGTDYKHWPQIAQFAPSASAFFGMSRIGMEVTPSGTWLTYTGAIKLDDKDPNFKDQVILLNKHIDAYKTFPPTEPKKDKKKKADETQALPQRQKKQQTVTLLHAADLDDFSKQLQQSMSSADSTQA

SEQ ID NO: 15459 - protein, 419 aa, Artificial Sequence
  SARS-CoV-2__MT811022.1__nucleocapsid protein (N)
MSDNGPQNQRNAPRITFGGPSDSTGSNQNGERSGARSKQRRPQGLPNNTASWFTALTQHGKEDLKFPRGQGVPINTNSSPDDQIGYYRRATRRIRGGDGKMKDLSPRWYFYYLGTGPEAGLPYGANKDGIIWVATEGALNTPKDHIGTRNPANNAAIVLQLPQGTTLPKGFYAEGSRGGSQASSRSSSRSRNSSRNSTPGSSRGTSPARMAGNGGDAALALLLLDRLNQLESKMSGKGQQQQGQTVTKKSAAEASKKPRQKRTATKAYNVTQAFGRRGPEQTQGNFGDQELIRQGTDYKHWPQIAQFAPSASAFFGMSRIGMEVTPSGTWLTYTGAIKLDDKDPNFKHQVILLNKHIDAYKTFPPTEPKKDKKKKADETQALPQRQKKQQTVTLLPAADLDDFSKQLQQSMSSADSTQA

SEQ ID NO: 15460 - protein, 419 aa, Artificial Sequence
  SARS-CoV-2__MT811201.1__nucleocapsid protein (N)
MSDNGPQNQRNAPRITFGGPSDSTGSNQNGERSGARSKQRRPQGLPNNTASWFTALTQHGKEDLKFPRGQGVPINTNSSPDDQIGYYRRATRRIRGGDGKMKDLSPRWYFYYLGTGPEAGLPYGANKDGIIWVATEGALNTPKDHIGTRNPANNAAIVLQLPQGTTLPKGFYAEGSRGGSQASSRSSSRSRNSSRNSTPGSSRGTSPARMAGNGGDAALALLLLDRLNQLESKMSGKGQQQQGQTVTKKSAAEASKKPRQKRTATKAYNVTQAFGRRGPEQTQGNFGDQELIRQGTDYKHWPQIAQFAPSASAFFGMSRIGMEVTPSGTWLTYTGAIKLDDKDPNFKDQVILLNKHIDAYKTFPPTEPKKDKKKKADETQALPQRQKKQQTVTLLPAADLDDFSKQLQQSMSSADSTHA

SEQ ID NO: 15461 - protein, 419 aa, Artificial Sequence
  SARS-CoV-2__MT811202.1__nucleocapsid protein (N)
MSDNGPQNQRNAPRITFGGPSDSTGSNQNGERSGARSKQRRPQGLPNNTASWFTALTQHGKEDLKFPRGQGVPINTNSSPDDQIGYYRRATRRIRGGDGKMKDLSPRWYFYYLGTGPEAGLPYGANKDGIIWVATEGALNTPKDHIGTRNPANNAAIVLQLPQGTTLPKGFYAEGSRGGSQASSRSSSRSRNSSRNSTPGSSRGTSPARMAGNGGDAALALLLLDRLNQLESKMSGKGQQQQGQTVTKKSAAEASKKPRQKRTATKAYNVTQAFGRRGPEQTQGNFGDQELIRQGTDYKHWPQIAQFAPSASAFFGMSRIGMEVTPSGTWLTYTGAIKLDDKYPNFKDQVILLNKHIDAYKTFPPTEPKKDKKKKADETQALPQRQKKQQTVTLLPAADLDDFSKQLQQSMSSADSTQA

SEQ ID NO: 15462 - protein, 419 aa, Artificial Sequence
  SARS-CoV-2__MT811229.1__nucleocapsid protein (N)
MSDNGPQNQRNAPRITFGGPSDSTGSNQNGERSGARSKQRRPQGLPNNTASWFTALTQHGKEDLKFPRGQGVPINTNSSPDDQIGYYRRATRRIRGGDGKMKDLSPRWYFYYLGTGPEAGLPYGANKDGIIWVATEGALNTPKDHIGTRNPANNAAIVLQLPQGTTLPKGFYAEGSRGGSQASSRSSSRSRNSLRNSTPGSSRGTSPARMAGNGGDAALALLLLDRLNQLESKMSGKGQQQQGQTVTKKSSAEASKKPRQKRTATKAYNVTQAFGRRGPEQTQGNFGDQELIRQGTDYKHWPQIAQFAPSASAFFGMSRIGMEVTPSGTWLTYTGAIKLDDKDPNFKDQVILLNKHIDAYKTFPPTEPKKDKKKKADETQALPQRQKKQQTVTLLPAADLDDFSKQLQQSMSSADSTQA

SEQ ID NO: 15463 - protein, 419 aa, Artificial Sequence
  SARS-CoV-2__MT811240.1__nucleocapsid protein (N)
MSDNGPQNQRNAPRITFGGPSDSTGSNQNGERSGARSKQRRPQGLPNNTASWFTALTQHGKEDLKFPRGQGVPINTNSSPDDQIGYYRRATRRIRGGDGKMKDLSPRWYFYYLGTGPEAGLPYGANKDGIIWVATEGALNTPKDHIGTRNPANNAAIVLQLPQGTTLPKGFYAEGSRGGSQASSRSSSRSRNSLRNSTPGSSRGTSPARMAGNGGDAALALLLLDRLNQLESKMSGKVQQQQGQTVTKKSAAEASKKPRQKRTATKAYNVTQAFGRRGPEQTQGNFGDQELIRQGTDYKHWPQIAQFAPSASAFFGMSRIGMEVTPSGTWLTYTGAIKLDDKDPNFKDQVILLNKHIDAYKTFPPTEPKKDKKKKADETQALPQRQKKQQTVTLLPAADLDDFSKQLQQSMSSADSTQA

SEQ ID NO: 15464 - protein, 419 aa, Artificial Sequence
  SARS-CoV-2__MT811246.1__nucleocapsid protein (N)
MSDNGPQNQRNAPRITFGGPSDSTGSNQNGERSGARSKQRRPQGLPNNTASWFTALTQHGKEDLKFPRGQGVPINTNSSPDDQIGYYRRATRRIRGGDGKMKDLSPRWYFYYLGTGPEAGLPYGANKDGIIWVATEGALNTPKDHIGTRNPANNAAIVLQLPQGTTLPKGFYAEGSRGGSQASSRSSSRSRNSLRNSTPGSSRGISPARMAGNGGDAALALLLLDRLNQLESKMSGKGQQQQGQTVTKKSAAEASKKPRQKRTATKAYNVTQAFGRRGPEQTQGNFGDQELIRQGTDYKHWPQIAQFAPSASAFFGMSRIGMEVTPSGTWLTYTGAIKLDDKDPNFKDQVILLNKHIDAYKTFPPTEPKKDKKKKADETQALPQRQKKQQTVTLLPAADLDDFSKQLQQSMSSADSTQA

SEQ ID NO: 15465 - protein, 419 aa, Artificial Sequence
  SARS-CoV-2__MT811251.1__nucleocapsid protein (N)
MSDNGPQNQRNAPGITFGGPSDSTGSNQNGERSGARSKQRRPQGLPNNTASWFTALTQHGKEDLKFPRGQGVPINTNSSPDDQIGYYRRATRRIRGGDGKMKDLSPRWYFYYLGTGPEAGLPYGANKDGIIWVATEGALNTPKDHIGTRNPANNAAIVLQLPQGTTLPKGFYAEGSRGGSQASSRSSSRSRNSLRNSTPGSSRGTSPARMAGNGGDAALALLLLDRLNQLESKMSGKGQQQQGQTVTKKSAAEASKKPRQKRTATKAYNVTQAFGRRGPEQTQGNFGDQELIRQGTDYKHWPQIAQFAPSASAFFGMSRIGMEVTPSGTWLTYTGAIKLDDKDPNFKDQVILLNKHIDAYKTFPPTEPKKDKKKKADETQALPQRQKKQQTVTLLPAADLDDFSKQLQQSMSSADSTQA

SEQ ID NO: 15466 - protein, 419 aa, Artificial Sequence
  SARS-CoV-2__MT811325.1__nucleocapsid protein (N)
MSDNGPQNQRNAPRITFGGPSDSTGSNQNGERSGARSKQRRPQGLPNNTASWFTALTQHGKEDLKFPRGQGVPINTNSSPDDQIGYYRRATRRIRGGDGKMKDLSPRWYFYYLGTGPEAGLPYGANKDGIIWVATEGALNTPKDHIGTRNPANNAAIVLQLPQGTTLSKGFYAEGSRGGSQASSRSSSRSRNSSRNSTPGSSRGTSPARMAGNGGDAALALLLLDRLNQLESKMSGKGQQQQGQTVTKKSAAEASKKPRQKRTATKAYNVTQAFGRRGPEQTQGNFGDQELIRQGTDYKHWPQIAQFAPSASAFFGMSRIGMEVTPSGTWLTYTGAIKLDDKDPNFKDQVILLNKHIDAYKTFPPTEPKKDKKKKADETQALPQRQKKQQTVTLLPAADLDDFSKQLQQSMSSADSTQA

SEQ ID NO: 15467 - protein, 419 aa, Artificial Sequence
  SARS-CoV-2__MT811330.1__nucleocapsid protein (N)
MSDNGPQNQRNAPRITFGGPSDSTGSNQNGERSGARSKQRRPQGLPNNTASWFTALTQHGKEDLKFPRGQGVPINTNSSPDDQIGYYRRATRRIRGGDGKMKDLSPRWYFYYLGTGPEAGLPYGANKDGIIWVATEGALNTPKDHIGTRNPANNAAIVLQLPQGTTLPKGFYAEGSRGGSQASSRSSSRSRNSSRNSTPGSSRGTSPARMAGNGGDAALALLLLDRLNQLESKMSGKGQQQQGQTVTKKSAAEASKKPRQKRTATKAYNVTQAFGRRGPVQTQGNFGDQELIRQGTDYKHWPQIAQFAPSASAFFGMSRIGMEVTPSGTWLTYTGAIKLDDKDPNFKDQVILLNKHIDAYKTFPPTEPKKDKKKKADETQALPQRQKKQQTVTLLPAADLDDFSKQLQQSMSSADSTQA

SEQ ID NO: 15468 - protein, 419 aa, Artificial Sequence
  SARS-CoV-2__MT811407.1__nucleocapsid protein (N)
MSDNGPQNQRNAPRITFGGPSDSTGSNQNGERSGARSKQRRPQGLPNNTASWFTALTQHGKEDLKFPRGQGVPINTNSSPDDQIGYYRRATRRIRGGDGKMKDLSPRWYFYYLGTGPEAGLPYGANKDGIIWVATEGALNTPKDHIGTRNPANNAAIVLQLPQGTTLPKGFYTEGSRGGSQASSRSSSRSRNSLRNSTPGSSRGTSPARMAGNGGDAALALLLLDRLNQLESKMSGKGQQQQGQTVTKKSAAEASKKPRQKRTATKAYNVTQAFGRRGPEQTQGNFGDQELIRQGTDYKHWPQIAQFAPSASAFFGMSRIGMEVTPSGTWLTYTGAIKLDDKDPNFKDQVILLNKHIDAYKTFPPTEPKKDKKKKADETQALPQRQKKQQTVTLLPAADLDDFSKQLQQSMSSADSTQA

SEQ ID NO: 15469 - protein, 419 aa, Artificial Sequence
  SARS-CoV-2__MT811416.1__nucleocapsid protein (N)
MSDNGPQNQRNAPRITFGGPSDSTGSNQNGERSGARSKQRRPQGLPNNTASWFTALTQHGKEDLKFPRGQGVPINTNSSPDDQIGYYRRATRRIRGGDGKMKDLSPRWYFYYLGTGPEAGLPYGANKDGIIWVATEGALNTPKDHIGTRNPANNAAIVLQLPQGTTLPKGFYAEGSRGGSQASSRSSSRSRNSLRNSTPGSSRGTSPARMAGNGGDAALALLLLDRLNQLESKMSGKGQQQQGQTVTKKSAAEASKKPRQKRTATKAYNVTQAFGRRGPEQTQGNFGDQELIRQGTDYKHWPQIAQFAPSASAFFGMSRIGMEVTPSGTWLTYTGAIKLDDKYPNFKDQVILLNKHIDAYKTFPPTEPKKDKKKKADETQALPQRQKKQQTVTLLPAADLDDFSKQLQQSMSSADSTQA

SEQ ID NO: 15470 - protein, 419 aa, Artificial Sequence
  SARS-CoV-2__MT811458.1__nucleocapsid protein (N)
MSDNGPQNQRNAPRITFGGPSDSTGSNQNGERSGARSKQRRPQGLPNNTASWFTALTQHGKEDLKFPRGQGVPINTNSSPDDQIGYYRRATRRIRGGDGKMKDLSPRWYFYYLGTGPEAGLPYGANKDGIIWVATEGALNTPKDHIGTRNPANNAAIVLQLPQGTTLPKGFYAEGSRGGSQASSRSSSRSRNSLRNSTPGSSRGTSPARMAGNGGDAALALLLLDRLNQLESKMSGKGQQQQGQTVTKKSAAEASKKPRQKRTATKAYNVTQAFGRRGPEQTQGNFGDQELIRQGTDYKHWPQIAQFAPSASAFFGMSRIGMEVTPSGTWLTYTGAIKLDDKDPNFKDQVILLNKHIDAYKTFPPTEPKKDKKKKADETQALPQRQKRQQTVTLLPAADLDDFSKQLQQSMSSADSTQA

SEQ ID NO: 15471 - protein, 419 aa, Artificial Sequence
  SARS-CoV-2__MT811483.1__nucleocapsid protein (N)
MSDNGPQNQRNAPRITFGGPSDSTGSNQNGERSGARSKQRRPQGLPNNTASWFTALTQHGKEDLKFPRGQGVPINTNSSPDDQIGYYRRATRRIRGGDGKMKDLSPRWYFYYLGTGPEAGLPYGANKDGIIWVATEGALNTPKDHIGTRNPANNAAIVLQLPQGTTLPKGFYAEGSRGGSQASSRSSSRSRNSLRNSTPGSSRGTSPARMAGNGGDAALALLLLDRLNQLESKMSGKGQQQQGQTVTKKSAAEASKKPRQKRTATKAYNVTQAFGRRGPEQTQGNFGDQELIRQGTDYKHWPQIAQFAPSASAFFGMSRIGMEVTPSGTWLTYTGAIKLDDKDPNFKDQVILLNKHIDAYKTFPPTEPKKDKKKKADETQALPQRQKKQQTVTLLPAANLDDFSKQLQQSMSSADSTQA

SEQ ID NO: 15472 - protein, 419 aa, Artificial Sequence
  SARS-CoV-2__MT811485.1__nucleocapsid protein (N)
MSDNGPQNQRNAPRITFGGPSDSTGSNQNGERSGARSKQRRPQGLPNNTASWFTALTQHGKEDLKFSRGQGVPINTNSSPDDQIGYYRRATRRIRGGDGKMKDLSPRWYFYYLGTGPEAGLPYGANKDGIIWVATEGALNTPKDHIGTRNPANNAAIVLQLPQGTTLPKGFYAEGSRGGSQASSRSSSRSRNSSRNSTLGSSRGTSPARMAGNGGDAALALLLLDRLNQLESKMSGKGQQQQGQTVTKKSAAEASKKPRQKRTATKAYNVTQAFGRRGPEQTQGNFGDQELIRQGTDYKHWPQIAQFAPSASAFFGMSRIGMEVTPSGTWLTYTGAIKLDDKDPNFKDQVILLNKHIDAYKTFPPTEPKKDKKKKADETQALPQRQKKQQTVTLLPAADLDDFSKQLQQSMSSADSTQA

SEQ ID NO: 15473 - protein, 419 aa, Artificial Sequence
  SARS-CoV-2__MT811488.1__nucleocapsid protein (N)
MSDNGPQNQRNAPRITFGGPSDSTGSNQNGERSGARSKQRRPQGLPNNTASWFTALTQHGKEDLKFPRGQGVPINTNSSPDDQIGYYRRATRRIRGGDGKMKDLSPRWYFYYLGTGPEAGLPYGANKDGIIWVATEGALNTPKDHIGTRNPANNAAIVLQLPQGTTLPKGFYAEGSRGGSQASSRSSSRSRNSLRNSTPGSSRGTSPARMAGNGGDAALALLLLDRLNQLESKMSGKGQQQQGQTVTKKSAAEASKKPRQKRTATKAYNVTQAFGRRGPEQTQGNFGDQELIRQGTDYKHWPQIAQFAPSASAFFGMSRIGMEVTPSGTWLTYTGAIKLDDKDPNFKDQVILLNKHIDAYKTFPPTDPKKDKKKKADETQALPQRQKKQQTVTLLPAADLDDFSKQLQQSMSSADSTQA

SEQ ID NO: 15474 - protein, 419 aa, Artificial Sequence
  SARS-CoV-2__MT811490.1__nucleocapsid protein (N)
MSDNGPQNQRNAPRITFGGPSDSIGSNQNGERSGARSKQRRPQGLPNNTASWFTALTQHGKEDLKFPRGQGVPINTNSSPDDQIGYYRRATRRIRGGDGKMKDLSPRWYFYYLGTGPEAGLPYGANKDGIIWVATEGALNTPKDHIGTRNPANNAAIVLQLPQGTTLPKGFYAEGSRGGSQASSRSSSRSRNSSRNSTPGSSKRTSPARMAGNGGDAALALLLLDRLNQLESKMSGKGQQQQGQTVTKKSAAEASKKPRQKRTATKAYNVTQAFGRRGPEQTQGNFGDQELIRQGTDYKHWPQIAQFAPSASAFFGMSRIGMEVTPSGTWLTYTGAIKLDDKDPNFKDQVILLNKHIDAYKTFPPTEPKKDKKKKADETQALPQRQKKQQTVTLLPAADLDDFSKQLQQSMSSADSTQA

SEQ ID NO: 15475 - protein, 419 aa, Artificial Sequence
  SARS-CoV-2__MT811492.1__nucleocapsid protein (N)
MSDNGPQNQRNAPRITFGGPSDSTGSNQNGERSGARSKQRRPLGLPNNTASWFTALTQHGKEDLKFPRGQGVPINTNSSPDDQIGYYRRATRRIRGGDGKMKDLSPRWYFYYLGTGPEAGLPYGANKDGIIWVATEGALNTPKDHIGTRNPANNAAIVLQLPQGTTLPKGFYAEGSRGGSQASSRSSSRSRNSLRNSTPGSSRGTSPARMAGNGGDAALALLLLDRLNQLESKMSGKGQQQQGQTVTKKSAAEASKKPRQKRTATKAYNVTQAFGRRGPEQTQGNFGDQELIRQGTDYKHWPQIAQFAPSASAFFGMSRIGMEVTPSGTWLTYTGAIKLDDKDPNFKDQVILLNKHIDAYKTFPPTEPKKDKKKKADETQALPQRQKKQQTVTLLPAADLDDFSKQLQQSMSSADSTQA

SEQ ID NO: 15476 - protein, 419 aa, Artificial Sequence
  SARS-CoV-2__MT811500.1__nucleocapsid protein (N)
MSDNGPQNQRNAPRITFGGPSDSTGSNQNGERSGARSKQRRPQGLPNNTASWFTALTQHGKEDLKFPRGQGVPINTNSSPDDQIGYYRRATRRIRGGDGKMKDLSPRWYFYYLGTGPEAGLPYGANKDGIIWVATEGALNTPKDHIGTRNPANNAAIVLQLPQGTTLPKGFYAEGSRGGSQASSRSSSRSRNSLRNSTPGSSRGTSPARMAGNGGDAALALLLLDRLNQLESKMSGKGQQQQGQTVTKKSAAEASKKPRQKRTATKAYNVTQAFGRRGPEQTQGNFGDQELIRQGTDYKHWPQIAQFAPSASAFFGMSRIGMEVTPSGTWLTYTGAIKLDDKDPNFKDQVILLNKHIDAYKTFPPTEPKKDKKKKADETQALPQRQKIQQTVTLLPAADLDDFSKQLQQSMSSADSTQA

SEQ ID NO: 15477 - protein, 419 aa, Artificial Sequence
  SARS-CoV-2__MT811507.1__nucleocapsid protein (N)
MSDNGPQNQRNAPRITFGGPSDSTGSNQNGERSGARSKQRRPQGLPNNTASWFTALTQHGKEDLKFPRGQGVPINTNSSPDDQIGYYRRATRRIRGGDGKMKDLSPRWYFYYLGTGPEAGLPYGANKDGIIWVATEGALNTPKDHIGTRNPANNAAIVLQLPQGTTLPKGFYAEGSRGGSQASSRSSSRSRNSSRNSTPGSSRGTSPARMAGNGGDAALALLLLDRLNQFESKMSGKGQQQQGQTVTKKSAAEASKKPRQKRTATKAYNVTQAFGRRGPEQTQGNFGDQELIRQGTDYKHWPQIAQFAPSASAFFGMSRIGMEVTPSGTWLTYTGAIKLDDKDPNFKDQVILLNKHIDAYKTFPPTEPKKDKKKKADETQALPQRQKKQQTVTLLPAADLDDFSKQLQQSMSNADSTQA

SEQ ID NO: 15478 - protein, 419 aa, Artificial Sequence
  SARS-CoV-2__MT811511.1__nucleocapsid protein (N)
MSDNGPQNQRNAPRITFGGPSDSTGSNQNGERSGARSKQRRPQGLPNNTASWFTALTQHGKEDLKFPRGQGVPINTNSSPDDQIGYYRRATRRIRGGDGKMKDLSPRWYFYYLGTGPEAGLPYGANKDGIIWVATEGALNTPKDHIGTRNPANNAAIVLQLPQGTTLPKGFYAEGSRGGSQASSRSSSRSRNSSRNSTPGSSRGTSPARMAGNGGDAALALLLLDRLNQLESKMSGKGQQQQGQTVTKKSAAEASKKPRQKRTATKAYNVTQAFGRRGPEQTQGNFGDQELIRQGTDYKHWPQIAQFAPSASAFFGMSRIGMEVTPSGTWLTYTGAIKLDDKDPNFKDQVILLNKHIDAYKTFPPTEPKKDKKKKADETQALLQRQKKQQTVTLLPAADLDDFSKQLQQSMSSADSTQA

SEQ ID NO: 15479 - protein, 419 aa, Artificial Sequence
  SARS-CoV-2__MT811513.1__nucleocapsid protein (N)
MSDNGPQNQRNAPRITFGGPSDSTGSNQNGERSGARSKQRRPQGLPNNTASWFTALTQHGKEDLKFPRGQGVPINTNSSPDDQIGYYRRATRRIRGGDGKMKDLSPRWYFYYLGTGPEAGLPYGANKDGIIWVATEGALNTPKDHIGTRNPANNAAIVLQLPQGTTLPKGFYAEGSRGGSQASSRSSSRSRNSLRNSTPGSSRGTSPARMAGNGGDAALALLLLDRLNQLESKMSGKGQQQQGQTVTKKSAAEASKKPRQKRTATKAYNVTQAFGRRGPEQIQGNFGDQELIRQGTDYKHWPQIAQFAPSASAFFGMSRIGMEVTPSGTWLTYTGAIKLDDKDPNFKDQVILLNKHIDAYKTFPPTEPKKDKKKKADETQALSQRQKKQQTVTLLPAADLDDFSKQLQQSMSSADSTQA

SEQ ID NO: 15480 - protein, 419 aa, Artificial Sequence
  SARS-CoV-2__MT811515.1__nucleocapsid protein (N)
MSDNGPQNQRNAPRITFGGLSDSTGSNQNGERSGARSKQRRPQGLPNNTASWFTALTQHGKEDLKFPRGQGVPINTNSSPDDQIGYYRRATRRIRGGDGKMKDLSPRWYFYYLGTGPEAGLPYGANKDGIIWVATEGALNTPKDHIGTRNPANNAAIVLQLPQGTTLPKGFYAEGSRGGSQASSRSSSRSRNSLRNSTPGSSRGTSPARMAGNGGDAALALLLLDRLNQLESKMSGKGQQQQGQTVTKKSAAEASKKPRQKRTATKAYNVTQAFGRRGPEQTQGNFGDQELIRQGTDYKHWPQIAQFAPSASAFFGMSRIGMEVTPSGTWLTYTGAIKLDDKDPNFKDQVILLNKHIDAYKTFPPTEPKKDKKKKADETQALPQRQKKQQTVTLLPAADLDDFSKQLQQSMSSADSTQA

SEQ ID NO: 15481 - protein, 419 aa, Artificial Sequence
  SARS-CoV-2__MT811521.1__nucleocapsid protein (N)
MSDNGPQNQRNAPRITFGGPSDSTGSNQNGERSGARSKQRRPQGLPNNTASWFTALTQHGKEDLKFPRGQGVPINTNSSPDDQIGYYRRATRRIRGGDGKMKDLSPRWYFYYLGTGPEAGLPYGANKDGIIWVATEGALNTPKDHIGTRNPANNAAIVLQLPQGTTLPKGFYAEGSRGGSQASSRSSSRSRNSSRNSTPGSSRGTSPARMAGNGGDAALTLLLLDRLNQLESKMSGKGQQQQGQTVTKKSAAEASKKPRQKRTATKAYNVTQAFGRRGPEQTQGNFGDQELIRQGTDYKHWPQIAQFAPSASAFFGMSRIGMEVTPSGTWLTYTGAIKLDDKDPNFKDQVILLNKHIDAYKTFPPTEPKKDKKKKADETQALPQRQKKQQTVTLLPAADLDDFSKQLQQSMSSADSTQA

SEQ ID NO: 15482 - protein, 419 aa, Artificial Sequence
  SARS-CoV-2__MT811726.1__nucleocapsid protein (N)
MSDNGPQNQRNAPRITFGGPSDSTGSNQNGERSGARSKQRRPQGLPNNTASWFTALTQHGKEDLKFPRGQGVPINTNSSPDDQIGYYRRATRRIRGGDGKMKDLSPRWYFYYLGTGPEAGLPYGANKDGIIWVATEGALNTSKDHIGTRNPANNAAIVLQLPQGTTLPKGFYAEGSRGGSQASSRSSSRSRNSSRNSTPGSSRGTSPARMAGNGGDAALALLLLDRLNQLESKMSGKGQQQQGQTVTKKSAAEASKKPRQKRTATKAYNVTQAFGRRGPEQTQGNFGDQELIRQGTDYKHWPQIAQFAPSASAFFGMSRIGMEVTPSGTWLTYTGAIKLDDKDPNFKDQVILLNKHIDAYKTFPPTEPKKDKKKKADETQALPQRQKKQQTVTLLPAADLDDFSKQLQQSMSSADSTQA

SEQ ID NO: 15483 - protein, 419 aa, Artificial Sequence
  SARS-CoV-2__MT806773.1__nucleocapsid protein (N)
MSDNGPQNQRNAPRITFGGPSDSTGSNQNGERSGARSKQRRPQGLPNNTASWFTALTQHGKEDLKFPRGQGVPINTNSSPDDQIGYYRRATRRIRGGDGKMKDLSPRWYFYYLGTGPEAGLPYGANKDGIIWVATEGALNTPKDHIGTRNPANNAAIVLQLPQGTTLPKGFYAEGSRGGSQASSRSSSRSRNSSRNSTPGSIRGTSPARMAGNGGDAALALLLLDRLNQLESKMSGKGQQQQGQTVTKKSAAEASKKPRQKRTATKAYNVTQAFGRRGPEQTQGNFGDQELIRQGTDYKHWPQIAQFAPSASAFFGMSRIGMEVTPSGTWLTYTGAIKLDDKDPNFKDQVILLNKHIDAYKTFPPTEPKKDKKKKADETQALPQRQKKQQTVTLLPAADLDDFSKQLQQSMSSADSTQA

SEQ ID NO: 15484 - protein, 419 aa, Artificial Sequence
  SARS-CoV-2__MT806776.1__nucleocapsid protein (N)
MSDNGPQNQRNAPRITFGGPSDSTGSNQNGERSGARSKQRRPQGLPNNTASWFTALTQHGKEDLKFPRGQGVPINTNSSPDDQIGYYRRATRRIRGGDGKMKDLSPRWYFYYLGTGPEAGLPYGANKDGIIWVATEGALNTPKDHIGTRNPANNAAIVLQLPQGTTLPKGFYAEGSRGGSQASSRSSSRSRNSSRNSTPGSSRGTSPARMAGNGGDAALALLLLDRLNQLESKMSGKGQQQQGQTVTKKSAAEASKKPRQKRTATKAYNVTQAFGRRGPEQTQGNFGDQELIRQGTDYKHWPQIAQFAPSASAFFGMSRIGMEVTPSGTWLTYTGAIKLDDKDPNFKDQVILLNKHIDAYKTFPPIEPKKDKKKKADETQALPQRQKKQQTVTLLPAADLDDFSKQLQQSMSSADSTQA

SEQ ID NO: 15485 - protein, 419 aa, Artificial Sequence
  SARS-CoV-2__MT806778.1__nucleocapsid protein (N)
MSDNGPQNQRNAPRITFGGPSDSTGSNQNGERSGARSKQRRPQGLPNNTASWFTALTQHGKEDLKFPRGQGVPINTNSSPDDQIGYYRRATRRIRGGDGKMKDLSPRWYFYYLGTGPEAGLPYGANKDGIIWVATEGALNTPKDHIGTRNPANNAAIVLQLPQGTTLPKGFYAEGSRGGSQASSRSSSRSRNSSRNSTPGSSRGTSPARMSGNGGDAALALLLLDRLNQLESKMSGKGQQQQGQTVTKKSAAEASKKPRQKRTATKAYNVTQAFGRRGPEQTQGNFGDQELIRQGTDYKHWPQIAQFAPSASAFFGMSRIGMEVTPSGTWLTYTGAIKLDDKDPNFKDQVILLNKHIDAYKTFPPTEPKKDKKKKADETQALPQRQKKQQTVTLLPAADLDDFSKQLQQSMSSADSTQA

SEQ ID NO: 15486 - protein, 419 aa, Artificial Sequence
  SARS-CoV-2__MT806787.1__nucleocapsid protein (N)
MSDNGPQNQRNAPRITFGGPSDSTGSNQNGERSGARSKQRRPQGLPNNTASWFTALTQHGKEDLKFPRGQGVPINTNSSPDDQIGYYRRATRRIRGGDGKMKDLSPRWYFYYLGTGPEAGLPYGANKDGIIWVATEGALNTPKDHIGTRNPANNAAIVLQLPQGTTLPKGFYAEGSRGGSQASSRSSSRSRNSSRNSTPGSSRGTSPARMAGNCGDAALALLLLDRLNQLESKMSGKGQQQQGQTVTKKSAAEASKKPRQKRTATKAYNVTQAFGRRGPEQTQGNFGDQELIRQGTDYKHWPQIAQFAPSASAFFGMSRIGMEVTPSGTWLTYTGAIKLDDKDPNFKDQVILLNKHIDAYKTFPPTEPKKDKKKKADETQALPQRQKKQQTVTLLPAADLDDFSKQLQQSMSSADSTQA

SEQ ID NO: 15487 - protein, 419 aa, Artificial Sequence
  SARS-CoV-2__MT800928.1__nucleocapsid protein (N)
MSDNGPQNQRNAPRITFGGPSDSTGSNQNGERSGARSKQRRPQGLPNNTASWFTALTQHGKEDLKFPRGQGVPINTNSSPDDQIGYYRRATRRIRGGDGKMKDLSPRWYFYYLGTGPEAGLPYGANKDGIIWVATEGALNTPKDHIGTRNPANNAAIVLQLPQGTTLPKGFYAEGSRGGSQASSRSSSRSRNSLRNSTPGSSKTTSPARMAGNGGDAALALLLLDRLNQLESKMSGKGQQQQGQTVTKKSAAEASKKPRQKRTATKAYNVTQAFGRRGPEQTQGNFGDQELIRQGTDYKHWPQIAQFAPSASAFFGMSRIGMEVTPSGTWLTYTGAIKLDDKDPNFKDQVILLNKHIDAYKTFPPTEPKKDKKKKADETQALPQRQKKQQTVTLLPAADLDDFSKQLQQSMSSADSTQA

SEQ ID NO: 15488 - protein, 419 aa, Artificial Sequence
  SARS-CoV-2__MT797771.1__nucleocapsid protein (N)
MSDNGPQNQRNAPRITFGGPSDSTGSNQNGERSGARSKQRRPQGLPNNTASWFTALTQHGKEDLKFPRGQGVPINTNSSPDDQIGYYRRATRRIRGGDGKMKDLSPRWYFYYLGTGPEAGLPYGANKDGIIWVATEGALNTPKDHIGTRNPANNAAIVLQLPQGTTLPKGFYAEGSRGGSQASSRSSSRGRNSSRNSTPGSSRGTSPARMAGNGGDAALALLLLDRLNQLESKMSGKGQQQQGQTVTKKSAAEASKKPRQKRTATKAYNVTQAFGRRGPEQTQGNFGDQELIRQGTDYKHWPQIAQFAPSASAFFGMSRIGMEVTPSGTWLTYTGAIKLDDKDPNFKDQVILLNKHIDAYKTFPPTEPKKDKKKKADETQALLQRQKKQQTVTLLPAADLDDFSKQLQQSMSSADSTQA

SEQ ID NO: 15489 - protein, 419 aa, Artificial Sequence
  SARS-CoV-2__MT791844.1__nucleocapsid protein (N)
MSDNGPQNQRNAPRITFGGPSDSTGSNQNGERSGARSKQRRPQGLPNNTASWFTALTQHGKEDLKFPRGQGVPINTNSSPDDQIGYYRRATRRIRGGDGKMKDLSPRWYFYYLGTGPEAGLPYGANKDGIIWVATEGALNIPKDHIGTRNPANNAAIVLQLPQGTTLPKGFYAEGSRGGSQASSRSSSRSRNSSRNSTPGSSRGTSPARMAGNGGDAALALLLLDRLNQLESKMSGKGQQQQGQTVTKKSAAEASKKPRQKRTATKAYNVTQAFGRRGPEQTQGNFGDQELIRQGTDYKHWPQIAQFAPSASAFFGMSRIGMEVTPSGTWLTYTGAIKLDDKDPNFKDQVILLNKHIDAYKTFPPTEPKKDKKKKADETQALPQRQKKQQTVTLLPAADLDDFSKQLQQSMSSADSTQA

SEQ ID NO: 15490 - protein, 419 aa, Artificial Sequence
  SARS-CoV-2__MT791858.1__nucleocapsid protein (N)
MSDNGPQNQRNAPRITFGGPSGSTGSNQNGERSGARSKQRRPQGLPNNTASWFTALTQHGKEDLKFPRGQGVPINTNSSPDDQIGYYRRATRRIRGGDGKMKDLSPRWYFYYLGTGPEAGLPYGANKDGIIWVATEGALNTPKDHIGTRNPANNAAIVLQLPQGTTLPKGFYAEGSRGGSQASSRSSSRSRNSSRNSTPGSSRGTSPARMAGNGGDAALALLLLDRLNQLESKMSGKGQQQQGQTVTKKSAAEASKKPRQKRTATKAYNVTQAFGRRGPEQTQGNFGDQELIRQGTDYKHWPQIAQFAPSASAFFGMSRIGMEVTPSGTWLTYTGAIKLDDKDPNFKDQVILLNKHIDAYKTFPPTEPKKDKKKKADETQALPQRQKKQQTVTLLPAADLDDFSKQLQQSMSSADSTQA

SEQ ID NO: 15491 - protein, 419 aa, Artificial Sequence
  SARS-CoV-2__MT791862.1__nucleocapsid protein (N)
MSDNGPQNQRNAPRITFGGPSDSTGSNQNGERSGARSKQRRPQGLPNNTASWFTALTQHGKEDLKFPRGQGVPINTNSSPDDQIGYYRRATRRIRGGDGKMKDLSPRWYFYYLGTGPEAGLPYGANKDGIIWVATEGALNTPKDHIGTRNPANNAAIVLQLPQGTTLPKGFYAEGSRGGTQASSRSSSRSRNSSRNSTPGSSRGTSPARMAGNGGDAALALLLLDRLNQLESKMSGKGQQQQGQTVTKKSAAEASKKPRQKRTATKAYNVTQAFGRRGPEQTQGNFGDQELIRQGTDYKHWPQIAQFAPSASAFFGMSRIGMEVTPSGTWLTYTGAIKLDDKDPNFKDQVILLNKHIDAYKTFPPTEPKKDKKKKADETQALPQRQKKQQTVTLLPAADLDDFSKQLQQSMSSADSTQA

SEQ ID NO: 15492 - protein, 419 aa, Artificial Sequence
  SARS-CoV-2__MT791896.1__nucleocapsid protein (N)
MSDNGPQNQRNVPRITFGGPSDSTGSNQNGERSGARSKQRRPQGLPNNTASWFTALTQHGKEDLKFPRGQGVPINTNSSPDDQIGYYRRATRRIRGGDGKMKDLSPRWYFYYLGTGPEAGLPYGANKDGIIWVATEGALNTPKDHIGTRNPANNAAIVLQLPQGTTLPKGFYAEGSRGGSQASSRSSSRSRNSSRNSTPGSSRGTSPARMAGNGGDAALALLLLDRLNQLESKMSGKGQQQQGQTVTKKSAAEASKKPRQKRTATKAYNVTQAFGRRGPEQTQGNFGDQELIRQGTDYKHWPQIAQFAPSASAFFGMSRIGMEVTPSGTWLTYTGAIKLDDKDPNFKDQVILLNKHIDAYKTFPPTEPKKDKKKKADETQALPQRQKKQQTVTLLPAADLDDFSKQLQQSMSSADSTQA

SEQ ID NO: 15493 - protein, 419 aa, Artificial Sequence
  SARS-CoV-2__MT791938.1__nucleocapsid protein (N)
MSDNGPQNQRNAPRITFGGPSDSTGSNQNGERSGARSKQRRPQGLPNNTASWFTALTQHGKEDLKFPRGQGVPINTNSSPDDQIGYYRRATRRIRGGDGKMKDLSPRWYFYYLGTGPESGLPYGANKDGIIWVATEGALNTPKDHIGTRNPANNAAIVLQLPQGTTLPKGFYAEGSRGGSQASSRSSSRSRNSSRNSTPGSSRGTSPARMAGNGGDAALALLLLDRLNQLESKMSGKGQQQQGQTVTKKSAAEASKKPRQKRTATKAYNVTQAFGRRGPEQTQGNFGDQELIRQGTDYKHWPQIAQFAPSASAFFGMSRIGMEVTPSGTWLTYTGAIKLDDKDPNFKDQVILLNKHIDAYKTFPPTEPKKDKKKKADETQALPQRQKKQQTVTLLPAADLDDFSKQLQQSMSSADSTQA

SEQ ID NO: 15494 - protein, 419 aa, Artificial Sequence
  SARS-CoV-2__MT791944.1__nucleocapsid protein (N)
MSDNGPQNQRNAPRITFGGPSDSTGSNQNGERSGARSKQRRPQGLPNNTASWFTALTQHGKEDLKFPRGQGVPINTNSSPDDQIGYYRRATRRIRGGDGKMKDLSPRWYFYYLGTGPEAGLPYGANKDGIIWVATEGALNTPKDHIGTRNPANNAAIVLQLPQGTTLPKGFYAEGSRGGSQASSRSSSRSRNSSRNSTPGSSRGTSPARMAGNGGDAALALLLLDRLNQLESKMSGKGQQQQGQTVTKKSAAEASKKPRQKRTATKAYNVTQAFGRRGPEQTQGNFGDQELIRQGTDYKQWPQIAQFAPSASAFFGMSRIGMEVTPSGTWLTYTGAIKLDDKDPNFKDQVILLNKHIDAYKTFPPTEPKKDKKKKADETQALPQRQKKQQTVTLLPAADLDDFSKQLQQSMSSADSTQA

SEQ ID NO: 15495 - protein, 419 aa, Artificial Sequence
  SARS-CoV-2__MT791948.1__nucleocapsid protein (N)
MSDNGPQNQRNAPRITFGGPSDSTGSNQNGERSGARSKQRRPQGLPNNTASWFTALTQHGKEDLKFPRGQGVPINTNSSPDDQIGYYRRATRRIRGGDGKMKDLSPRWYFYYLGTGPEAGLPYGANKDGIIWVATEGALNTPKDHIGTRNPANNAAIVLQLPQGTTLPKGFYAEGSRGGSQASSRSSSRSRNSSRNSTPGSSRGTSPARMAGNGGDAALALLLLDRLNQLESKMSGKGQQQQGQTVTKKSAAEASKKPRQKRTATKAYNVTQAFGRRGPEQTQGNFGDQELIRQGTDYKHWPQIAQFAPSASAFFGMSRIGMEVTPSGTWLTYTGAIKLDDKDPNFKDQVILLNKHIDAYKTFPPTEPKKDKKKKADETQALPQRQKKQQTVTLLPAADLDDFSKQLQQSMSSADSTQS

SEQ ID NO: 15496 - protein, 419 aa, Artificial Sequence
  SARS-CoV-2__MT786836.1__nucleocapsid protein (N)
MSDNGPQNQRNAPRITFGGPSDSTGSNQNGERSGARSKQRRPQGLPNNTASWFTALTQHGKEDLKFPRGQGVPINTNSSPDDQIGYYRRATRRIRGGDGKMKDLSPRWYFYYLGTGPEAGLPYGANKDGIIWVATEGALNTPKDHIGTRNPANNAAIVLQLPQGTTLPKGFYAEGSRGGSQASSRSSSRSRNSSKNSTPGSSRGTSPARMAGNGGDAALALLLLDRLNQLESKMSGKGQQQQGQTVTKKSAAEASKKPRQKRTATKAYNVTQAFGRRGPEQTQGNFGDQELIRQGTDYKHWPQIAQFAPSASAFFGMSRIGMEVTPSGTWLTYTGAIKLDDKDPNFKDQVILLNKHIDAYKTFPPTEPKKDKKKKADETQALPQRQKKQQTVTLLPAADLDDFSKQLQQSMSSADSTQA

SEQ ID NO: 15497 - protein, 419 aa, Artificial Sequence
  SARS-CoV-2__MT786839.1__nucleocapsid protein (N)
MSDNGPQNQRNAPRITFGGPSDSTGSNQNGERSGARSKQRRPQGLPNNTASWFTALTQHGKEDLKFPRGQGVPINTNSSPDDQIGYYRRATRRIRGGDGKMKDLSPRWYFYYLGTGPEAGLPYGANKDGIIWVATEGALNTPKDHIGTRNPANNAAIVLQLPQGTTLPKGFYAEGSRGGSQASSRSSSRSRNSSRNSTPGSSRGISPGRMAGNGGDAALALLLLDRLNQLESKMSGKGQQQQGQTVTKKSAAEASKKPRQKRTATKAYNVTQAFGRRGPEQTQGNFGDQELIRQGTDYKHWPQIAQFAPSASAFFGMSRIGMEVTPSGTWLTYTGAIKLDDKDPNFKDQVILLNKHIDAYKTFPPTEPKKDKKKKADETQALPQRQKKQQTVTLLPAADLDDFSKQLQQSMSSADSTQA

SEQ ID NO: 15498 - protein, 419 aa, Artificial Sequence
  SARS-CoV-2__MT787500.1__nucleocapsid protein (N)
MSDNGPQNQRNAPRITFGGPSDSTGSNQNGERSGARSKQRRPQGLPNNTASWFTALTQHGKEDLKFPRGQGVPINTNSSPDDQIGYYRRATRRIRGGDGKMKDLSPRWYFYYLGTGPEAGLPYGANKDGIIWVATEGALNTPKDHIGTRNPANNAAIVLQLPQGTTLPKGFYAEGSRGGSQASSRSSSRSRNSSINSTPGSSRGTSPARMAGNGGDAALALLLLDRLNQLESKMSGKGQQQQGQTVTKKSAAEASKKPRQKRTATKAYNVTQAFGRRGPEQTQGNFGDQELIRQGTDYKHWPQIAQFAPSASAFFGMSRIGMEVTPSGTWLTYTGAIKLDDKDPNFKDQVILLNKHIDAYKTFPPTEPKKDKKKKADETQALPQRQKKQQTVTLLPAADLDDFSKQLQQSMSSADSTQA

SEQ ID NO: 15499 - protein, 419 aa, Artificial Sequence
  SARS-CoV-2__MT787564.1__nucleocapsid protein (N)
MSDNGPQNQRNAPRITFGGPSDSTGSNQNGERSGARSKQRRPQGLPNNTASWFTALTQHGKEDLKFPRGQGVPINTNSSPDDQIGYYRRATRRIRGGDGKMKDLSPRWYFYYLGTGPEAGLPYGANKDGIIWVATEGALNTPKDHIGTRNPANNAAIVLQLPQGTTLPKGFYAEGSRGGSQASSRSSSRSRNSSRNSTPGSSKRTSPARMAGNGGDAALALLLLDRLNQLESKMSGKGQQQQGQTVTKKSAAEASKKPRQKRTATKAYNVTQAFGRRGPEQTQGNFGDQELIRQGTDYKYWPQIAQFAPSASAFFGMSRIGMEVTPSGTWLTYTGAIKLDDKDPNFKDQVILLNKHIDAYKTFPPTEPKKDKKKKADETQALPQRQKKQQTVTLLPAADLDDFSKQLQQSMSSADSTQA

SEQ ID NO: 15500 - protein, 419 aa, Artificial Sequence
  SARS-CoV-2__MT789690.1__nucleocapsid protein (N)
MSDNGPQNQRNAPRITFGGPSDSTGSNQNGERSGARSKQRRPQGLPNNTASWFTALTQHGKEDLKFPRGQGVPINTNSSPDDQIGYYRRATRRIRGGDGKMKDLSPRWYFYYLGTGPEAGLPYGANKDGIIWVATEGAFNTPKDHIGTRNPANNAAIVLQLPQGTTLPKGFYAEGSRGGSQASSRSSSRSRNSLRNSTPGSSRGTSPARMAGNGGDAALALLLLDRLNQLESKMSGKGQQQQGQTVTKKSAAEASKKPRQKRTATKAYNVTQAFGRRGPEQTQGNFGDQELIRQGTDYKHWPQIAQFAPSASAFFGMSRIGMEVTPSGTWLTYTGAIKLDDKDPNFKDQVILLNKHIDAYKTFPPTEPKKDKKKKADETQALPQRQKKQQTVTLLPAADLDDFSKQLQQSMSSADSTQA

SEQ ID NO: 15501 - protein, 419 aa, Artificial Sequence
  SARS-CoV-2__MT775831.1__nucleocapsid protein (N)
MSDNGPQNQRNAPRITFGGPSDSTGSNQNGERSGARSKQRRPQGLPNNTASWFTALTQHGKEDLKFPRGQGVPINTNSSPDDQIGYYRRATRRIRGGDGKMKDLSPRWYFYYLGTGPEAGLPYGANKDGIIWVATEGALNTPKDHIGTRNPANNAAIVLQLPQGTTLPKGFYAEGSRGGSQASSRSSSRSRNSSRNSTPGNSKRTSPARMAGNGGDAALALLLLDRLNQLESKMSGKGQQQQGQTVTKKSAAEASKKPRQKRTATKAYNVTQAFGRRGPEQTQGNFGDQELIRQGTDYKHWPQIAQFAPSASAFFGMSRIGMEVTPSGTWLTYTGAIKLDDKDPNFKDQVILLNKHIDAYKTFPPTEPKKDKKKKADETQALPQRQKKQQTVTLLPAADLDDFSKQLQQSMSSADSTQA

SEQ ID NO: 15502 - protein, 419 aa, Artificial Sequence
  SARS-CoV-2__MT772427.1__nucleocapsid protein (N)
MSDNGPQNQRNAPRITFGGPSDSTGSNQNGERSGARSKQRRPQGLPNNTASWFTALTQHGKEDLKFPRGQGVPINTNSSPDDQIGYYRRATRRIRGGDGKMKDLSPRWYFYYLGTGPEAGLPYGANKDGIIWVATEGALNTPKDHIGTRNPANNAAIVLQLPQGTTLPKGFYAEGSRGGSQASSRSSSRSRNSSRNSTPGSSMGTSPARMAGNGGDAALALLLLDRLNQLESKMSGKGQQQQGQTVTKKSAAEASKKPRQKRTATKAYNVTQAFGRRGPEQTQGNFGDQELIRQGTDYKHWPQIAQFAPSASAFFGMSRIGMEVTPSGTWLTYTGAIKLDDKDPNFKDQVILLNKHIDAYKTFPPTEPKKDKKKKADATQALPQRQKKQQTVTLLPAADLDDFSKQLQQSMSSADSTQA

SEQ ID NO: 15503 - protein, 419 aa, Artificial Sequence
  SARS-CoV-2__MT772433.1__nucleocapsid protein (N)
MSDNGPQNQRNAPRITFGGPSDSTGSNQNVERSGARSKQRRPQGLPNNTASWFTALTQHGKEDLKFPRGQGVPINTNSSPDDQIGYYRRATRRIRGGDGKMKDLSPRWYFYYLGTGPEAGLPYGANKDGIIWVATEGALNTPKDHIGTRNPANNAAIVLQLPQGTTLPKGFYAEGSRGGSQASSRSSSRSRNSSRNSTPGSSRGTSPARMAGNGGDAALALLLLDRLNQLESKMSGKGQQQQGQTVTKKSAAEASKKPRQKRTATKAYNVTQAFGRRGPEQTQGNFGDQELIRQGTDYKHWPQIAQFAPSASAFFGMSRIGMEVTPSGTWLTYTGAIKLDDKDPNFKDQVILLNKHIDAYKTFPPTEPKKDKKKKADETQALPQRQKKQQTVTLLPAADLDDFSKQLQQSMSSADSTQA

SEQ ID NO: 15504 - protein, 419 aa, Artificial Sequence
  SARS-CoV-2__MT766907.1__nucleocapsid protein (N)
MSDNGPQNQRNAPRITFGGPSDSTGSNQNGERSGARSKQRRPQGLPNNTASWFTALTQHGKEDLKFPRGQGVPINTNSSPDDQIGYYRRATRRIRGGDGKMKDLSPRWYFYYLGTGPEAGLPYGANKDGIIWVATEGALNTPKDHIGTRNPANNAAIVLQLPQGTTLPKGFYAEGSRGGSQASSRSSSRSRNSSRNSTPGGSRGTSPARMAGNGGDAALALLLLDRLNQLESKMSGKGQQQQGQTVTKKSAAEASKKPRQKRTATKAYNVTQAFGRRGPEQTQGNFGDQELIRQGTDYKHWPQIAQFAPSASAFFGMSRIGMEVTPSGTWLTYTGAIKLDDKDPNFKDQVILLNKHIDAYKTFPPTEPKKDKKKKADETQALPQRQKKQQTVTLLPAADLDDFSKQLQQSMSSADSTQA

SEQ ID NO: 15505 - protein, 419 aa, Artificial Sequence
  SARS-CoV-2__MT772085.1__nucleocapsid protein (N)
MSDNGPQNQRNAPRITFGGPSDSTGSNQNGERSGARSKQRRPQGLPNNTASWFTALTQHGKEDLKFPRGQGVPINTNSSPDDQIGYYRRATRRIRGGDGKMKDLSPRWYFYYLGTGPEAGLLYGANKDGIIWVATEGALNTPKDHIGTRNPANNAAIVLQLPQGTTLPKGFYAEGSRGGSQASSRSSSRSRNSSRNSTPGSSRGTSPARMAGNGGDAALALLLLDRLNQLESKMSGKGQQQQGQTVTKKSAAEASKKPRQKRTATKAYNVTQAFGRRGPEQTQGNFGDQELIRQGTDYKHWPQIAQFAPSASAFFGMSRIGMEVTPSGTWLTYTGAIKLDDKDPNFKDQVILLNKHIDAYKTFPPTEPKKDKKKKADETQALPQRQKKQQTVTLLPAADLDDFSKQLQQSMSSADSTQA

SEQ ID NO: 15506 - protein, 419 aa, Artificial Sequence
  SARS-CoV-2__MT758213.1__nucleocapsid protein (N)
MSDNGPQNQRNAPRITFGGPSDSTGSNQNGERSGARSKQRRPQGLPNNTASWFTALTQHGKEDLKFPRGQGVPINTNSSPDDQIGYYRRATRRIRGSDGKMKDLSPRWYFYYLGTGPEAGLPYGANKDGIIWVATEGALNTPKDHIGTRNPANNAAIVLQLPQGTTLPKGFYAEGSRGGSQASSRSSSRSRNSLRNSTPGSSRGTSPARMAGNGGDAALALLLLDRLNQLESKMSGKGQQQQGQTVTKKSAAEASKKPRQKRTATKAYNVTQAFGRRGPEQTQGNFGDQELIRQGTDYKHWPQIAQFAPSASAFFGMSRIGMEVTPSGTWLTYTGAIKLDDKDPNFKDQVILLNKHIDAYKTFPPTEPKKDKKKKADETQALPQRQKKQQTVTLLPAADLDDFSKQLQQSMSSADSTQA

SEQ ID NO: 15507 - protein, 419 aa, Artificial Sequence
  SARS-CoV-2__MT758471.1__nucleocapsid protein (N)
MSDNGPQNQRNAPRITFGGPSDSTGSNQNGERSGARSKQRRPQGLPNNTASWFTALTQHGKEDLKFPRGQGVPINTNSSPDDQIGYYRRATRRIRGGDGKMKDLSPRWYFYYLGTGPEAGLPYGANKDGIIWVATEGALNTPKDHIGTRNPANNAAIVLQLPQGTTLPKGFYAEGSRGGSQASSRSSSRSRNSLRNSTPGSNRGTSPARMAGNGGDAALALLLLDRLNQLESKMSGKGQQQQGQTVTKKSAAEASKKPRQKRTATKAYNVTQAFGRRGPEQTQGNFGDQELIRQGTDYKHWPQIAQFAPSASAFFGMSRIGMEVTPSGTWLTYTGAIKLDDKDPNFKDQVILLNKHIDAYKTFPPTEPKKDKKKKADETQALPQRQKKQQTVTLLPAADLDDFSKQLQQSMSSADSTQA

SEQ ID NO: 15508 - protein, 419 aa, Artificial Sequence
  SARS-CoV-2__MT759844.1__nucleocapsid protein (N)
MSDNGPQNQRNAPRITFGGPSDSTGSNQNGQRSGARSKQRRPQGLPNNTASWFTALTQHGKEDLKFPRGQGVPINTNSSPDDQIGYYRRATRRIRGGDGKMKDLSPRWYFYYLGTGPEAGLPYGANKDGIIWVATEGALNTPKDHIGTRNPANNAAIVLQLPQGTTLPKGFYAEGSRGGSQASSRSSSRSRNSSRNSTPGSSRGTSPARMAGNGGDAALALLLLDRLNQLESKMSGKGQQQQGQTVTKKSAAEASKKPRQKRTATKAYNVTQAFGRRGPEQTQGNFGDQELIRQGTDYKHWPQIAQFAPSASAFFGMSRIGMEVTPSGTWLTYTGAIKLDDKDPNFKDQVILLNKHIDAYKTFPPTEPKKDKKKKADETQALPQRQKKQQTVTLLPAADLDDFSKQLQQSMSSADSTQA

SEQ ID NO: 15509 - protein, 419 aa, Artificial Sequence
  SARS-CoV-2__MT764180.1__nucleocapsid protein (N)
MSDNGPQNQRNAPRITFGGPSDSTGSNQNGERSGARSKQRRPQGLPNNTASWFTALTQHGKEDLKFPRGQGVPINTNSSPDDQIGYYRRATRRIRGGDGKMKDLSPRWYFYYLGTGPEAGLPYGANKDGIIWVATEGALNTPKDHIGTRNPANNAAIVLQLPQGTTLPKGFYAEGSRGGSQASSRSSSRGRNSSRNSTPGSSRGTSPARMAGNGGDAALALLLLDRLNQLESKMSGKGQQQQGQTVTKKSAAEASKKPRQKRTATKAYNVTQAFGRRGPEQTQGNFGDQELIRQGTDYKHWPQIAQFAPSASAFFGMSRIGMEVTPSGTWLTYTGAIKLDDKDPNFKDQVILLNKHIDAYKTFPPTEPKKDKKKKADETQALPQRQKKQQTVTLLPAADLDDFSKQLQQSMSSADSTQA

SEQ ID NO: 15510 - protein, 419 aa, Artificial Sequence
  SARS-CoV-2__MT755891.1__nucleocapsid protein (N)
MSDNGPQNQRNAPRITFGGPSDSTGSNQNGERSGARSKQRRPQGLPNNTASWFTALTQHGKEDLKFPRGQGVPINTNSSPDDQIGYYRRATRRIRGGDGKMKDLSPRWYFYYLGTGPEAGLPYGANKDGIIWVATEGALNTPKDHIGTRNPANNAAIVLQLPQGTTLPKGFYAEGSRGGSQASSRSSSRSRNSLRNSTPGSSRGTSPARMAGNGGDAALALLLLDRLNQLESKMSGKGQQQQGQTVTKKSAAEASKKPRQKRTATKAYNVTQAFGRRGPEQTQGNFGDQELIRQGTDYKHWPQIAQFAPSASAFFGMSRIGMEVTPSGTWLTYTGAIKLDDKDPNFKDQVILLNKHIDAYKTFPPTEPKKDKKKKADETQALLQRQKKQQTVTLLPAADLDDFSKQLQQSMSSADSTQA

SEQ ID NO: 15511 - protein, 419 aa, Artificial Sequence
  SARS-CoV-2__MT757020.1__nucleocapsid protein (N)
MSDNGPQNQRNAPRITFGGPSDSTGSNQNGERSGARSKQRRPQGLPNNTASWFTALTQHGKEDLKFPRGQGVPINTNSSPDDQIGYYRRATRRIRGGDGKMKDLSPRWYFYYLGTGPEAGLPYGANKDGIIWVATEGALNTPKDHIGTRNPANNAAIVLQLPQGTTLPKGFYAEGSRGGSQASSRSSSRSRNSSRNSTPGSSRGTSPARMAGNGGDAALALLLLDRLNQLESKMSGKGQQQQGQTVTKKSAAEASKKPRQKRTATKAYNVTQAFGRRGPEQTQGNFGDQELIRQGTDYKHWPQIAQFAPSASAFFGMSRIGMEVTPSGTWLTYTGAIKLDDKDPNFKDQVILLNKHIDAYKTFPPTEPKKDKKKKADETQALPHRQKKQQTVTLLPAADLDDFSKQLQQSMSSADSTQA

SEQ ID NO: 15512 - protein, 419 aa, Artificial Sequence
  SARS-CoV-2__MT757085.1__nucleocapsid protein (N)
MSDNGPQNQRNAPRITFGGPSDSTGSNQNGERSGARSKQRRPQGLPNNTASWFTALTQHGKEDLKFPRGQGVPINTNSSPDDQIGYYRRATRRIRGGDGKMKDLSPRWYFYYLGTGPEAGLPYGANKDGIIWVATEGALNTPKDHIGTRNPANNAAIVLQLPQGTTLPKGFYAEGSRGGSQASSRSSSRSRNSSRNSTPGSSRGTSPARMAGNGGDAALALLLLDRLNQLESKMSGKGQQQQGQTVTKKSAAEASKKPRQKRTATKAYNVTQAFGRRGPEQTQGNFGDQELIRQGTDYKHWPQIAQFAPSASAFFGMSRIGMEVTPSGTWLTYTGAIKLDDKDPNFKDQVILLNKHIDAYKTFPPTEPKKDKKKKADETQALPQRQKKQQTVTLLPAADLDDFSKQLQQSMSSADLTQA

SEQ ID NO: 15513 - protein, 419 aa, Artificial Sequence
  SARS-CoV-2__MT757121.1__nucleocapsid protein (N)
MSDNGPQNQRNAPRITFGGPSDSTGSNQNGERSGARSKQRRPQGLPNNTASWFTALTQHGKEDLKFPRGQGVPINTNSSPDDQIGYYRRATRRIRGGDGKMKDLSPRWYFYYLGTGPEAGLPYGANKDGIIWVATEGALNTPKDHIGTRNPANNAAIVLQLPQGTTLPKGFYAEGSRGGSQASSRSSSRSRNSSRNSTPGSSKRTSPARMAGNGGDAALALLLLDRLNQLESKMSGKGQQQQGQTVTKKSAAEASKKPRQKRTATKAYNVTQAFGRRGPEQTQGNFGDQELTRQGTDYKHWPQIAQFAPSASAFFGMSRIGMEVTPSGTWLTYTGAIKLDDKDPNFKDQVILLNKHIDAYKTFPPTEPKKDKKKKADETQALPQIQKKQQTVTLLPAADLDDFSKQLQQSMSSADSTQA

SEQ ID NO: 15514 - protein, 419 aa, Artificial Sequence
  SARS-CoV-2__MT745605.1__nucleocapsid protein (N)
MSDNGPQNQRNAPRITFGGPSDSTGSNQNGERSGARSKQRRPQGLPNNTASWFTALTQHGKEDLKFPRGQGVPINTNSSPDDQIGYYRRATRRIRGGDGKMKDLSPRWYFYYLGTGPEAGLPYGANKDGIIWVATEGALNTPKDHIGTRNPANNAAIVLQLPQGTTLPKGFYAEGSRGGSQASSRSSSRSRNSSRNSTPGSSRGTSPARMAGNGGDAALALLLLDRLNQLESKMSGKGQQQQGQTVTKKSAAEASKKPRQKRTATKAYNVTQAFGRRGPEQTQGNFGDQELIRQGTDYKHWPQIAQFAPSASAFFGMSRIGMEVTSSGTWLTYTGAIKLDDKDPNFKDQVILLNKHIDAYKTFPPTEPKKDKKKKADETQALPQRQKKQQTVTLLPAADLDDFSKQLQQSMSSADSTQA

SEQ ID NO: 15515 - protein, 419 aa, Artificial Sequence
  SARS-CoV-2__MT745658.1__nucleocapsid protein (N)
MSDNGPQNQRNAPRITFGGPSDSTGSNQNGERSGARSKQRRPQGLPNNTASWFTALTQHGKEDLKFPRGQGVPINTNSSPDDQIGYYRRATRRIRGGDGKMKDLSPRWYFYYLGTGPEAGLPYGANKDGIIWVATEGALNTPKDHIGTRNPANNAAIVLQLPQGTTLPKGFYAEGSRGGSQASSRSSSRSRNSSRNSTPGSSRGTSPARMAGNGGDAALALLLLDRLNQLESKISGKGQQQQGQTVTKKSAAEASKKPRQKRTATKAYNVTQAFGRRGPEQTQGNFGDQELIRQGTDYKHWPQIAQFAPSASAFFGMSRIGMEVTPSGTWLTYIGAIKLDDKDPNFKDQVILLNKHIDAYKTFPPTEPKKDKKKKADETQALPQRQKKQQTVTLLPAADLDDFSKQLQQSMSSADSTQA

SEQ ID NO: 15516 - protein, 419 aa, Artificial Sequence
  SARS-CoV-2__MT745664.1__nucleocapsid protein (N)
MSDNGPQNQRNAPRITFGGPSDSTGSNQNGERSGARSKQRRPQGLPNNTASWFTALTQHGKEDLKFPRGQGVPINTNSSPDDQIGYYRRATRRIRGGDGKMKDLSPRWYFYYLGTGPEAGLPYGANKDGIIWVATEGALNTPKDHIGTRNPANNAAIVLQLPQGTTLPKGFYAEGSRGGSQASSRSSSRSRNSSRNSTPGSSKRTSPARMAGNGGDAALALLLLDRLNQLESKMSGKGQQQQGQTVTKKSAAEASKKPRQKRTATKAYNVTQAFGRRGPEQTQGNFGDQELIRQGTDYKHWPQIAQFAPSASAFFGMSRIGVEVTPSGTWLTYTGAIKLDDKDPNFKDQVILLNKHIDAYKTFPPTEPKKDKKKKADETQALPQRQKKQQTVTLLPAADLDDFSKQLQQSMSSADSTQA

SEQ ID NO: 15517 - protein, 419 aa, Artificial Sequence
  SARS-CoV-2__MT745668.1__nucleocapsid protein (N)
MSDNGPQNQRNALRITFGGPSDSTGSNQNGERSGARSKQRRPQGLPNNTASWFTALTQHGKEDLKFPRGQGVPINTNSSPDDQIGYYRRATRRIRGGDGKMKDLSPRWYFYYLGTGPEAGLPYGANKDGIIWVATEGALNTPKDHIGTRNPANNAAIVLQLPQGTTLPKGFYAEGSRGGSQASSRSSSRSRNSSRNLTPGSSRGTSPARMAGNGGDAALALLLLDRLNQLESKMSGKGQQQQGQTVTKKSAAEASKKPRQKRTATKAYNVTQAFGRRGPEQTQGNFGDQELIRQGTDYKHWPQIAQFAPSASAFFGMSRIGMEVTPSGTWLTYTGAIKLDDKDPNFKDQVILLNKHIDAYKTFPPTEPKKDKKKKADETQALPQRQKKQQTVTLLPAADLDDFSKQLQQSMSSADSTQA

SEQ ID NO: 15518 - protein, 419 aa, Artificial Sequence
  SARS-CoV-2__MT745678.1__nucleocapsid protein (N)
MSDNGLQNQRNAPRITFGGPSDSTGSNQNGERSGARSKQRRPQGLPNNTASWFTALTQHGKEDLKFPRGQGVPINTNSSPDDQIGYYRRATRRIRGGDGKMKDLSPRWYFYYLGTGPEAGLPYGANKDGIIWVATEGALNTPKDHIGTRNPANNAAIVLQLPQGTTLPKGFYAEGSRGGSQASSRSSSRSRNSSRNSTPGSSRGTSPARMAGNGGDAALALLLLDRLNQLERKMSGKGQQQQGQTVTKKSAAEASKKPRQKRTATKAYNVTQAFGRRGPEQTQGNFGDQELIRQGTDYKHWPQIAQFAPSASAFFGMSRIGMEVTPSGTWLTYTGAIKLDDKDPNFKDQVILLNKHIDAYKTFPPTEPKKDKKKKADETQALPQRQKKQQTVTLLPAADLDDFSKQLQQSMSSADSTQA

SEQ ID NO: 15519 - protein, 419 aa, Artificial Sequence
  SARS-CoV-2__MT745697.1__nucleocapsid protein (N)
MSDNGPQNQRNAPRITFGGPSDSTGSNQNGERSGARSKQRRPQGLPNNTASWFTALTQHGKEDLKFPRGHGVPINTNSSPDDQIGYYRRATRRIRGGDGKMKDLSPRWYFYYLGTGPEAGLPYGANKDGIIWVATEGALNTPKDHIGTRNPANNAAIVLQLPQGTTLPKGFYAEGSRGGSQASSRSSSRSRNSSRNSTPGSSKRTSPARMAGNGGDAALALLLLDRLNQLESKMSGKGQQQQGQTVTKKSAAEASKKPRQKRTATKAYNVTQAFGRRGPEQTQGNFGDQELIRQGTDYKHWPQIAQFAPSASAFFGMSRIGMEVTPSGTWLTYTGAIKLDDKDPNFKDQVILLNKHIDAYKTFPPTEPKKDKKKKADETQALPQRQKKQQTVTLLPAADLDDFSKQLQQSMSSADSTQA

SEQ ID NO: 15520 - protein, 419 aa, Artificial Sequence
  SARS-CoV-2__MT745698.1__nucleocapsid protein (N)
MSDNGPQNQRNAPRITFGGPSDSTGSNQNGERSGARSKQRRPQGLPNNTASWFTALTQHGKEDLKFPRGQGVPINTNSSPDDQIGYYRRATRRIRGGDGKMKDLSPRWYFYYLGTGPEAGLPYGANKDGIIWVATEGALNTPKDHIGTRNPANNAAIVLQLPQGTTLPKGFYAEGSRGGSQASSRFSSRSRNSSRNSTPGSSRGTSPARMAGNGGDAALALLLLDRLNQLESKMSGKGQQQQGQTVTKKSAAEASKKPRQKRTATKAYNVTQAFGRRGPEQTQGNFGDQELIRQGTDYKHWPQIAQFAPSASAFFGMSRIGMEVTPSGTWLTYTGAIKLDDKDPNFKDQVILLNKHIDAYKTFPPTEPKKDKKKKADETQALPQRQKKQQTVTLLPAADLDDFSKQLQQSMSSADSTQA

SEQ ID NO: 15521 - protein, 419 aa, Artificial Sequence
  SARS-CoV-2__MT750025.1__nucleocapsid protein (N)
MSDNGPQNQRNAPRITFGGPSDSTGSNQNGERSGARSKQRRPQGLPNNTASWFTALTQHGKEDLKFPRGQGVPINTNSSPDDQIGYYRRATRRIRGGDGKMKDLSPRWYFYYLGTGPEAGLPYGANKDGIIWVATEGALNTPKDHIGTRNPANNVAIVLQLPQGTTLPKGFYAEGSRGGSQASSRSSSRSRNSSRNSTPGSSRGTSPARMAGNGGDAALALLLLDRLNQLESKMSGKGQQQQGQTVTKKSAAEASKKPRQKRTATKAYNVTQAFGRRGPEQTQGNFGDQELIRQGTDYKHWPQIAQFAPSASAFFGMSRIGMEVTPSGTWLTYTGAIKLDDKDPNFKDQVILLNKHIDAYKTFPPTEPKKDKKKKADETQALPQRQKKQQTVTLLPAADLDDFSKQLQQSMSSADSTQA

SEQ ID NO: 15522 - protein, 419 aa, Artificial Sequence
  SARS-CoV-2__MT750335.1__nucleocapsid protein (N)
MSDNGPQNQRNAPRITFGGPSDSTGSNQNGERSGARSKQRRPQGLPNNTASWFTALTQHGKEDLKFPRGQGVPINTNSSPDDQIGYYRRATRRIRGGDGKMKDLSPRWYFYYLGTGPEAGLPYGANKDGIIWVATEGALNTPKDHIGTRNPANNAAIVLQLPQGTTLPKGFYAEGSRGGSQASSRSSSRSRNSSRNSTPGSSKRTSPGRMAGNGGDAALALLLLDRLNQLESKMSGKGQQQQGQTVTKKSAAEASKKPRQKRTATKAYNVTQAFGRRGPEQTQGNFGDQELIRQGTDYKHWPQIAQFAPSASAFFGMSRIGMEVTPSGTWLTYTGAIKLDDKDPNFKDQVILLNKHIDAYKTFPPTEPKKDKKKKADETQALPQRQKKQQTVTLLPAADLDDFSKQLQQSMSSADSTQA

SEQ ID NO: 15523 - protein, 419 aa, Artificial Sequence
  SARS-CoV-2__MT750358.1__nucleocapsid protein (N)
MSDNGPQNQRNAPRITFGGPSDSTGSNQNGERSGARSKQRRPQGLPNNTASWFTALTQHGKEDLKFPRGQGVPINTNSSPDDQIGYYRRATRRIRGGDGKMKDLSPRWYFYYLGTGPEAGLPYGANKDGIIWVATEGALNTPKYHIGTRNPANNAAIVLQLPQGTTLPKGFYAEGSRGGSQASSRSSSRSRNSSRNSTPGSSRGTSPARMAGNGGDAALALLLLDRLNQLESKMSGKGQQQQGQTVTKKSAAEASKKPRQKRTATKAYNVTQAFGRRGPEQTQGNFGDQELIRQGTDYKHWPQIAQFAPSASAFFGMSRIGMEVTPSGTWLTYTGAIKLDDKDPNFKDQVILLNKHIDAYKTFPPTEPKKDKKKKADETQALPQRQKKQQTVTLLPAADLDDFSKQLQQSMSSADSTQA

SEQ ID NO: 15524 - protein, 419 aa, Artificial Sequence
  SARS-CoV-2__MT750385.1__nucleocapsid protein (N)
MSDNGPQNQRNAPRITFGGPSDSTGSNQNGERSGARSKQRRPQGLPNNTASWFTALTQHGKEDLKFPRGQGVPINTNSSPDDQIGYYRRATRRIRGGDGKMKDLSPRWYFYYLGTGPEAGLPYGANKDGIIWVATEGALNTPKDHIGTRNPANNAAIVLQLPQGTTLPKGFYAEGSRGGSQASSRSSSRSRNSSRNSTPGSSRGTSPARMAGNGGDAALALLLLDRLNQLESKMSGKGQQQQGQTVTKKSAAEASKKPRQKRTATKAYNVTQAFGRRGPEQTQGNFGDQELIRQGTDYKHWPQIAQFAPSASAFFGMSRIGMEVTPSGTWLTYTGAIKLDDKDPNFKDQVILLNKHIDAYKTFPPTEPKKYKKKKADETQALPQRQKKQQTVTLLPAADLDDFSKQLQQSMSSADSTQA

SEQ ID NO: 15525 - protein, 419 aa, Artificial Sequence
  SARS-CoV-2__MT750413.1__nucleocapsid protein (N)
MSDNGPQNQRNAPRITFGGPSDSTGSNQNGERSGARSKQRRPQGLPNNTASWFTALTQHGKEDLKFPRGQGVPINTNSSPDDQIGYYRRATRRIRGGDGKMKDLSPRWYFYYLGTGPEAGLPYGANKDGIIWVATEGALNTPKDHIGTRNPANNASIVLQLPQGTTLPKGFYAEGSRGGSQASSRSSSRSRNSSRNSTPGSSKRTSPARMAGNGGDAALALLLLDRLNQLESKMSGKGQQQQGQTVTKKSAAEASKKPRQKRTATKAYNVTQAFGRRGPEQTQGNFGDQELIRQGTDYKHWPQIAQFAPSASAFFGMSRIGMEVTPSGTWLTYTGAIKLDDKDPNFKDQVILLNKHIDAYKTFPPTEPKKDKKKKADETQALPQRQKKQQTVTLLPAADLDDFSKQLQQSMSSADSTQA

SEQ ID NO: 15526 - protein, 419 aa, Artificial Sequence
  SARS-CoV-2__MT750418.1__nucleocapsid protein (N)
MSDNGPQNQRNAPRITFGGPSDSTGSNQNGERSGARSKQRRPQGLPNNTASWFTALTQHGKENLKFPRGQGVPINTNSSPDDQIGYYRRATRRIRGGDGKMKDLSPRWYFYYLGTGPEAGLPYGANKDGIIWVATEGALNTPKDHIGTRNPANNAAIVLQLPQGTTLPKGFYAEGSRGGSQASSRSSSRSRNSSRSSTPGSSRGTSPARMAGNGGDAALALLLLDRLNQLESKMSGKGQQQQGQTVTKKSAAEASKKPRQKRTATKAYNVTQAFGRRGPEQTQGNFGDQELIRQGTDYKHWPQIAQFAPSASAFFGMSRIGMEVTPSGTWLTYTGAIKLDDKDPNFKDQVILLNKHIDAYKTFPPTEPKKYKKKKADETQALPQRQKKQQTVTLLPAADLDDFSKQLQQSMSSADSTQA

SEQ ID NO: 15527 - protein, 419 aa, Artificial Sequence
  SARS-CoV-2__MT740401.1__nucleocapsid protein (N)
MSDNGPQNQRSAPRITFGGPSDSTGSNQNGERSGARSKQRRPQGLPNNTASWFTALTQHGKEDLKFPRGQGVPINTNSSPDDQIGYYRRATRRIRGGDGKMKDLSPRWYFYYLGTGPEAGLPYGANKDGIIWVATEGALNTPKDHIGTRNPANNAAIVLQLPQGTTLPKGFYAEGSRGGSQASSRSSSRSRNSSRNSTPGSSKRTSPARMAGNGGDAALALLLLDRLNQLESKMSGKGQQQQGQTVTKKSAAEASKKPRQKRTATKAYNVTQAFGRRGPEQTQGNFGDQELIRQGTDYKHWPQIAQFAPSASAFFGMSRIGMEVTPSGTWLTYTGAIKLDDKDPNFKDQVILLNKHIDAYKTFPPTEPKKDKKKKADETQALPQRQKKQQTVTLLPAADLDDFSKQLQQSMSSADSTQA

SEQ ID NO: 15528 - protein, 419 aa, Artificial Sequence
  SARS-CoV-2__MT740431.1__nucleocapsid protein (N)
MSYNGPQNQRNAPRITFGGPSDSTGSNQNGERSGARSKQRRPQGLPNNTASWFTALTQHGKEDLKFPRGQGVPINTNSSPDDQIGYYRRATRRIRGGDGKMKDLSPRWYFYYLGTGPEAGLPYGANKDGIIWVATEGALNTPKDHIGTRNPANNAAIVLQLPQGTTLPKGFYAEGSRGGSQASSRSSSRSRNSSRNSTPGSSKRTSPARMAGNGGDAALALLLLDRLNQLESKMSGKGQQQQGQTVTKKSAAEASKKPRQKRTATKAYNVTQAFGRRGPEQTQGNFGDQELIRQGTDYKHWPQIAQFAPSASAFFGMSRIGMEVTPSGTWLTYTGAIKLDDKDPNFKDQVILLNKHIDAYKTFPPTEPKKDKKKKADETQALPQRQKKQQTVTLLPAADLDDFSKQLQQSMSSADSTQA

SEQ ID NO: 15529 - protein, 419 aa, Artificial Sequence
  SARS-CoV-2__MT740438.1__nucleocapsid protein (N)
MSDNGPQNQRNAPRITFGGPSDSTGSNQNGERSWARSKQRRPQGLPNNTASWFTALTQHGKEDLKFPRGQGVPINTNSSPDDQIGYYRRATRRIRGGDGKMKDLSPRWYFYYLGTGPEAGLPYGANKDGIIWVATEGALNTPKDHIGTRNPANNAAIVLQLPQGTTLPKGFYAEGSRGGSQASSRSSSRSRNSSRNSTPGSSRGTSPARMAGNGGDAALALLLLDRLNQLESKMSGKGQQQQGQTVTKKSAAEASKKPRQKRTATKAYNVTQAFGRRGPEQTQGNFGDQELIRQGTDYKHWPQIAQFAPSASAFFGMSRIGMEVTPSGTWLTYTGAIKLDDKDPNFKDQVILLNKHIDAYKTFPPTEPKKDKKKKADETQALPQRQKKQQTVTLLPAADLDDFSKQLQQSMSSADSTQA

SEQ ID NO: 15530 - protein, 419 aa, Artificial Sequence
  SARS-CoV-2__MT740444.1__nucleocapsid protein (N)
MSDNGPQNQRNAPRITFGGPSDSTGSNQNGERSGARSKQRRPQGLPNNTASWFTALTQHGKEDLKFPRGQGVPINTNSSPDDQIGYYRRATRRIRGGDGKMKDLSPRWYFYYLGTGPEAGLPYGANKDGIIWVATEGALNTPKDHIGTRNPANNASIVLQLPQGTTLPKGFYAEGSRGGSQASSRSSSRSRNSLRNSTPGSSRGTSPARMAGNGGDAALALLLLDRLNQLESKMSGKGQQQQGQTVTKKSAAEASKKPRQKRTATKAYNVTQAFGRRGPEQTQGNFGDQELIRQGTDYKHWPQIAQFAPSASAFFGMSRIGMEVTPSGTWLTYTGAIKLDDKDPNFKDQVILLNKHIDAYKTFPPTEPKKDKKKKADETQALPQRQKKQQTVTLLPAADLDDFSKQLQQSMSSADSTQA

SEQ ID NO: 15531 - protein, 419 aa, Artificial Sequence
  SARS-CoV-2__MT731669.1__nucleocapsid protein (N)
MSDNGPQNQRNAPRITFGGPSDSTGSNQNGERSGARSKQRRPQGLPNNTASWFTALTQHGKEDLKFPRGQGVPINTNSSPDDQIGYYRRATRRIRGGDGKMKDLSPRWYFYYLGTGPEAGLPYGANKDGIIWVATEGALNTPKDHIGTRNPSNNAAIVLQLPQGTTLPKGFYAEGSRGGSQASSRSSSRSRNSLRNSTPGSSRGTSPARMAGNGGDAALALLLLDRLNQLESKMSGKGQQQQGQTVTKKSAAEASKKPRQKRTATKAYNVTQAFGRRGPEQTQGNFGDQELIRQGTDYKHWPQIAQFAPSASAFFGMSRIGMEVTPSGTWLTYTGAIKLDDKDPNFKDQVILLNKHIDAYKTFPPTEPKKDKKKKADETQALPQRQKKQQTVTLLPAADLDDFSKQLQQSMSSADSTQA

SEQ ID NO: 15532 - protein, 419 aa, Artificial Sequence
  SARS-CoV-2__MT712859.1__nucleocapsid protein (N)
MSDNGPQNQRNAPRITFGGPSDSTGSNQNGERSGARSKQRRPQGLPNNTASWFTALTQHGKEDLKFPRGQGVPINTNSSPDDQIGYYRRATRRIRGGDGKMKDLSPRWYFYYLGTGPEAGLPYGANKDGIIWVATEGALNTPKDHIGTRNPANNAAIVLQLPQGTTLPKGFYAEGSRGGSQASSRSSSRSRNSSRNSTPGSSRGTSPARMAGNGGDAALALLLLDRLNQLESKMSGKGQQQQGQTVTKKSAAEASKKPRQKRTATKAYNVTQAFGRRGPEQTQGNFGDQELIRQGTDYKHWPQIAQFAPSASAFFGMSRIGMEVTPSGTWLTYTGAIKLDDKDPNFKDQVILLNKHIDAYKTFPPTEPKKDRKKKADETQALPQRQKKQQTVTLLPAADLDDFSKQLQQSMSSADSTQA

SEQ ID NO: 15533 - protein, 419 aa, Artificial Sequence
  SARS-CoV-2__MT706136.1__nucleocapsid protein (N)
MSDNGPQNQRNAPRITFGGPSDSTGSNQNGERSGARSKQRRPQGLPNNTASWFTALTQHGKEDLKFPRGQGVPINTNSSPDDQIGYYRRATRRIRGGDGKMKDLSPRWYFYYLGTGPEAGLPYGANKDGIIWVATEGALNTPKDHIGTRNPANNAAIVLQLPQGTTLPKGFYAEGSRGGSQASSRSSSRSRNSSRNSTPSSSRGTSPARMAGNGGDAALALLLLDRLNQLESKMSGKGQQQQGQTVTKKSAAEASKKPRQKRTATKAYNVTQAFGRRGPEQTQGNFGDQELIRQGTDYKHWPQIAQFAPSASAFFGMSRIGMEVTPSGTWLTYTGAIKLDDKDPNFKDQVILLNKHIDAYKTFPPTEPKKDKKKKADETQALPQRQKKQQTVTLLPAADLDDFSKQLQQSMSSADSTQA

SEQ ID NO: 15534 - protein, 419 aa, Artificial Sequence
  SARS-CoV-2__MT706164.1__nucleocapsid protein (N)
MSDNGPQNQRNAPRITFGGPSDSTGSNQNGERSGARSKQRRPQGLPNNTASWFTALTQHGKEDLKFPRGQGVPINTNSSPDDQIGYYRRATRRIRGGDGKMKDLSPRWYFYYLGTGPEAGLPYGANKDGIIWVATEGALNTPKDHIGTRNPANNAAIVLQLPQGTTLPKGFYAEGSRGGSQASSRSSSRSRNSSRNSTPGSSRGTSPARMAGNGGDAALALLLLDRLNQLESKMSGKGQQQQGQTVTKKSAAEASKKPRQKRTATKAYNVTQAFGRRGPEQTQGNFGDQELIRQGTDYKHWPQIAQFAPSASAFFGMSRIGMEVTPSGTLLTYTGAIKLDDKDPNFKDQVILLNKHIDAYKTFPPTEPKKDKKKKADETQALPQRQKKQQTVTLLPAADLDDFSKQLQQSMSSADSTQA

SEQ ID NO: 15535 - protein, 419 aa, Artificial Sequence
  SARS-CoV-2__MT706232.1__nucleocapsid protein (N)
MSDNGPQNQRNAPRITFGGPSDSTGSNQNGERSGARSKQRRPQGLPNNTASWFTALTQHGKEDLKFPRGQGVPINTNSSPDDQIGYYRIATRRIRGGDGKMKDLSPRWYFYYLGTGPEAGLPYGANKDGIIWVATEGALNTPKDHIGTRNPANNAAIVLQLPQGTTLPKGFYAEGSRGGSQASSRSSSRSRNSSRNSTPGSSRGTSPARMAGNGGDAALALLLLDRLNQLESKMSGKGQQQQGQTVTKKSAAEASKKPRQKRTATKAYNVTQAFGRRGPEQTQGNFGDQELIRQGTDYKHWPQIAQFAPSASAFFGMSRIGMEVTPSGTWLTYTGAIKLDDKDPNFKDQVILLNKHIDAYKTFPPTEPKKDKKKKADETQALPQRQKKQQTVTLLPAADLDDFSKQLQQSMSSADSTQA

SEQ ID NO: 15536 - protein, 419 aa, Artificial Sequence
  SARS-CoV-2__MT706311.1__nucleocapsid protein (N)
MSDNGPQNQRNATRITFGGPSDSTGSNQNGERSGARSKQRRPQGLPNNTASWFTALTQHGKEDLKFPRGQGVPINTNSSPDDQIGYYRRATRRIRGGDGKMKDLSPRWYFYYLGTGPEAGLPYGANKDGIIWVATEGALNTPKDHIGTRNPANNAAIVLQLPQGTTLPKGFYAEGSRGGSQASSRSSSRSRNSSRNSTPGSSRGTSPARMAGNGGDAALALLLLDRLNQLESKMSGKGQQQQGQTVTKKSAAEASKKPRQKRTATKAYNVTQAFGRRGPEQTQGNFGDQELIRQGTDYKHWPQIAQFAPSASAFFGMSRIGMEVTPSGTWLTYTGAIKLDDKDPNFKDQVILLNKHIDAYKTFPPTEPKKDKKKKADETQALPQRQKKQQTVTLLPAADLDDFSKQLQQSMSSADSTQA

SEQ ID NO: 15537 - protein, 419 aa, Artificial Sequence
  SARS-CoV-2__MT706312.1__nucleocapsid protein (N)
MSDNGPQNQRNAPRITFGGPSDSTGSNQNGERSGARSKQRRPQGLPNNTASWFTALTQHGKEDLKFPRGQGVPINTNSSPDDQIGYYRRATRRIRGGDGKMKDLSPRWYFYYLGTGPEAGLPYGANKDGIIWVATEGALNTPKDHIGTRNPANNAAIVLQLPQGTTLPKGFYAEGSRGGSQASSRSSSRSRNSSRNSTPGSSRGTSPGRMAGNGGDAALALLLLDRLNQLESKMSGKGQQQQGQTVTKKSAAEASKKPRQKRTATKAYNVTQAFGRRGPEQTQGNFGDQELIRQGTDYKHWPQIAQFAPSASAFFGMSRIGMEVTPSGTWLTYTGAIKLDDKDPNFKYQVILLNKHIDAYKTFPPTEPKKDKKKKADETQALPQRQKKQQTVTLLPAADLDDFSKQLQQSMSSADSTQA

SEQ ID NO: 15538 - protein, 419 aa, Artificial Sequence
  SARS-CoV-2__MT706334.1__nucleocapsid protein (N)
MSDNGPQNQRNAPRITFGGPSDSTGSNQNGERSGARSKQRRPQGLPNNTASWFTALTQHGKEDLKFPRGQGVPINTNSSPDDQIGYYRRATRRIRGGDGKMKDLSPRWYFYYLGTGPEAGLPYGANKDGIIWVATEGALNTPKDHIGTRNPANNAAIVLQLPQGTTLPKGFYAEGSRGGSQASSRSSSRSRNSSRNSTPGSSRGTSPARMAGNGGDAALALLLLDRLNQLESKMSGKGQQQQGQTVIKKSAAEASKKPRQKRTATKAYNVTQAFGRRGPEQTQGNFGDQELIRQGTDYKHWPQIAQFAPSASAFFGMSRIGMEVTPSGTWLTYTGAIKLDDKDPNFKDQVILLNKHIDAYKTFPPTEPKKDKKKKADETQALPQRQKKQQTVTLLPAADLDDFSKQLQQSMSSADSTQA

SEQ ID NO: 15539 - protein, 419 aa, Artificial Sequence
  SARS-CoV-2__MT706337.1__nucleocapsid protein (N)
MSDNGPQNQRNAPRITFGGPSDSTGSNQNGERSGARSKQRRPQGLPNNTASWFTALTQHGKEDLKFPRGQGVPINTNSSPDDQIGYYRRATRRIRGGDGKMKDLSPRWYFYYLGTGPEAGLPYGANKDGIIWVATEGALNTPKDHIGTRNPANNAAIVLQLPQGTTLPKGFYAEGSRGGSQASSRSSSRSRNSSRNSTPGSSRGTSPARMAGNGGDAALALLLLDRLNQLESKMSGKGQQQQGQTVTKKSAAEASKKPRQKRTATKAYNVTQAFGRRGPEQTQGNFGDQELIRQGTDYKHWPQIAQFAPSASAFFGMSRIGMEVTPSGTWLTYTGAIKLDDKDPNFKDQVILLNKHIDAYKTFPPTEPKKDKKKKADETQVLPQRQKKQQTVTLLPAADLDDFSKQLQQSMSSADSTQA

SEQ ID NO: 15540 - protein, 419 aa, Artificial Sequence
  SARS-CoV-2__MT706363.1__nucleocapsid protein (N)
MSDNGPQNQRNAPRITFGGPSDSTGSNQNGERSGARSKQRRPQGLPNNTASWFTALTQHGKEDLKFPRGQGVPINTNSSPDDQIGYYRRATRRIRGGDGKMKDLSPRWYFYYLGTGPEAGLPYGANKDGIIWVATEGALNTPKDHIGTRNPANNAAIVLQLPQGTTLPKGFYAEGSRGGSQASSRSSSRSRNSSRNSTPGSSRGTSPARMAGNGGDAALALLLLDRLNQLESKMSGKGQQQQGQTVTKKSAAEASKKPRQKRTATKAYNVTQAFGRRGPEQTQGNFGDQELIRQGTDYKHWPQIAQFAPSASAFFGMSRIGMEVTPSGTWLTYTGAFKLDDKDPNFKDQVILLNKHIDAYKTFPPTEPKKDKKKKADETQALPQRQKKQQTVTLLPAADLDDFSKQLQQSMSSADSTQA

SEQ ID NO: 15541 - protein, 419 aa, Artificial Sequence
  SARS-CoV-2__MT706376.1__nucleocapsid protein (N)
MSDNGPQNQRNAPRITFGGPSDSTGSNQNGERSGARSKQRRPQGLPNNTASWFTALTQHGKEDLKFPRGQGVPINTNSSPDDQIGYYRRATRRIRGGDGKMKDLSPRWYFYYLGTGPEAGLPYGANKDGIIWVATEGALNTPKDHIGTRNPANNAAIVLQLPQGTTLPKGFYAEGSRGGSQASSRSSSRSRNSSRNSTPGSSRGTSPARIAGNGGDAALALLLLDRLNQLESKMSGKGQQQQGQTVTKKSAAEASKKPRQKRTATKAYNVTQAFGRRGPEQTQGNFGDQELIRQGTDYKHWPQIAQFAPSASAFFGMSRIGMEVTPSGTWLTYTGAIKLDDKDPNFKDQVILLNKHIDAYKTFPPTEPKKDKKKKADETQALPQRQKKQQTVTLLPAADLDDFSKQLQQSMSSADSTQA

SEQ ID NO: 15542 - protein, 419 aa, Artificial Sequence
  SARS-CoV-2__MT706398.1__nucleocapsid protein (N)
MSDNGPQNQRNAPRITFGGPSDSTGSNQNGERSGARSKQRRPQGLPNNTASWFTALTQHGKEDLKFPRGQGVPINTNSSPDDQIGYYRRATRRIRGGDGKMKDLSPRWYFYYLGTGPEAGLPYGANKDGIIWVATEGALNTPKHHIGTRNPANNAAIVLQLPQGTTLPKGFYAEGSRGGSQASSRSSSRSRNSSRNSTPGSSRGTSPARMAGNGGDAALALLLLDRLNQLESKMSGKGQQQQGQTVTKKSAAEASKKPRQKRTATKAYNVTQAFGRRGPEQTQGNFGDQELIRQGTDYKHWPQIAQFAPSASAFFGMSRIGMEVTPSGTWLTYTGAIKLDDKDPNFKDQVILLNKHIDAYKTFPPTEPKKDKKKKADETQALPQRQKKQQTVTLLPAADLDDFSKQLQQSMSSADSTQA

SEQ ID NO: 15543 - protein, 419 aa, Artificial Sequence
  SARS-CoV-2__MT704017.1__nucleocapsid protein (N)
MSDNGPQNQRNAPRITFGGPSDSTGSNQNGERSGARSKQRRPQGLPNNTASWFTALTQHGKEDLKFPRGQGVPINTNSSPDDQIGYYRRATRRIRGGDGKMKDLSPRWYFYYLGTGPEVGLPYGANKDGIIWVATEGALNTPKDHIGTRNPANNAAIVLQLPQGTTLPKGFYAEGSRGGSQASSRSSSRSRNSSRNSTPGSSRGTSPARMAGNGGDAALALLLLDRLNQLESKMSGKGQQQQGQTVTKKSAAEASKKPRQKRTATKAYNVTQAFGRRGPEQTQGNFGDQELIRQGTDYKHWPQIAQFAPSASAFFGMSRIGMEVTPSGTWLTYTGAIKLDDKDPNFKDQVILLNKHIDAYKTFPPTEPKKDKKKKADETQALPQRQKKQQTVTLLPAADLDDFSKQLQQSMSSADSTQA

SEQ ID NO: 15544 - protein, 419 aa, Artificial Sequence
  SARS-CoV-2__MT704066.1__nucleocapsid protein (N)
MSDNGPQNQRNAPRITFGGPSDSTGSNQNGERSGARSKQRRPQGLPNNTASWFTALTQHGKEDLKFPRGQGVPINTNSSPDDQIGYYRRATRRIRGGDGKMKDLSPRWYFYYLGTGPEAGLPYGANKDGIIWVATEGALNTPKDHIGTRNSANNAAIVLQLPQGTTLPKGFYAEGSRGGSQASSRSSSRSRNSSRNSTPGSSRGTSPARMAGNGGDAALALLLLDRLNQLESKMSGKGQQQQGQTVTKKSAAEASKKPRQKRTATKAYNVTQAFGRRGPEQTQGNFGDQELIRQGTDYKHWPQIAQFAPSASAFFGMSRIGMEVTPSGTWLTYTGAIKLDDKDPNFKDQVILLNKHIDAYKTFPPTEPKKDKKKKADETQALPQRQKKQQTVTLLPAADLDDFSKQLQQSMSSADSTQA

SEQ ID NO: 15545 - protein, 419 aa, Artificial Sequence
  SARS-CoV-2__MT704068.1__nucleocapsid protein (N)
MSDNGPQNQRNAPRITFGGPSDSTGSNQNGERSGARSKQRRPQGLPNNTASWFTALTQHGKEDLKFPRGQGVPINTNSSPDDQIGYYRRATRRIRGGDGKMKDLSPRWYFYYLGTGPEAGLPYGANKDGIIWVATEGALNTPKDHIGTRNPANNAAIVLQLPQGTTLPKGFYAEGSRGGSQASSRSSSRSRNSSRNSTPGSSRGTSPARMAGNGGDAALALLLLDRLNQLESKMSGKGQQQQGQTVTKKSAAEASKKPRQKRTATKAYNVTQAFGRRGPEQTQGNFGDLELIRQGTDYKHWPQIAQFAPSASAFFGMSRIGMEVTPSGTWLTYTGAIKLDDKDPNFKDQVILLNKHIDAYKTFPPTEPKKDKKKKADETQALPQRQKKQQTVTLLPAADLDDFSKQLQQSMSSADSTQA

SEQ ID NO: 15546 - protein, 419 aa, Artificial Sequence
  SARS-CoV-2__MT704112.1__nucleocapsid protein (N)
MSDNGPQNQRNAPRITFGGPSDSTGSNQNGERSGARSKQRRPQGLPNNTASWFTALTQHGKEDLKFPRGQGVPINTNSSPDDQIGYYRRATRRIRGGDGKMKDLSPRWYFYYLGTGPEAGLPYGANKDGIIWVATEGALNTPKDHIGTRNPANNAAIVLQLPQGTTLPKGFYAEGSRGGSQASSRSSSRSRNNSRNSTPGSSRGTSPARMAGNGGDAALALLLLDRLNQLESKMSGKGQQQQGQTVTKKSAAEASKKPRQKRTATKAYNVTQAFGRRGPEQTQGNFGDQELIRQGTDYKHWPQIAQFAPSASAFFGMSRIGMEVTPSGTWLTYTGAIKLDDKDPNFKDQVILLNKHIDAYKTFPPTEPKKDKKKKADETQALPQRQKKQQTVTLLPAADLDDFSKQLQQSMSSADSTQA

SEQ ID NO: 15547 - protein, 419 aa, Artificial Sequence
  SARS-CoV-2__MT683418.1__nucleocapsid protein (N)
MSDNGPQNQRNAPRITFGGPSDSTGSNQNGERSGSRSKQRRPQGLPNNTASWFTALTQHGKEDLKFPRGQGVPINTNSSPDDQIGYYRRATRRIRGGDGKMKDLSPRWYFYYLGTGPEAGLPYGANKDGIIWVATEGALNTPKDHIGTRNPANNAAIVLQLPQGTTLPKGFYAEGSRGGSQASSRSSSRSRNSSRNSTPGSSRGTSPARMAGNGGDAALALLLLDRLNQLESKMSGKGQQQQGQTVTKKSAAEASKKPRQKRTATKAYNVTQAFGRRGPEQTQGNFGDQELIRQGTDYKHWPQIAQFAPSASAFFGMSRIGMEVTPSGTWLTYTGAIKLDDNDPNFKDQVILLNKHIDAYKTFPPTEPKKDKKKKADETQALPQRQKKQQTVTLLPAADLDDFSKQLQQSMSSADSTQA

SEQ ID NO: 15548 - protein, 419 aa, Artificial Sequence
  SARS-CoV-2__MT678839.1__nucleocapsid protein (N)
MSDNGPQNQRNAPRITFGGPSDSTGSNQNGERSGARSKQRRPQGLPNNTASWFTALTQHGKEDLKFPRGQGVPINTNSSPDDQIGYYRRATRRIRGGDGKMKDLSPRWYFYYLGTGPEAGLPYGANKDGIIWVATEGALNTPKDHIGTRNPANNAAIVLQLPQGTTLPKGFYAEGSRGGSQASSRSSSRSRNSSRNSTPGSSRGTSPARMAGNGGDAALALLLLDRLNQLESKMSGKGQQQQGQTVTKKSAAEASKKPRQKRTATKAYNVTQAFGRRGPEQTQGNFGDQELIRQGTDYKHWPQIAQFAPSASAFFGMSRIGMEVTPSGTWLTYTGAIKLDDKDPNFKDQVILLNKHIDAYITFPPTEPKKDKKKKADETQALPQRQKKQQTVTLLPAADLDDFSKQLQQSMSSADSTQA

SEQ ID NO: 15549 - protein, 419 aa, Artificial Sequence
  SARS-CoV-2__MT611442.1__nucleocapsid protein (N)
MSDNGPQNQRNAPRITFGGPSDSTGSNQNGERSGARSKQRRPQGLPNNTASWFTALTQHGKEDLKFPRGQGVPINTNSSPDDQIGYYRRATRRIRGGDGKMKDLSPRWYFYYLGTGPEAGLPYGANKDGIIWVATEGALNTPKDHIGTRNPANNAAIVLQLPQGTTLPKGFYAEGSRGGSQASSRSSSRSRNSSRNSTPGSSRGTSPARMAGNGGDAALALLLLDRLNQLESKMSGKGQQQQGQTVTKKSAAEASKKPRQKRTATKAYNVTQAFGRRGPEQIQGNFGDQELIRQGTDYKHWPQIAQFAPSASAFFGMSRIGMEVTPSGTWLTYTGAIKLDDKDPNFKDQVILLNKHIDAYKTFPPTEPKKDKKKKADETQALPQRQKKQQTVTLLPAADLDDFSKQLQQSMSSADSTQA

SEQ ID NO: 15550 - protein, 419 aa, Artificial Sequence
  SARS-CoV-2__MT676368.1__nucleocapsid protein (N)
MSDNGPQNQRNAPRITFGGPSDSTGSNQNGERSGARSKQRRPQGLPNNTASWFTALTQHGKEDLKFPRGQGVPINTNSSPDDQIGYYRRATRRIRGGDGKMKDLSPRWYFYYLGTGPEAGLPYGANKDGIIWVATEGALNTPKDHIGTRNPANNAAIVLQLPQGTTLPKGFYAEGSRGGSQASSRSSSRSRNSLRNSTPGSSRGTSPARMAGNGGDAVLALLLLDRLNQLESKMSGKGQQQQGQTVTKKSAAEASKKPRQKRTATKAYNVTQAFGRRGPEQTQGNFGDQELIRQGTDYKHWPQIAQFAPSASAFFGMSRIGMEVTPSGTWLTYTGAIKLDDKDPNFKDQVILLNKHIDAYKTFPPTEPKKDKKKKADETQALPQRQKKQQTVTLLPAADLDDFSKQLQQSMSSADSTQA

SEQ ID NO: 15551 - protein, 419 aa, Artificial Sequence
  SARS-CoV-2__MT669322.1__nucleocapsid protein (N)
MSDNGPQNQRNAPRITFGGPSDSTGSNQNGERSGARSKQRRPQGLPNNTASWFTALTQHGKEDLKFPRGQGVPINTNSSPDDQIGYYRRATRRIRGGDGKMKDLSPRWYFYYLGTGPEAGLPYGANKDGIIWVATEGALNTPKDHIGTRNPANNAAIVLQLPQGTTLPKGFYAEGSRGGSQASSRSSSRSRNSLRNSTPGSSGRTSPARMAGNGGDAALALLLLDRLNQLESKMSGKGQQQQGQTVTKKSAAEASKKPRQKRTATKAYNVTQAFGRRGPEQTQGNFGDQELIRQGTDYKHWPQIAQFAPSASAFFGMSRIGMEVTPSGTWLTYTGAIKLDDKDPNFKDQVILLNKHIDAYKTFPPTEPKKDKKKKADETQALPQRQKKQQTVTLLPAADLDDFSKQLQQSMSSADSTQA

SEQ ID NO: 15552 - protein, 419 aa, Artificial Sequence
  SARS-CoV-2__MT671828.1__nucleocapsid protein (N)
MSDNGPQNQRNAPRITFGGPSDSTGSNQNGERSGARSKQRRPQGLPNNTASWFTALTQHGKEDLKFPRGQGVPINTNSSPDDQIGYYRRATRRIRGGDGKMKDLSPRWYFYYLGTGPEAGLPYGANKDGIIWVATEGALNTPKHHIGTRNPANNAAIVLQLPQGTTLPKGFYAEGSRGGSQASSRSSSRSRNSSRNSTPGSSKRTSPARMAGNGGDAALALLLLDRLNQLESKMSGKGQQQQGQTVTKKSAAEASKKPRQKRTATKAYNVTQAFGRRGPEQTQGNFGDQELIRQGTDYKHWPQIAQFAPSASAFFGMSRIGMEVTPSGTWLTYTGAIKLDDKDPNFKDQVILLNKHIDAYKTFPPTEPKKDKKKKADETQALPQRQKKQQTVTLLPAADLDDFSKQLQQSMSSADSTQA

SEQ ID NO: 15553 - protein, 419 aa, Artificial Sequence
  SARS-CoV-2__MT664107.1__nucleocapsid protein (N)
MSDNGPQNQRNAPRITFGGPSDSTGSNQNGERSGARSKQRRPQGLPNNTASWFTALTQHGKEDLKFPRGQGVPINTNSSPDDQIGYYRRATRRIRGGDGKMKDLSPRWYFYYLGTGPEAGLPYGANKDGIIWVATEGALNTPKDHIGTRNPANNAAIVLQLPQGTTLPKGFYAEGSRGGSQASSRSSSRSRNSLRNSTPGSSRGTSPARMAGNGGDAALALLLLDRLNQLESKMSGKGQQQQGQTVTKKSAAEASKKPRQKRTATKAYNLIQAFGRRGPEQTQGNFGDQELIRQGTDYKHWPQIAQFAPSASAFFGMSRIGMEVTPSGTWLTYTGAIKLDDKDPNFKDQVILLNKHIDAYKTFPPTEPKKDKKKKADETQALPQRQKKQQTVTLLPAADLDDFSKQLQQSMSSADSTQA

SEQ ID NO: 15554 - protein, 419 aa, Artificial Sequence
  SARS-CoV-2__MT664203.1__nucleocapsid protein (N)
MSDNGPQNQRNAPRITFGGPSNSTGSNQNGERSGARSKQRRPQGLPNNTASWFTALTQHGKEDLKFPRGQGVPINTNSSPDDQIGYYRRATRRIRGGDGKMKDLSPRWYFYYLGTGPEAGLPYGANKDGIIWVATEGALNTPKDHIGTRNPANNAAIVLQLPQGTTLPKGFYAEGSRGGSQASSRSSSRSRNSLRNSTPGSSRGTSPARMAGNGGDAALALLLLDRLNQLESKMSGKGQQQQGQTVTKKSAAEASKKPRQKRTATKAYNVTQAFGRRGPEQTQGNFGDQELIRQGTDYKHWPQIAQFAPSASAFFGMSRIGMEVTPSGTWLTYTGAIKLDDKDPNFKDQVILLNKHIDAYKTFPPTEPKKDKKKKADETQALPQRQKKQQTVTLLPAADLDDFSKQLQQSMSSADSTQA

SEQ ID NO: 15555 - protein, 419 aa, Artificial Sequence
  SARS-CoV-2__MT667351.1__nucleocapsid protein (N)
MSDNGPQNQRNAPRITFGGPSDSTGSNQNGERSGARSKQRRPQGLPNNTASWFTALTQHGKEDLKFPRGQGVPINTNSSPDDRIGYYRRATRRIRGGDGKMKDLSPRWYFYYLGTGPEAGLPYGANKDGIIWVATEGALNTPKDHIGTRNPANNAAIVLQLPQGTTLPKGFYAEGSRGGSQASSRSSSRSRNSSRNSTPGSSKRTSPARMAGNGGDAALALLLLDRLNQLESKMSGKGQQQQGQTVTKKSAAEASKKPRQKRTATKAYNVTQAFGRRGPEQTQGNFGDQELIRQGTDYKHWPQIAQFAPSASAFFGMSRIGMEVTPSGTWLTYTGAIKLDDKDPNFKDQVILLNKHIDAYKTFPPTEPKKDKKKKADETQALPQRQKKQQTVTLLPAADLDDFSKQLQQSMSSADSTQA

SEQ ID NO: 15556 - protein, 419 aa, Artificial Sequence
  SARS-CoV-2__MT646074.1__nucleocapsid protein (N)
MSDNGPQNQRNAPRITFGGPSDSTGSNQNGERSGARSKQRRPQGLPNNTASWFTALTQHGKEDLKFPRGQGVPINTNSSPDDQIGYYRRATRRIRGGDGKMKDLSPRWYFYYLGTGPEAGLPYGANKDGIIWVATEGALNTPKDHIGTRNPANNAAIVLQLPQGTTLPKGFYAEGSRGGSQASSRSLSRSRNSSRNSTPGSSKRTSPARMAGNGGDAALALLLLDRLNQLESKMSGKGQQQQGQTVTKKSAAEASKKPRQKRTATKAYNVTQAFGRRGPEQTQGNFGDQELIRQGTDYKHWPQIAQFAPSASAFFGMSRIGMEVTPSGTWLTYTGAIKLDDKDPNFKDQVILLNKHIDAYKTFPPTEPKKDKKKKADETQALPQRQKKQQTVTLLPAADLDDFSKQLQQSMSSADSTQA

SEQ ID NO: 15557 - protein, 419 aa, Artificial Sequence
  SARS-CoV-2__MT641507.1__nucleocapsid protein (N)
MSDNGPQNQRNAPRITFGGPSDSTGSNQNGERSGARSKQRRPQGLPNNTASWFTALTQHGKEDLKFPRGQGVPINTNSSPDDQIGYYRRATRRIRGGDGKMKDLSPRWYFYYLGTGPEAGLPYGANKDGIIWVATEGALNTPKDHIGTRNPANNAAIVLQLPQGTTLPKGFYAEGSRGGSQASSRSSSRSRNSSRNSTPGSSRGTSPARMAGNGGDAALALLLLDRLNQLESKMSGKGQQQQGQTVTKKSAAEASKKPRQKRTATKAYNVTQAFGRRGPEQTQENFGDQELIRQGTDYKHWPQIAQFAPSASAFFGMSRIGMEVTPSGTWLTYTGAIKLDDKDPNFKDQVILLNKHIDAYKTFPPTEPKKDKKKKADETQALPQRQKKQQTVTLLPAADLDDFSKQLQQSMSSADSTQA

SEQ ID NO: 15558 - protein, 419 aa, Artificial Sequence
  SARS-CoV-2__MT641510.1__nucleocapsid protein (N)
MSDNGPQNQRNAPRITFGGPSDSTGSNQNGERSGARSKQRRPQGLPNNTASWFTALTQHGKEDLKFPRGQGVPINTNSSPDDQIGYYRRATRRIRGGDGKMKDLSPRWYFYYLGTGPEAGLPYGANKDGIIWVATEGALNTPKDHIGTRNPANNAAIVLQLPRGTTLPKGFYAEGSRGGSQASSRSSSRSRNSSRNSTPGSSRGTSPARMAGNGGDAALALLLLDRLNQLESKMSGKGQQQQGQTVTKKSAAEASKKPRQKRTATKAYNVTQAFGRRGPEQTQGNFGDQELIRQGTDYKHWPQIAQFAPSASAFFGMSRIGMEVTPSGTWLTYTGAIKLDDKDPNFKDQVILLNKHIDAYKTFPPTEPKKDKKKKADETQALPQRQKKQQTVTLLPAADLDDFSKQLQQSMSSADSTQA

SEQ ID NO: 15559 - protein, 419 aa, Artificial Sequence
  SARS-CoV-2__MT641567.1__nucleocapsid protein (N)
MSDNGPQNQRNAPRITFGGPSDSTGSNQNGERSGARSKQRRPQGLPNNTASWFTALTQHGKEDLKFPRGQGVPINTNSSPDDQIGYYRRATRRIRGGDGKMKDLSPRWYFYYLGTGPEAGLPYGANKDGIIWVATEGALNTPKDHIGTRNPANYAAIVLQLPQGTTLPKGFYAEGSRGGSQASSRSSSRSRNSSRNSTPGSSRGTSPARMAGNGGDAALALLLLDRLNQLESKMSGKGQQQQGQTVTKKSAAEASKKPRQKRTATKAYNVTQAFGRRGPEQTQGNFGDQELIRQGTDYKHWPQIAQFAPSASAFFGMSRIGMEVTPSGTWLTYTGAIKLDDKDPNFKDQVILLNKHIDAYKTFPPTEPKKDKKKKADETQALPQRQKKQQTVTLLPAADLDDFSKQLQQSMSSADSTQA

SEQ ID NO: 15560 - protein, 419 aa, Artificial Sequence
  SARS-CoV-2__MT641667.1__nucleocapsid protein (N)
MSDNGPQNQRNAPRITFGGPSDSTGSNQNGERSGARSKQRRPQGLPNNTASWFTALTQHGKEDLKFPRGQGVPINTNSSPDDQIGYYRRATRRILGGDGKMKDLSPRWYFYYLGTGPEAGLPYGANKDGIIWVATEGALNTPKDHIGTRNPANNAAIVLQLPQGTTLPKGFYAEGSRGGSQASSRSSSRSRNSSRNSTPGSSKRTSPARMAGNGGDAALALLLLDRLNQLESKMSGKGQQQQGQTVTKKSAAEASKKPRQKRTATKAYNVTQAFGRRGPEQTQGNFGDQELIRQGTDYKHWPQIAQFAPSASAFFGMSRIGMEVTPSGTWLTYTGAIKLDDKDPNFKDQVILLNKHIDAYKTFPPTEPKKDKKKKADETQALPQRQKKQQTVTLLPAADLDDFSKQLQQSMSSADSTQA

SEQ ID NO: 15561 - protein, 419 aa, Artificial Sequence
  SARS-CoV-2__MT641708.1__nucleocapsid protein (N)
MSDNGPQNQRNAPRITFGGPSDSTGSNQNGERSGARSKQRRPQGLPNNTASWFTALTQHGKEDLKFPRGQGVPINTNSSPDDQIGYYRRATRRIRGGDGKMKDLSPRWYFYYLGTGPEAGLPYGANKDGIIWVATEGALNTPKDHIGTRNPANNAAIVLQLPQGTTLPKGFYAEGSRGGSQASSRSSSRSRNSSRNSTPGSSRGTSPARMAGNGGDAALALLLLDRLNQLESKMSGKGQQQQGQTVTKKSAAEAFKKPRQKRTATKAYNVTQAFGRRGPEQTQGNFGDQELIRQGTDYKHWPQIAQFAPSASAFFGMSRIGMEVTPSGTWLTYTGAIKLDDKDPNFKDQVILLNKHIDAYKTFPPTEPKKDKKKKADETQALPQRQKKQQTVTLLPAADLDDFSKQLQQSMSSADSTQA

SEQ ID NO: 15562 - protein, 419 aa, Artificial Sequence
  SARS-CoV-2__MT641710.1__nucleocapsid protein (N)
MSDNGPQNQRNAPRITFGGPSDSTGSNQNGERSGARSKQRRPQGLPNNTASWFTALTQHGKEDLKFPRGQGVPINTNSSPDDQIGYYRRATRRIRGGDGKMKDLSPRWYFYYLGTGPEAGLPYGANKDGIIWVATEGALNTPKDHIGTRNPANNAAIVLQLPQGTTLPKGFYAEGSRGGSQASSRSSSRSRNSSRNSTPGSSRGTSPARMAGNGGDAALALLLLDRLNQLESKMSGKGQQQQGQTVTKKSAAEASKKPRQKRTATKAYNVTQAFGRRGPEQTQGNFGDQELIRQGTDYKHWPQIAQFAPSASAFFGMSRIGMEVTPSGTWLTYTGAIKLDDKDPNFKDQVILLNKHIDAYKTFPPTEPKKDKKKKADETQALSQRQKKQQTVTLLPAADLDDFSKQLQQSMSSADSTQA

SEQ ID NO: 15563 - protein, 419 aa, Artificial Sequence
  SARS-CoV-2__MT641738.1__nucleocapsid protein (N)
MSDNGPQNQRNAPRITFGGPSDSTGSNQNGERSGARSKQRRPQGLPNNTASWFTALTQHGKEDLKFPRGQGVPINTNSSPDDQIGYYRRATRRIRGGDGKMKDLSPRWYFYYLGTGPEAGLPYGANKDGIIWVATEGALNTPKDHIGTRNPANNAAIVLQLPQGTTLPKGFYAEGSRGGSQASSRSSSRSRNSSRNSTPGSSRGTSPARMAGNGGDAALALLLLDRLNQLESKMSGKGQQQQGQTVTKKSAAEASKKPRQKRTATKAYNVTQAFGRRGPEQTQGNFGDQELIRQGTDYKHCPQIAQFAPSASAFFGMSRIGMEVTPSGTWLTYTGAIKLDDKDPNFKDQVILLNKHIDAYKTFPPTEPKKDKKKKADETQALSQRQKKQQTVTLLPAADLDDFSKQLQQSMSSADSTQA

SEQ ID NO: 15564 - protein, 419 aa, Artificial Sequence
  SARS-CoV-2__MT642069.1__nucleocapsid protein (N)
MSDNGPQNQRNAPRITFGGPSDSTGSNQNGERSGARSKQRRPQGLPNNTASWFTALTQHGKVDLKFPRGQGVPINTNSSPDDQIGYYRRATRRIRGGDGKMKDLSPRWYFYYLGTGPEAGLPYGANKDGIIWVATEGALNTPKDHIGTRNPANNAAIVLQLPQGTTLPKGFYAEGSRGGSQASSRSSSRSRNSSRNSTPGSSRGTSPARMAGNGGDAALALLLLDRLNQLESKMSGKGQQQQGQTVTKKSAAEASKKPRQKRTATKAYNVTQAFGRRGPEQTQGNFGDQELIRQGTDYKHWPQIAQFAPSASAFFGMSRIGMEVTPSGTWLTYTGAIKLDDKDPNFKDQVILLNKHIDAYKTFPPTEPKKDKKKKADETQALPQRQKKQQTVTLLPAADLDDFSKQLQQSMSSADSTQA

SEQ ID NO: 15565 - protein, 419 aa, Artificial Sequence
  SARS-CoV-2__MT642080.1__nucleocapsid protein (N)
MSDNGPQNQRNAPRITFGGPSDSTGSNQNGERSGARSKQRRPQGLPNNTASWFTALTQHGKVDLKFPRGQGVPINTNSSPDDQIGYYRRATRRIRGGDGKMKDLSPRWYFYYLGTGPEAGLPYGANKDGIIWVATEGALNTPKDHIGTRNPANNAAIVLQLPQGTTLPKGFYAEGSRGGSQASSRSSSRSRNSLRNSTPGSSRGTSPARMAGNGGDAALALLLLDRLNQLESKMSGKGQQQQGQTVTKKSAAEASKKPRQKRTATKAYNVTQAFGRRGPEQTQGNFGDQELIRQGTDYKHWPQIAQFAPSASAFFGMSRIGMEVTPSGTWLTYTGAIKLDDKDPNFKDQVILLNKHIDAYKTFPPTEPKKDKKKKADETQALPQRQKKQQTVTLLPAADLDDFSKQLQQSMSSADSTQA

SEQ ID NO: 15566 - protein, 419 aa, Artificial Sequence
  SARS-CoV-2__MT642120.1__nucleocapsid protein (N)
MSDNGPQNQRNAPRITFGGPSDSTGSNQNGERSGARSKQRRPQGLPNNTASWFTALTQHGKEDLKFPRGQGVPINTNSSPDDQIGYYRRATRRIRGGDGKMKDLSPRWYFYYLGTGPEAGLPYGANKDGIIWVATEGALNTPKDHIGTRNPANNAAIVLQLPQGTTLPKGFYAEGSRGGSQASSRSSSRSRNSSRNSTPGSSRGTSPARMAGNGGDAALALLLLDRLNQLESKMSGKGQQQQGQTVTKKSAAEASKKPRQKRTATKAYNVTQAFGRRGPEQTQGNFGDQELIRQGTDYKHWPQIAQFAPSASAFFGMSRIGMEVTPSGTWLTYTGAIKLDDKDPNFKDQVILLNKHIDAYKTFPPTEPKKDKKKKADETQALPQRQKKQQTVTLLPAVDLDDFSKQLQQSMSSADSTQA

SEQ ID NO: 15567 - protein, 419 aa, Artificial Sequence
  SARS-CoV-2__MT642181.1__nucleocapsid protein (N)
MSDNGPQNQRNAPRITFGGPSDSTGSNQNGERSGARSKQRRPQGLPNNTASWFTALTQHGKEDLKFPRGQGVPINTNSSPDDQIGYYRRATRRIRGGDGKMKDLSPRWYFYYLGTGPEAGLPYGANKDGIIWVATEGALNTPKDHIGTRNPANNAAIVLQLPQGTTLPKGFYAEGSRGGSQASSRSSSRSRNSSRNSTPGSSRGTSPARMAGNGGDAALALLLLDRLNQLESKMSGKGQQQQGQTVTKKSAAEASKKPRQKRTATKAYNVTQAFGRRGPEQTQGNFGDQELIRQGTDYKHWPQIAQFAPSASAFFGMSRIGMEVTPSGTWLTYTGAIKLDDKDPNFKYQVILLNKHIDAYKTFPPTEPKKDKKKKADETQALPQRQKKQQTVTLLPAADLDDFSKQLQQSMSSADSTQA

SEQ ID NO: 15568 - protein, 419 aa, Artificial Sequence
  SARS-CoV-2__MT642410.1__nucleocapsid protein (N)
MSDNGPQNQRNAPRITFGGPSDSTGSNQNAERSGARSKQRRPQGLPNNTASWFTALTQHGKEDLKFPRGQGVPINTNSSPDDQIGYYRRATRRIRGGDGKMKDLSPRWYFYYLGTGPEAGLPYGANKDGIIWVATEGALNTPKDHIGTRNPANNAAIVLQLPQGTTLPKGFYAEGSRGGSQASSRSSSRSRNSSRNSTPGSSRGTSPARMAGNGGDAALALLLLDRLNQLESKMSGKGQQQQGQTVTKKSAAEASKKPRQKRTATKAYNVTQAFGRRGPEQTQGNFGDQELIRQGTDYKHWPQIAQFAPSASAFFGMSRIGMEVTPSGTWLTYTGAIKLDDKDPNFKDQVILLNKHIDAYKTFPPTEPKKDKKKKADETQALPQRQKKQQTVTLLPAADLDDFSKQLQQSMSSADSTQA

SEQ ID NO: 15569 - protein, 419 aa, Artificial Sequence
  SARS-CoV-2__MT635408.1__nucleocapsid protein (N)
MSDNGPQNQRNAPRITFGGPSDSTGSNQNGERSGARSKQRRPQGLPNNTASWFTALTQHGKEDLKFPRGQGVPINTNSSPDDQIGYYRRATRRIRGGDGKMKDLSPRWYFYYLGTGPEAGLPYGANKDGIIWVVTEGALNTPKDHIGTRNPANNAAIVLQLPQGTTLPKGFYAEGSRGGSQASSRSSSRSRNSSRNSTPGSSRGTSPARMAGNGGDAALALLLLDRLNQLESKMSGKGQQQQGQTVTKKSAAEASKKPRQKRTATKAYNVTQAFGRRGPEQTQGNFGDQELIRQGTDYKHWPQIAQFAPSASAFFGMSRIGMEVTPSGTWLTYTGAIKLDDKDPNFKDQVILLNKHIDAYKTFPPTEPKKDKKKKADETQALPQRQKKQQTVTLLPAADLDDFSKQLQQSMSSADSTQA

SEQ ID NO: 15570 - protein, 419 aa, Artificial Sequence
  SARS-CoV-2__MT635672.1__nucleocapsid protein (N)
MSDNGPQNQRNAPRITFGGPSDSTGSNQNGERSGARSKQRRPQGLPNNTASWFTALTQHGKEDLKFPRGQGVPINTNSSPDDQIGYYRRATRRIRGGDGKMKDLSPRWYFYYLGTGPEAGLPYGANKDGIIWVATEGALNTPKDHIGTRNPANNAAIVLQLPQGTTLPKGFYAEGSRGGSQASSRSSSRSRNSSRNSTPGSSKRTSPARMAGNGGDAALALLLLDRLNQLESKMSGKGQQQQGQTVTKKSAAEASKKPRQKRTATKAYNVTQAFGRRGPEQTQGNFGDQELIRQGTDYKHWPQIAQFAPSASAFFGMSRIGMEVTPSGTWLTYTGAIKLDDKDPNFKYQVILLNKHIDAYKTFPPTEPKKDKNKKADETQALPQRQKKQQTVTLLPAADLDDFSKQLQQSMSSADSTQA

SEQ ID NO: 15571 - protein, 419 aa, Artificial Sequence
  SARS-CoV-2__MT627240.1__nucleocapsid protein (N)
MSDNGPQNQRNAPRITFGGPSDSTGSNQNGERSGARSKQRRPQGLPNNTASWFTALTQHGKEDLKFPRGQGVPINTNSSPDDQIGYYRRATRRIRGGDGKMKDLSPRWYFYYLGTGPEAGLPYGANKDGIIWVATEGALNTPKDHFGTRNPANNAAIVLQLPQGTTLPKGFYAEGSRGGSQASSRSSSRSRNSSRNSTPGSSRGTSPARMAGNGGDAALALLLLDRLNQLESKMSGKGQQQQGQTVTKKSAAEASKKPRQKRTATKAYNVTQAFGRRGPEQTQGNFGDQELIRQGTDYKHWPQIAQFAPSASAFFGMSRIGMEVTPSGTWLTYTGAIKLDDKDPNFKDQVILLNKHIDAYKTFPPTEPKKDKKKKADETQALPQRQKKQQTVTLLPAADLDDFSKQLQQSMSSADSTQA

SEQ ID NO: 15572 - protein, 419 aa, Artificial Sequence
  SARS-CoV-2__MT627244.1__nucleocapsid protein (N)
MSDNGPQNQRNAPRITFGGPSDSTGSNQNGERSGARSKQRRPQGLPNNTASWFTALTQHGKEDLKFPRGQGVPINTNSSPDDQIGYYRRATRRIRGGDGKMKDLSPRWYFYYLGTGPEAGLPYGANKDGIIWVATEGALNTPKDHIGTRNPANNAAIVLQLPQGTTLPKGFYAEGSRGGSQASSRSSSRSRNSSRNSTPGSSRGTSPARMAGNGGDAALALLLLDRLNQLESKMPGKGQQQQGQTVTKKSAAEASKKPRQKRTATKAYNVTQAFGRRGPEQTQGNFGDQELIRQGTDYKHWPQIAQFAPSASAFFGMSRIGMEVTPSGTWLTYTGAIKLDDKDPNFKDQVILLNKHIDAYKTFPPTEPKKDKKKKADETQALPQRQKKQQTVTLLPAADLDDFSKQLQQSMSSADSTQA

SEQ ID NO: 15573 - protein, 419 aa, Artificial Sequence
  SARS-CoV-2__MT627415.1__nucleocapsid protein (N)
MSDNGPQNQRNAPRITFGGPSDSTGSNQNGERSGARSKQRRPQGLPNNTASWFTALTQHGKEDLKFPRGQGVPINTNSSPDDQIGYYRRATRRIRGGDGKMKDLSPRWYFYYLGTGPEAGLPYGANKDGIIWVATEGALNTPKDHIGTRNPANNAAIVLQLPQGTTLPKGFYAEGSRGGSQASSCSSSRSRNSSRNSTPGSSKRTSPARMAGNGGDAALALLLLDRLNQLESKMSGKGQQQQGQTVTKKSAAEASKKPRQKRTATKAYNVTQAFGRRGPEQTQGNFGDQELIRQGTDYKHWPQIAQFAPSASAFFGMSRIGMEVTPSGTWLTYTGAIKLDDKDPNFKDQVILLNKHIDAYKTFPPTEPKKDKKKKADETQALPQRQKKQQTVTLLPAADLDDFSKQLQQSMSSADSTQA

SEQ ID NO: 15574 - protein, 419 aa, Artificial Sequence
  SARS-CoV-2__MT627424.1__nucleocapsid protein (N)
MSDNGPQNQRNAPRITFGGPSDSTGSNQNGERSGARSKQRRPQGLPNNTASWFTALTQHGKEDLKFPRGQGVPINTNSSPDDQIGYYRRATRRIRGGDGKMKDLSPRWYFYYLGTGPEAGLPYGANKDGIIWVATEGALNTPKDHIGTRNPANNAAIVLQLPQGTTLPKGFYAEGSRGGSQASSRSSSRSRNSSRNSTPGSSRGTSPARMAGNGGDAALALLLLDRLNQLESKMSGKGQQQQGQTVTKKSAAEASKKPRQKRTATKAYNVTQAFGRRGPEQTQGNFGDQELIRQGTDYKHWPQIAQFAPSASAFFGMSRIGMEVTPSGTWLTYTGAIKLDDKDPNFKDQVILLNKHIDAYKTFLPTEPKKDKKKKADETQALPQRQKKQQTVTLLPAADLDDFSKQLQQSMSSADSTQA

SEQ ID NO: 15575 - protein, 419 aa, Artificial Sequence
  SARS-CoV-2__MT627607.1__nucleocapsid protein (N)
MSDNGPQNQRNAPRITFGGPSDSTGSNQNGERSGARSKQRRPQGLPNNTASWFTALTQHGKEDLKFPRGQGVPINTNSSPDDQIGYYRRATRRIRGGDGKMKDLSPRWYFYYLGTGPEAGLPYGTNKDGIIWVATEGALNTPKDHIGTRNPANNAAIVLQLPQGTTLPKGFYAEGSRGGSQASSRSSSRSRNSSRNSTPGSSRGTSPARMAGNGGDAALALLLLDRLNQLESKMSGKGQQQQGQTVTKKSAAEASKKPRQKRTATKAYNVTQAFGRRGPEQTQGNFGDQELIRQGTDYKHWPQIAQFAPSASAFFGMSRIGMEVTPSGTWLTYTGAIKLDDKDPNFKDQVILLNKHIDAYKTFPPTEPKKDKKKKADETQALPQRQKKQQTVTLLPAADLDDFSKQLQQSMSSADSTQA

SEQ ID NO: 15576 - protein, 419 aa, Artificial Sequence
  SARS-CoV-2__MT627920.1__nucleocapsid protein (N)
MSDNGPQNQRNAPRITFGGPSDSTGSNQNGERSGARSKQRRPQGLPNNTASWFTALTQHGKEDLKFPRGQGVPINTNSSPDDQIGYYRRATRRIRGGDGKMKDLSPRWYFYYLGTGPEAGLPYGANKDGIIWVATEGALNTPKDHIGTRNPANNAAIVLQLPQGTTLPKGFYAEGSRGGSQASSRSSSRSRNSSRNSTPGSSRGTSPARMAGNGGDAALALLLLDRLNQLESKMSGKGQQQQGQTVTKKFAAEASKKPRQKRTATKAYNLTQAFGRRGPEQTQGNFGDQELIRQGTDYKHWPQIAQFAPSASAFFGMSRIGMEVTPSGTWLTYTGAIKLDDKDPNFKDQVILLNKHIDAYKTFPPTEPKKDKKKKADETQALPQRQKKQQTVTLLPAADLDDFSKQLQQSMSSADSTQA

SEQ ID NO: 15577 - protein, 419 aa, Artificial Sequence
  SARS-CoV-2__MT627921.1__nucleocapsid protein (N)
MSDNGPQNQRNAPRITFGGPSDSTGSNQNGERSGARSKQRRPQGLPNNTASWFTALTQHGKEDLKFPRGQGVPINTNSSPDDQIGYYRRATRRIRGGDGKMKDLSPRWYFYYLGTGPEAGLPYGANKDGIIWVATEGALNTPKDHIGTRNPANNAAIVLQLPQGTTLPKGFYAEGSRGGSQASSRSLSRSRNSSRNSTPGSSRGTSPARMAGNGGDAALALLLLDRLNQLESKMSGKGQQQQGQTVTKKSAAEASKKPRQKRTATKAYNVTQAFGRRGPEQTQGNFGDQELIRQGTDYKHWPQIAQFAPSASAFFGMSRIGMEVTPSGTWLTYTGAIKLDDKDPNFKDQVILLNKHIDAYKTFPPTEPKKDKKKKADETQALPQRQKKQQTVTLLPAADLDDFSKQLQQSMSSADSTQA

SEQ ID NO: 15578 - protein, 419 aa, Artificial Sequence
  SARS-CoV-2__MT628091.1__nucleocapsid protein (N)
MSDNGPQNQRNAPRITFGGPSDSTGSNQNGERSGARSKQRRPQGLPNNTASWFTALTQHGKEDLKFPRGQGVPINTNSSPDDQIGYYRRATRRIRGGDGKMKDLSPRWYFYYLGTGPEAGLPYGANKDGIIWVATEGALNTPKDHIGTRNPANNAAIVLQLPQGTTLPKGFYAEGSRGGSQASSLSSSRSRNSSRNSTPGSSRGTSPARMAGNGGDAALALLLLDRLNQLESKMSGKGQQQQGQTVTKKSAAEASKKPRQKRTATKAYNVTQAFGRRGPEQTQGNFGDQELIRQGTDYKHWPQIAQFAPSASAFFGMSRIGMEVTPSGTWLTYTGAIKLDDKDPNFKDQVILLNKHIDAYKTFPPTEPKKDKKKKADETQALPQRQKKQQTVTLLPAADLDDFSKQLQQSMSSADSTQA

SEQ ID NO: 15579 - protein, 419 aa, Artificial Sequence
  SARS-CoV-2__MT628156.1__nucleocapsid protein (N)
MSDNGPQNQRNAPRITFGRPSDSTGSNQNGERSGARSKQRRPQGLPNNTASWFTALTQHGKEDLKFPRGQGVPINTNSSPDDQIGYYRRATRRIRGGDGKMKDLSPRWYFYYLGTGPEAGLPYGANKDGIIWVATEGALNTPKDHIGTRNPANNAAIVLQLPQGTTLPKGFYAEGSRGGSQASSRSSSRSRNSSRNSTPGSSRGTSPARMAGNGGDAALALLLLDRLNQLESKMSGKGQQQQGQTVTKKSAAEASKKPRQKRTATKAYNVTQAFGRRGPEQTQGNFGDQELIRQGTDYKHWPQIAQFAPSASAFFGMSRIGMEVTPSGTWLTYTGAIKLDDKDPNFKDQVILLNKHIDAYKTFPPTEPKKDKKKKADETQALPQRQKKQQTVTLLPAADLDDFSKQLQQSMSSADSTQA

SEQ ID NO: 15580 - protein, 419 aa, Artificial Sequence
  SARS-CoV-2__MT628169.1__nucleocapsid protein (N)
MSDNGPQNQRNAPRITFGGPSDSTGSNQNGERSGARSKQRRPQGLPNNTASWFTALTQHGKEDLKFPRGQGVPINTNSSPDDQIGYYRRATRRIRGGDGKMKDLSPRWYFYYLGTGPEAGLPYGANKDGIIWVATEGALNTPKDHIGTRNPANNAAIVLQLPQGTTLPKGFYAEGSRGGSQASSRSSSRSRNSSRNSTPGSSRGTSPARMAGNGGDAVLALLLLDRLNQLESKMSGKGQQQQGQTVTKKSAAEASKKPRQKRTATKAYNVTQAFGRRGPEQTQGNFGDQELIRQGTDYKHWPQIAQFAPSASAFFGMSRIGMEVTPSGTWLTYTGAIKLDDKDPNFKDQVILLNKHIDAYKTFPPTEPKKDKKKKADETQALPQRQKKQQTVTLLPAADLDDFSKQLQQSMSSADSTQA

SEQ ID NO: 15581 - protein, 419 aa, Artificial Sequence
  SARS-CoV-2__MT628180.1__nucleocapsid protein (N)
MSDNGPQNQRNAPRITFGGLSDSTGSNQNGERSGARSKQRRPQGLPNNTASWFTALTQHGKEDLKFPRGQGVPINTNSSPDDQIGYYRRATRRIRGGDGKMKDLSPRWYFYYLGTGPEAGLPYGANKDGIIWVATEGALNTPKDHIGTRNPANNAAIVLQLPQGTTLPKGFYAEGSRGGSQASSRSSSRSRNSSRNSTPGSSRGTSPARMAGNGGDAALALLLLDRLNQLESKMSGKGQQQQGQTVTKKSAAEASKKPRQKRTATKAYNVTQAFGRRGPEQTQGNFGDQELIRQGTDYKHWPQIAQFAPSASAFFGMSRIGMEVTPSGTWLTYTGAIKLDDKDPNFKDQVILLNKHIDAYKTFPPTEPKKDKKKKADETQALPQRQKKQQTVTLLPAADLDDFSKQLQQSMSSADSTQA

SEQ ID NO: 15582 - protein, 419 aa, Artificial Sequence
  SARS-CoV-2__MT628202.1__nucleocapsid protein (N)
MSDNGPQNQRNAPRITFGGPSDSTGSNQNGERSGARSKQRRPQGLPNNTASWFTALTQHGKEDLKFPRGQGVPINTNSSPDDQIGYYRRATRRIRGGDGKMKDLSPRWYFYYLGTGPEAGLPYGANKDGIIWVATEGALNTPKDHIGTRNPANNAAIVLQLPQGTTLPKGFYAEGSRGGSQASSRSSSRSRNSLRNSTPGSSRGTSPARMAGNGGDAALALLLLDRLNQLESKMSGKGQQQQGQTVTKKSAAEASKKPRQKRTATKAYNVTQAFGRRGPEQTQGNFGDQELIRQGTDYKHWPQIAQFAPSASAFFGMSRIGMEVTPSGTWLTYTGAIKLDDKDPNFKDQVILLNKHIDAYKTFPPTEPKKDKKKKADETQALPQRQKKQQTVTLLPAADLDDFSKQLQQSMSIADSTQA

SEQ ID NO: 15583 - protein, 419 aa, Artificial Sequence
  SARS-CoV-2__MT628209.1__nucleocapsid protein (N)
MSDNGPQNQRNAPRITFGGPSDSTGSNQNGERSGARSKQRRPQGLPNNTASWFTALTQHGKEDLKFPRGQGVPINTNSSPDDQIGYYRRATRRIRGGDGKMKDLSPRWYFYYLGTGPEAGLPYGANKDGIIWVATEGALNTPKDHIGTRNPANNAAIVLQLPQGTTLPRGFYAEGSRGGSQASSRSSSRSRNSSRNSTPGSSKRTSPARMAGNGGDAALALLLLDRLNQLESKMSGKGQQQQGQTVTKKSAAEASKKPRQKRTATKAYNVTQAFGRRGPEQTQGNFGDQELIRQGTDYKHWPQIAQFAPSASAFFGMSRIGMEVTPSGTWLTYTGAIKLDDKDPNFKDQVILLNKHIDAYKTFPPTEPKKDKKKKADETQALPQRQKKQQTVTLLPAADLDDFSKQLQQSMSSADSTQA

SEQ ID NO: 15584 - protein, 419 aa, Artificial Sequence
  SARS-CoV-2__MT632624.1__nucleocapsid protein (N)
MSDNGPQNQRNAPRITFGGPSDSTGSNQNGERSGARSKQRRPQGLPNNTASWFTALTQHGKEDLKFPRGQGVPINTNSSPDDQIGYYRRATRRIRGGDGKMKDLSPRWYFYYLGTGPEAGLPYGANKDGIIWVATEGALNTPKDHIGTRNPANNAAIVLQLPQGTTLPKGFYAEGSRGGSQASSRSSSRSRNSSRNSTPGSSRGTSPARMAGNGGDAALALLLLDRLNQLESKMSGKGQQQQGQTVTKKSAAEASKKPRQKRTATKAYNVTQAFGRRGPEQTQGNFGDQELIRQGTDYKHWPQIAQFAPSASAFFGMSRIGMEVTPSGTWLTYTGAIKLDDKDPNFKDQVILLNKHIDAYKTFPPTEPKKDKKKKADETQALPQRQKKQQTVTLLPSADLDDFSKQLQQSMSSADSTQA

SEQ ID NO: 15585 - protein, 419 aa, Artificial Sequence
  SARS-CoV-2__MT632797.1__nucleocapsid protein (N)
MSDNGPQNQRNAPRITFGGPSDSTGSNQNGERSGARSKQRRPQGLPNNTASWFTALTQHGKEDLKFPRGQGVPINTNSSPDDQIGYYRRATRRIRGGDGKMKDLSPRWYFYYLGTGPEAGLPYGANKDGIIWVATEGALNTPKDHIGTRNPANNAAIVLQLPQGTTLPKGFYAEGSRGGSQASSRSSSRSRNSSRNSTPGSSRGTSPARMAGNGGDAALALLLLDRLNQLESKMSGKGQQQQGQTVTKRSAAEASKKPRQKRTATKAYNVTQAFGRRGPEQTQGNFGDQELIRQGTDYKHWPQIAQFAPSASAFFGMSRIGMEVTPSGTWLTYTGAIKLDDKDPNFKDQVILLNKHIDAYKTFPPTEPKKDKKKKADETQALPQRQKKQQTVTLLPAADLDDFSKQLQQSMSSADSTQA

SEQ ID NO: 15586 - protein, 419 aa, Artificial Sequence
  SARS-CoV-2__MT632800.1__nucleocapsid protein (N)
MSDNGPQNQRNAPRITFGGPSDSTGSNQNGERSGARSKQRRPQGLPNNTASWFTALTQHGKEDLKFPRGQGVPINTNSSPDDQIGYYRRATRRIRGGDGKMKDLSPRWYFYYLGTGPEAGLPYGANKDGIIWVATEGALNTPKDHIGTRNPANNAAIVLQLPQGTTLPKGFYAEGSRGGSQASSRSSSRSRNSSRNSTPGSSRGTSPARMAGNGGDAALALLLLDRLNQLESKMSGKGQQQQGQTVTKKSAAEASKKPRQKRTATKAYNVTQAFGRRGPEQTQGNFGDQELIRQGTDYKHWPQIAQFAPSASAFFGMSRIGMEVTPSGTWLTYTGAIKLNDKDPNFKDQVILLNKHIDAYKTFPPTEPKKDKKKKADETQALPQRQKKQQTVTLLPAADLDDFSKQLQQSMSSADSTQA

SEQ ID NO: 15587 - protein, 419 aa, Artificial Sequence
  SARS-CoV-2__MT632822.1__nucleocapsid protein (N)
MSDNGPQNQRNAPRITFGGPSDSTGSNQNGERSGARSKQRRPQGLPNNTASWFTALTQHGKEDLKFPRGQGVPINTNSSPDDQIGYYRRATRRIRGGDGKMKDLSPRWYFYYLGTGPEAGLPYGANKDGIIWVATEGALNTPKDHIGTRNPANNAAIVLQLPQGTTLPKGFYAEGSRGGSQASSRSSSRSRNSSRNSTPGSSRGTSPARMACNGGDAALALLLLDRLNQLESKMSGKGQQQQGQTVTKKSAAEASKKPRQKRTATKAYNVTQAFGRRGPEQTQGNFGDQELIRQGTDYKHWPQIAQFAPSASAFFGMSRIGMEVTPSGTWLTYTGAIKLDDKDPNFKDQVILLNKHIDAYKTFPPTEPKKDKKKKADETQALPQRQKKQQTVTLLPAADLDDFSKQLQQSMSSADSTQA

SEQ ID NO: 15588 - protein, 419 aa, Artificial Sequence
  SARS-CoV-2__MT614463.1__nucleocapsid protein (N)
MSDNGPQNQRNAPRITFGGPSDSTGSNQNGERSGARSKQRRPQGLPNNTASWFTALTQHGKEDLKFPRGQGVPINTNSSPDDQIGYYRRATRRIRGGDGKMKDLSPRWYFYYLGTGPEAGLPYGANKDGIIWVATEGALNTPKDHIGTRNPANNAAIVLQLPQGTTLPKGFYAEGSRGGSQASSRSSSRSRNSSRNSTPGSSRGTSPARMAGNGGDAALALLLLDRLNQLESKMSGKGQQQQGQTVTKKSAAEASKKPRQKRTATKAYNVTQAFGRRGPEQTQGNFGDQELIRQGTDYKHWPQIAQFAPSASAFFGMSRIGMEVTPSGTWLTYTGAIKLDDKDPNFKDQVILLNKHIDAYKTFPPTEPKKDKKKKADETQALPQRKKKQQTVTLLPAADLDDFSKQLQQSMSSADSTQA

SEQ ID NO: 15589 - protein, 419 aa, Artificial Sequence
  SARS-CoV-2__MT614486.1__nucleocapsid protein (N)
MSDNGPQNQRNAPRITFGGPSDSTGSNQNGERSGARSKQRRPQGLPNNTASWFTALTQHGKEDLKFPRGQGVPINTNSSPDDQIGYYRRATRRIRGGDGKMKDLSPRWYFYYLGTGPEAGLPYGANKDGIIWVATEGALNTPKDHIGTRNPANNASIVLQLPQGTTLPKGFYAEGSRGGSQASSRSSSRSRNSSRNSTPGSSRGTSPARMAGNGGDAALALLLLDRLNQLESKMSGKGQQQQGQTVTKKSAAEASKKPRQKRTATKAYNVTQAFGRRGPEQTQGNFGDQELIRQGTDYKHWPQIAQFAPSASAFFGMSRIGMEVTPSGTWLTYTGAIKLDDKDPNFKDQVILLNKHIDAYKTFPPTEPKKDKKKKADETQALPQRQKKQQTVTLLPAADLDDFSKQLQQSMSSADSTQA

SEQ ID NO: 15590 - protein, 419 aa, Artificial Sequence
  SARS-CoV-2__MT614508.1__nucleocapsid protein (N)
MSDNGPQNQRNAPRITFGGPSDSTGSNQNGERSGARSKQRRPQGLPNNTASWFTALTQHGKEDLKFPRGQGVPINTNSSPDDQIGYYRRATRRIRGGDGKMKDLSPRWYFYYLGTGPEAGLPYGANKDGIIWVATEGALNTPKDHIGTRNPANNAAIVLQLPQGTTLPKGFYAEGSRGGSQASSRSSSRSRNSSRNSTPGSSRGTSPARMAGNGGDAALALLLLDRLNQLESKMSGKGQQQQGQTVTKKSAAEASKKPRQKRTATKAYNVTQAFGRRGPEQTQGNFGDHELIRQGTDYKHWPQIAQFAPSASAFFGMSRIGMEVTPSGTWLTYTGAIKLDDKDPNFKDQVILLNKHIDAYKTFPPTEPKKDKKKKADETQALPQRQKKQQTVTLLPAADLDDFSKQLQQSMSSADSTQA

SEQ ID NO: 15591 - protein, 419 aa, Artificial Sequence
  SARS-CoV-2__MT614531.1__nucleocapsid protein (N)
MSDNGPQNQRNAPRITFGGPSDSTGSNQNGERSGARSKQRRPQGLPNNTASWFTALTQHGKEDLKFPRGQGVPINTNSSPDDQIGYYRRATRRIRGGDGKMKDLSPRWYFYYLGTGPEAGLPYGANKDGIIWVATEGALNTPKDHIGTRNPANNAAIVLQLPQGTTLPKGFYAEGSRGGSQASSRSSSRSRNSSRNSTPGSSRGTSPARMAGNGGDAALALLLLDRLNQLESKMSGKGQQQQGQTVTKKSAAEASKKPRQKRTATKAYNVTQAFGRRGPEQTQGNFGDQELIRQGTDYKHWPQIAQFAPSASAFFGMSRIGMEVTPSGTWLTYTGAIKLDDKDPNFKDQVILLNKHIDAYKTFPPTEPKKDKKKKADETHALPQRQKKQQTVTLLPAADLDDFSKQLQQSMSSADSTQA

SEQ ID NO: 15592 - protein, 419 aa, Artificial Sequence
  SARS-CoV-2__MT621560.1__nucleocapsid protein (N)
MSDNGPQNQRNAPRITFGGPSDSTGSNQNGERSGARSKQRRPQGLPNNTASWFTALTQHGKEDLKFPRGQGVPINTNSSPDDQIGYYRRATRRIRGGDGKMKDLSPRWYFYYLGTGPEAGLPYGANKDGIIWVATEGALNTPKDHIGTRNPANNAAIVLQLPQGTTLPKGFYAEGSRGGSQASSRSSSRSRNSSRNSTPGSSRGTSPARMAGNGGDAALALLLLDRLNQLESKMSGKGQQQQGQTVTKKSAAEASKKPREKRTATKAYNVTQAFGRRGPEQTQGNFGDQELIRQGTDYKHWPQIAQFAPSASAFFGMSRIGMEVTPSGTWLTYTGAIKLDDKDPNFKDQVILLNKHIDAYKTFPPTEPKKDKKKKADETQALPQRQKKQQTVTLLPAADLDDFSKQLQQSMSSADSTQA

SEQ ID NO: 15593 - protein, 419 aa, Artificial Sequence
  SARS-CoV-2__MT510701.1__nucleocapsid protein (N)
MSDNGPQNQRNAPRITFGGPSDSTGSNQNGERSGVRSKQRRPQGLPNNTASWFTALTQHGKEDLKFPRGQGVPINTNSSPDDQIGYYRRATRRIRGGDGKMKDLSPRWYFYYLGTGPEAGLPYGANKDGIIWVATEGALNTPKDHIGTRNPANNAAIVLQLPQGTTLPKGFYAEGSRGGSQASSRSSSRSRNSSRNSTPGSSRGTSPARMAGNGGDAALALLLLDRLNQLESKMSGKGQQQQGQTVTKKSAAEASKKPRQKRTATKAYNVTQAFGRRGPEQTQGNFGDQELIRQGTDYKHWPQIAQFAPSASAFFGMSRIGMEVRPSGTWLTYTGAIKLDDKDPNFKDQVILLNKHIDAYKTFPPTEPKKDKKKKADETQALPQRQKKQQTVTLLPAADLDDFSKQLQQSMSSADSTQA

SEQ ID NO: 15594 - protein, 416 aa, Artificial Sequence
  SARS-CoV-2__MT605818.1__nucleocapsid protein (N)
MSDNGPQNQRNAPRITFGGPSDSTGSNQNGERSGARSKQRRPQGLPNNTASWFTALTQHGKEDLKFPRGQGVPINTNSSPDDQIGYYRRATRRIRGGDGKMKDLSPRWYFYYLGTGPEAGLPYGANKDGIIWVATEGALNTPKDHIGTRNPANNAAIVLQLPQGTTLPKGFYAEGSRGGSQASSRSSSRSRNSSTPGSSKRTSPARMAGNGGDAALALLLLDRLNQLESKMSGKGQQQQGQTVTKKSAAEASKKPRQKRTATKAYNVTQAFGRRGPEQTQGNFGDQELIRQGTDYKHWPQIAQFAPSASAFFGMSRIGMEVTPSGTWLTYTGAIKLDDKDPNFKDQVILLNKHIDAYKTFPPTEPKKDKKKKADETQALPQRQKKQQTVTLLPAADLDDFSKQLQQSMSSADSTQA

SEQ ID NO: 15595 - protein, 419 aa, Artificial Sequence
  SARS-CoV-2__MT607248.1__nucleocapsid protein (N)
MSDNGPQNQRNAPRITFGGPSDSTGSNQNGERSGARSKQRRPQGLPNNTASWFTALTQHGKEDLKFPRGQGVPINTNSSPDDQIGYYRRATRRIRGGDGKMKDLSPRWYFYYLGTGPEAGLPYGANKDGIIWVATEGALNTPKDHIGTRNPANNAAIVLQLPQGTTFPKGFYAEGSRGGSQASSRSSSRSRNSSRNSTPGSSKRTSPARMAGNGGDAALALLLLDRLNQLESKMSGKGQQQQGQTVTKKSAAEASKKPRQKRTATKAYNVTQAFGRRGPEQTQGNFGDQELIRQGTDYKHWPQIAQFAPSASAFFGMSRIGMEVTPSGTWLTYTGAIKLDDKDPNFKDQVILLNKHIDAYKTFPPTEPKKDKKKKADETQALPQRQKKQQTVTLLPAADLDDFSKQLQQSMSSADSTQA

SEQ ID NO: 15596 - protein, 419 aa, Artificial Sequence
  SARS-CoV-2__MT607611.1__nucleocapsid protein (N)
MSDNGPQNQRNAPRITFGGPSYSTGSNQNGERSGARSKQRRPQGLPNNTASWFTALTQHGKEDLKFPRGQGVPINTNSSPDDQIGYYRRATRRIRGGDGKMKDLSPRWYFYYLGTGPEAGLPYGANKDGIIWVATEGALNTPKDHIGTRNPANNAAIVLQLPQGTTLPKGFYAEGSRGGSQASSRSSSRSRNSLRNSTPGSSRGTSPARMAGNGGDAALALLLLDRLNQLESKMSGKGQQQQGQTVTKKSAAEASKKPRQKRTATKAYNVTQAFGRRGPEQTQGNFGDQELIRQGTDYKHWPQIAQFAPSASAFFGMSRIGMEVTPSGTWLTYTGAIKLDDKDPNFKDQVILLNKHIDAYKTFPPTEPKKDKKKKADETQALPQRQKKQQTVTLLPAADLDDFSKQLQQSMSSADSTQA

SEQ ID NO: 15597 - protein, 419 aa, Artificial Sequence
  SARS-CoV-2__MT609566.1__nucleocapsid protein (N)
MSDNGPQNQRNAPRITFGGPSDSTGSNQNGERSGARSKQRRPQGLPNNTASWFTALTQHGKEDLKFPRGQGVPINTNSSPDDQIGYYRRATRRIRGGDGKMKDLSPRWYFYYLGTGPEAGLPYGANKDGIIWVATEGALNTPKDHIGTRNPANNAAIVLQLPQGTTLPKGFYAEGSRGGSQASSRSSSRSRNSSRNSTPGSSRGTSPARMAGNGGDAALALLLLDRLNQLESKMSGKGQQQQGQTVTKKSAAEASKKPRQKRTATKAYNVTQAFGRRGPEQTQGNFGDQELIRQGTDYKHWPQIAQFAPSASAFFGMSRIGMEVTPSGTWLTYTGAIKLDDKDPNFKDQVILLNKHIDAYKIFPPTEPKKDKKKKADETQALPQRQKKQQTVTLLPAADLDDFSKQLQQSMSSADSTQA

SEQ ID NO: 15598 - protein, 419 aa, Artificial Sequence
  SARS-CoV-2__MT601281.1__nucleocapsid protein (N)
MSDNGPQNQRNAPRITFGGPSDSTGSNQNGERSGARSKQRRPQGLPNNTASWFTALTQHGKEDLKFPRGQGVPINTNSSPDDQIGYYRRATRRIRGGDGKMKDLSPRWYFYYLGTGPEAGLPYGANKDGIIWVATEGALNTPKDHIGTRNPANNAAIVLQLPQGTTLPKGFYAEGSRGGSQASSRSSSRSRNSLRNSTPGSSRGTSPARMAGNGGDAALALLLLDRLNQLESKMSGKGQQQQGQTVTKKSAAEASKKPRQKRTATKAYNVTQAFGRRGPEQTQGNFGDQELIRQGTDYKHWPQIAQFAPSASAFFGMSRIGMEVTPSGTWLTYTGAIKLDDKDPNFKDQVILLNKHIDAYKTFPPTEPKKDKKKKADETQALPQRHKKQQTVTLLPAADLDDFSKQLQQSMSSADSTQA

SEQ ID NO: 15599 - protein, 419 aa, Artificial Sequence
  SARS-CoV-2__MT601290.1__nucleocapsid protein (N)
MSDNGPQNQRNAPRITFGGPSDSTGSNQNGERSGARSKQRRPQGLPNNTASWFTALTQHGKEDLKFPRGQGVPINTNSSPDDQIGYYRRATRRIRGGDGKMKDLSPRWYFYYLGTGPEAGLPYGANKDGIIWVATEGALNTPKDHIGTRNPANNAAIVLQLPQGTTLPKGFYAEGSRGGTQASSRSSSRSRNSSRNSTPGSSKRTSPARMAGNGGDAALALLLLDRLNQLESKMSGKGQQQQGQTVTKKSAAEASKKPRQKRTATKAYNVTQAFGRRGPEQIQGNFGDQELIRQGTDYKHWPQIAQFAPSASAFFGMSRIGMEVTPSGTWLTYTGAIKLDDKDPNFKDQVILLNKHIDAYKTFPPTEPKKDKKKKADETQALPQRQKKQQTVTLLPAADLDDFSKQLQQSMSSADSTQA

SEQ ID NO: 15600 - protein, 419 aa, Artificial Sequence
  SARS-CoV-2__MT585039.1__nucleocapsid protein (N)
MSDNGPQNQRNAPRITFCGPSDSTGSNQNGERSGARSKQRRPQGLPNNTASWFTALTQHGKEDLKFPRGQGVPINTNSSPDDQIGYYRRATRRIRGGDGKMKDLSPRWYFYYLGTGPEAGLPYGANKDGIIWVATEGALNTPKDHIGTRNPANNAAIVLQLPQGTTLPKGFYAEGSRGGSQASSRSSSRSRNSSRNSTPGSSRGTSPARMAGNGGDAALALLLLDRLNQLESKMSGKGQQQQGQTVTKKSAAEASKKPRQKRTATKAYNVTQAFGRRGPEQTQGNFGDQELIRQGTDYKHWPQIAQFAPSASAFFGMSRIGMEVTPSGTWLTYTGAIKLDDKDPNFKDQVILLNKHIDAYKTFPPTEPKKDKKKKADETQALPQRQKKQQTVTLLPAADLDDFSKQLQQSMSSADSTQA

SEQ ID NO: 15601 - protein, 419 aa, Artificial Sequence
  SARS-CoV-2__MT585089.1__nucleocapsid protein (N)
MSDNGPQNQRNAPRITFGGPSDSTGSNQNGERSGARSKQRRPQGLPNNTASWFTALTQHGKEDLKFPRGQGVPINTNSSPDDQIGYYRRATRRIRGGDGKMKDLSPRWYFYYLGTGPEAGLPYGANKDGIIWVATEGALNTPKDHIGTRNPANNAAIVLQLPQGTTLPKGFYAEGSRGGSQASSRSSSRSRNSSRNSTPGSSRGTSPAKMAGNGGDAALALLLLDRLNQLESKMSGKGQQQQGQTVTKKSAAEASKKPRQKRTATKAYNVTQAFGRRGPEQTQGNFGDQELIRQGTDYKHWPQIAQFAPSASAFFGMSRIGMEVTPSGTWLTYTGAIKLDDKDPNFKDQVILLNKHIDAYKTFPPTEPKKDKKKKADETQALPQRQKKQQTVTLLPAADLDDFSKQLQQSMSSADSTQA

SEQ ID NO: 15602 - protein, 419 aa, Artificial Sequence
  SARS-CoV-2__MT479224.1__nucleocapsid protein (N)
MSDNGPQNQRNAPRITFGGPSDSTGSNQNGERSGARSKQRRPQGLPNNTASWFTALTQHGKEDLKFPRGQGVPINTNSSPDDQIGYYRRATRRIRGGDGKMKDLSPRWYFYYLGTGPEAGLPYGANKDGIIWVATEGALNTPKDHIGTRNPANNAAIVLQLPQGTTLQKGFYAEGSRGGSQASSRSSSRSRNSSRNSTPGSSRGTSPARMAGNGGDAALALLLLDRLNQLESKMSGKGQQQQGQTVTKKSAAEASKKPRQKRTATKAYNVTQAFGRRGPEQTQGNFGDQELIRQGTDYKHWPQIAQFAPSASAFFGMSRIGMEVTPSGTWLTYTGAIKLDDKDPNFKDQVILLNKHIDAYKTFPPTEPKKDKKKKADETQALPQRQKKQQTVTLLPAADLDDFSKQLQQSMSSADSTQA

SEQ ID NO: 15603 - protein, 419 aa, Artificial Sequence
  SARS-CoV-2__MT499220.1__nucleocapsid protein (N)
MSDNGPQNQRNAPRITFGGPSDSTFSNQNGERSGARSKQRRPQGLPNNTASWFTALTQHGKEDLKFPRGQGVPINTNSSPDDQIGYYRRATRRIRGGDGKMKDLSPRWYFYYLGTGPEAGLPYGANKDGIIWVATEGALNTPKDHIGTRNPANNAAIVLQLPQGTTLPKGFYAEGSRGGSQASSRSSSRSRNSSRNSTPGSSRGTSPARMAGNGGDAALALLLLDRLNQLESKMSGKGQQQQGQTVTKKSAAEASKKPRQKRTATKAYNVTQAFGRRGPEQTQGNFGDQELIRQGTDYKHWPQIAQFAPSASAFFGMSRIGMEVTPSGTWLTYTGAIKLDDKDPNFKDQVILLNKHIDAYKTFPPTEPKKDKKKKADETQALPQRQKKQQTVTLLPAADLDDFSKQLQQSMSSADSTQA

SEQ ID NO: 15604 - protein, 419 aa, Artificial Sequence
  SARS-CoV-2__MT576048.1__nucleocapsid protein (N)
MSDNGPQNQRNAPRITFGGPSDSTGSNQNGERSGARSKQRRPQGLPNNTASWFTALTQHGKEDLKFPRGQGVPINTNSSPDDQIGYYRRATRRIRGGDGKMKDLSPRWYFYYLGTGPEAGLPYGANKDGIIWVATEGALNTPKYHIGTRNPANNAAIVLQLPQGTTLPKGFYAEGSRGGSQASSRSSSRSRNSLRNSTPGSSRGTSPARMAGNGGDAALALLLLDRLNQLESKMSGKGQQQQGQTVTKKSAAEASKKPRQKRTATKAYNVTQAFGRRGPEQTQGNFGDQELIRQGTDYKHWPQIAQFAPSASAFFGMSRIGMEVTPSGTWLTYTGAIKLDDKDPNFKDQVILLNKHIDAYKTFPPTEPKKDKKKKADETQALPQRQKKQQTVTLLPAADLDDFSKQLQQSMSSADSTQA

SEQ ID NO: 15605 - protein, 419 aa, Artificial Sequence
  SARS-CoV-2__MT576057.1__nucleocapsid protein (N)
MSDNGPQNQRNAPRITFGGPSDSTGSNQNGERSGARSKQRRPQGLPNNTASWFTALTQHGKEDLKFPRGQGVPINTNSSPDDQIGYYRRATRRIRGGDGKMKDLSPRWYFYYLGTGPEAGLPYGANKDGIIWVATEGALNTPKDHIGTRNPANNAAIVLQLPQGTTLPKGFYAEGSRGGSQASSRSSSRSRNSLRNSTPGSSRGTSPARMAGNGGDAALALLLLDRLNQLESKMSGKGQQQQGQTVTKKSAAEASKKPRQKRTATKAYNVTQAFGRRGPEQTQGNFGDQELIRQGTDYKYWPQIAQFAPSASAFFGMSRIGMEVTPSGTWLTYTGAIKLDDKDPNFKDQVILLNKHIDAYKTFPPTEPKKDKKKKADETQALPQRQKKQQTVTLLPAADLDDFSKQLQQSMSSADSTQA

SEQ ID NO: 15606 - protein, 419 aa, Artificial Sequence
  SARS-CoV-2__MT520263.1__nucleocapsid protein (N)
MSDNGPQNQRNAPRITFGGPSDSTGSNQNGERSGARSKQRRPQGLPNNTASWFTALTQHGKEDLKFPRGQGVPINTNSSPDDQIGYYRRATRRIRGGDGKMKDLSPRWYFYYLGTGPEAGLPYGANKDGIIWVATEGALNTPKDHIGTRNPANNAAIVLQLPQGTTLPKGFYAEGSRGGSQASSRSSSRSRNSSRNSTPGSSRGTSPARMAGNGGDAALALLLLDRLNHLESKMSGKGQQQQGQTVTKKSAAEASKKPRQKRTATKAYNVTQAFGRRGPEQTQGNFGDQELIRQGTDYKHWPQIAQFAPSASAFFGMSRIGMEVTPSGTWLTYTGAIKLDDKDPNFKDQVILLNKHIDAYKTFPPTEPKKDKKKKADETQALPQRQKKQQTVTLLPAADLDDFSKQLQQSMSSADSTQA

SEQ ID NO: 15607 - protein, 419 aa, Artificial Sequence
  SARS-CoV-2__MT520301.1__nucleocapsid protein (N)
MSDNGPQNQRNAPRITFGGPSDSTGSNQNGERSGARSKQCRPQGLPNNTASWFTALTQHGKEDLKFPRGQGVPINTNSSPDDQIGYYRRATRRIRGGDGKMKDLSPRWYFYYLGTGPEAGLPYGANKDGIIWVATEGALNTPKDHIGTRNPANNAAIVLQLPQGTTLPKGFYAEGSRGGSQASSRSSSRSRNSSRNSTPGSSRGTSPARMAGNGGDAALALLLLDRLNQLESKMSGKGQQQQGQTVTKKSAAEASKKPRQKRTATKAYNVTQAFGRRGPEQTQGNFGDQELIRQGTDYKHWPQIAQFAPSASAFFGMSRIGMEVTPSGTWLTYTGAIKLDDKDPNFKDQVILLNKHIDAYKTFPPTEPKKDKKKKADETQALPQRQKKQQTVTLLPAADLDDFSKQLQQSMSSADSTQA

SEQ ID NO: 15608 - protein, 419 aa, Artificial Sequence
  SARS-CoV-2__MT520331.1__nucleocapsid protein (N)
MSDNGPQNQRNAPRITFGGPSDSTGSNQNGERSGARSKQRRPQGLPNNTASWFTALTQHGKEDLKFPRGQGVPINTNSSPDDQIGYYRRATRRIRGGDGKMKDLSPRWYFYYLGTGPEAGLPYGANKDGIIWVATEGALNTPKDHIGTRNPANNAAIVLQLPQGTTLPKGFYAEGSRGGSQASSRSSSRSRNSSRNSTPGSSRGTSPARMAGNGGDAALALLLLDRLNQLESKMSGKGQQQQGQTVTKKSAAEAAKKPRQKRTATKAYNVTQAFGRRGPEQTQGNFGDQELIRQGTDYKHWPQIAQFAPSASAFFGMSRIGMEVTPSGTWLTYTGAIKLDDKDPNFKDQVILLNKHIDAYKTFPPTEPKKDKKKKADETQALPQRQKKQQTVTLLPAADLDDFSKQLQQSMSSADSTQA

SEQ ID NO: 15609 - protein, 419 aa, Artificial Sequence
  SARS-CoV-2__MT520343.1__nucleocapsid protein (N)
MSDNGPQNQRNAPRITFGGPSYSTGSNQNGERSGARSKQRRPQGLPNNTASWFTALTQHGKEDLKFPRGQGVPINTNSSPDDQIGYYRRATRRIRGGDGKMKDLSPRWYFYYLGTGPEAGLPYGANKDGIIWVATEGALNTPKDHIGTRNPANNAAIVLQLPQGTTLPKGFYAEGSRGGSQASSRSSSRSRNSSRNSTPGSSRGTSPARMAGNGGDAALALLLLDRLNQLESKMSGKGQQQQGQTVTKKSAAEASKKPRQKRTATKAYNVTQAFGRRGPEQTQGNFGDQELIRQGTDYKHWPQIAQFAPSASAFFGMSRIGMEVTPSGTWLTYTGAIKLDDKDPNFKDQVILLNKHIDAYKTFPPTEPKKDKKKKADETQALPQRQKKQQTVTLLPAADLDDFSKQLQQSMSSADSTQA

SEQ ID NO: 15610 - protein, 419 aa, Artificial Sequence
  SARS-CoV-2__MT520498.1__nucleocapsid protein (N)
MSDNGPQNQRNAPRITFGGPSDSTGSNQNGERSGARSKQRRPQGLPNNTASWFTALTQHGKEDLKFPRGQGVPINTNSSPDDQIGYYRRATRRIRGGDGKMKDLSPRWYFYYLGTGPEAGLPYGANKDGIIWVATEGALNTPKDHIGTRNPANNAAIVLQLPQGTTLPKGFYAEGSRGGSQASSRSSSRSRNSSRNSTPGSSRGTSPARMAGNGGDAALALLLLDRLNQLESKMSVKGQQQQGQTVTKKSAAEASKKPRQKRTATKAYNVTQAFGRRGPEQTQGNFGDQELIRQGTDYKHWPQIAQFAPSASAFFGMSRIGMEVTPSGTWLTYTGAIKLDDKDPNFKDQVILLNKHIDAYKTFPPTEPKKDKKKKADETQALPQRQKKQQTVTLLPAADLDDFSKQLQQSMSSADSTQA

SEQ ID NO: 15611 - protein, 419 aa, Artificial Sequence
  SARS-CoV-2__MT560706.1__nucleocapsid protein (N)
MSDNGTQNQRNAPRITFGGPSDSTGSNQNGERSGARSKQRRPQGLPNNTASWFTALTQHGKEDLKFPRGQGVPINTNSSPDDQIGYYRRATRRIRGGDGKMKDLSPRWYFYYLGTGPEAGLPYGANKDGIIWVATEGALNTPKDHIGTRNPANNAAIVLQLPQGTTLPKGFYAEGSRGGSQASSRSSSRSRNSSRNSTPGSSRGTSPARMAGNGGDAALALLLLDRLNQLESKMSGKGQQQQGQTVTKKSAAEASKKPRQKRTATKAYNVTQAFGRRGPEQTQGNFGDQELIRQGTDYKHWPQIAQFAPSASAFFGMSRIGMEVTPSGTWLTYTGAIKLDDKDPNFKDQVILLNKHIDAYKTFPPTEPKKDKKKKADETQALPQRQKKQQTVTLLPAADLDDFSKQLQQSMSSADSTQA

SEQ ID NO: 15612 - protein, 419 aa, Artificial Sequence
  SARS-CoV-2__MT566435.1__nucleocapsid protein (N)
MSDNGPQNQRNAPRITFGGPSDSTGSNQNGERSGARSKQRRPQGLPNNTASWFTALTQHGKEDLKFPRGQGVPINTNSSPDDQIGYYRRATRRIRGGDGKMKDLSPRWYFYYLGTGPEAGLPYGANKDGIIWVATEGALNTPKDHIGTRNPANNAAIVLQLPQGTTLPKGFYAEGSRGGSQASSRSSSRSRNSSRNSTPGSSKRTSPARMAGNGGDAALALLLLDRLNQLESKMSGKGQQQQGQTVTKKSAAEASKKPRQKRTATKAYNVTQAFGRRGPEQTQGNFGDQELIRQGTDYKHWPQIAQFAPSASAFFGMSRIGMEVTPSGTWLTYTGAIKLDDKDPNFKDQVILLNKHIDAYKTFPPTEPKKDKKKKAGETQALPQRQKKQQTVTLLPAADLDDFSKQLQQSMSSADSTQA

SEQ ID NO: 15613 - protein, 419 aa, Artificial Sequence
  SARS-CoV-2__MT557568.1__nucleocapsid protein (N)
MSDNGPQNQRNAPRITFGGPSDSTGSNQNGERSGALSKQRRPQGLPNNTASWFTALTQHGKEDLKFPRGQGVPINTNSSPDDQIGYYRRATRRIRGGDGKMKDLSPRWYFYYLGTGPEAGLPYGANKDGIIWVATEGALNTPKDHIGTRNPANNAAIVLQLPQGTTLPKGFYAEGSRGGSQASSRSSSRSRNSSRNSTPGSNRGTSPARMAGNGGDAALALLLLDRLNQLESKMSGKGQQQQGQTVTKKSAAEASKKPRQKRTATKAYNVTQAFGRRGPEQTQGNFGDQELIRQGTDYKHWPQIAQFAPSASAFFGMSRIGMEVTPSGTWLTYTGAIKLDDKDPNFKDQVILLNKHIDAYKTFPPTEPKKDKKKKADETQALPQRQKKQQTVTLLPAADLDDFSKQLQQSMSSADSTQA

SEQ ID NO: 15614 - protein, 419 aa, Artificial Sequence
  SARS-CoV-2__MT558660.1__nucleocapsid protein (N)
MSDNGPQNQRNAPRITFGGPSDSTGSNQNGERSGARSKQRRPQGLPNNTASWFTALTQHGKEDLKFPRGQGVPINTNSSPDDQIGYYRRATRRIRGGDGKMKDLSPRWYFYYLGTGPEAGLPYGANKYGIIWVATEGALNTPKDHIGTRNPANNAAIVLQLPQGTTLPKGFYAEGSRGGSQASSRSSSRSRNSSRNSTPGSSRGTSPARMAGNGGDAALALLLLDRLNQLESKMSGKGQQQQGQTVTKKSAAEASKKPRQKRTATKAYNVTQAFGRRGPEQTQGNFGDQELIRQGTDYKHWPQIAQFAPSASAFFGMSRIGMEVTPSGTWLTYTGAIKLDDKDPNFKDQVILLNKHIDAYKTFPPTEPKKDKKKKADETQALPQRQKKQQTVTLLPAADLDDFSKQLQQSMSSADSTQA

SEQ ID NO: 15615 - protein, 419 aa, Artificial Sequence
  SARS-CoV-2__MT535490.1__nucleocapsid protein (N)
MSDNGPQNQRNAPRITFGGPSDSTGSNQNGERSGARSKQRRPQGLPNNTASWFTALTQHGKEDLKFPRGQGVPINTNSSPDDQIGYYRRATRRIRGGDGKMKDLSPRWYFYYLGTGPEAGLPYGANKDGIIWVATEGALNTPKDHIGTRNPANNAAIVLQLPQGTTLPKGFYAEGSRGGSQASSRSSSRSRNSSRNSTPGSSRGTSPARMAVNGGDAALALLLLDRLNQLESKMSGKGQQQQGQTVTKKSAAEASKKPRQKRTATKAYNVTQAFGRRGPEQTQGNFGDQELIRQGTDYKHWPQIAQFAPSASAFFGMSRIGMEVTPSGTWLTYTGAIKLDDKDPNFKDQVILLNKHIDAYKTFPPTEPKKDKKKKADETQALPQRQKKQQTVTLLPAADLDDFSKQLQQSMSSADSTQA

SEQ ID NO: 15616 - protein, 419 aa, Artificial Sequence
  SARS-CoV-2__MT535500.1__nucleocapsid protein (N)
MSDNGPQNQRNAPRITFGGPSDSTGSNQNGDRSGARSKQRRPQGLPNNTASWFTALTQHGKEDLKFPRGQGVPINTNSSPDDQIGYYRRATRRIRGGDGKMKDLSPRWYFYYLGTGPEAGLPYGANKDGIIWVATEGALNTPKDHIGTRNPANNAAIVLQLPQGTTLPKGFYAEGSRGGSQASSRSSSRSRNSSRNSTPGSSRGTSPARMAGNGGDAALALLLLDRLNQLESKMSGKGQQQQGQTVTKKSAAEASKKPRQKRTATKAYNVTQAFGRRGPEQTQGNFGDQELIRQGTDYKHWPQIAQFAPSASAFFGMSRIGMEVTPSGTWLTYTGAIKLDDKDPNFKDQVILLNKHIDAYKTFPPTEPKKDKKKKADETQALPQRQKKQQTVTLLPAADLDDFSKQLQQSMSSADSTQA

SEQ ID NO: 15617 - protein, 419 aa, Artificial Sequence
  SARS-CoV-2__MT536964.1__nucleocapsid protein (N)
MSDNGPQNQRNAPRITFGGPSDSTGSNQNGERSGARSKQRRPQGLPNNTASWFTALTQHGKEDLKFPRGQGVPINTNSSPDDQIGYYRRATRRIRGGDGKMKDLSPRWYFYYLGTGPEAGLPYGANKDGIIWVATEGALTTPKDHIGTRNPANNAAIVLQLPQGTTLPKGFYAEGSRGGSQASSRSSSRSRNSSRNSTPGSSRGTSPARMAGNGGDAALALLLLDRLNQLESKMSGKGQQQQGQTVTKKSAAEASKKPRQKRTATKAYNVTQAFGRRGPEQTQGNFGDQELIRQGTDYKHWPQIAQFAPSASAFFGMSRIGMEVTPSGTWLTYTGAIKLDDKDPNFKDQVILLNKHIDAYKTFPPTEPKKDKKKKADETQALPQRQKKQQTVTLLPAADLDDFSKQLQQSMSSADSTQA

SEQ ID NO: 15618 - protein, 419 aa, Artificial Sequence
  SARS-CoV-2__MT511067.1__nucleocapsid protein (N)
MSDNGPQNQRNAPRITFGGPSDSTGSNQNGERSGARSKQRRPQGLPNNTASWFTALTQHGKEDLKFPRGQGVPINTNSSPDDQIGYYRRATRRIRGGDGKMKDLSPRWYFYYLGTGPEAGLPYGANKDGIIWVATEGALNTPKDHIGTRNPANNAAIVLQLPQGTTLPKGFYAEGSRGGSQASSRSSSRSRNSSRNSTPGSSRGTSPARMAGNGGDAALALLLLDRLNQLESKMSGKGQQQQGQTVTKKSAAEASKKPRQKRTATKAYNVTQAFGRRGPEQTQGNFGDQELIRQGTDYKHWPQIAQFAPSASAFFGMSRIGMEVTPSGTWLTYTGAIKLDDKDPNFKDQVILLNKHIDAYKTFPPTEPKKDKKKKADETQALPQRQKKQQTVTLLPAADLDYFSKQLQQSMSSADSTQA

SEQ ID NO: 15619 - protein, 419 aa, Artificial Sequence
  SARS-CoV-2__MT509959.1__nucleocapsid protein (N)
MSDNGTQNQRNALRITFGGPSDSTGSNQNGERSGARSKQRRPQGLPNNTASWFTALTQHGKEDLKFPRGQGVPINTNSSPDDQIGYYRRATRRIRGGDGKMKDLSPRWYFYYLGTGPEAGLPYGANKDGIIWVATEGALNTPKDHIGTRNPANNAAIVLQLPQGTTLPKGFYAEGSRGGSQASSRSSSRSRNSSRNSTPGSSRGTSPARMAGNGGDAALALLLLDRLNQLESKMSGKGQQQQGQTVTKKSAAEASKKPRQKRTATKAYNVTQAFGRRGPEQTQGNFGDQELIRQGTDYKHWPQIAQFAPSASAFFGMSRIGMEVTPSGTWLTYTGAIKLDDKDPNFKDQVILLNKHIDAYKTFPPTEPKKDKKKKADETQALPQRQKKQQTVTLLPAADLDDFSKQLQQSMSSADSTQA

SEQ ID NO: 15620 - protein, 419 aa, Artificial Sequence
  SARS-CoV-2__MT509497.1__nucleocapsid protein (N)
MSDNGPQNQRNALRITFGGPSDSTGSNQNGERSGARSKQRRPQGLPNNTASWFTALTQHGKEDLKFPRGQGVPINTNSSPDDQIGYYRRATRRIRGGDGKMKDLSPRWYFYYLGTGPEAGLPYGANKDGIIWVATEGALNTPKDHIGTRNPSNNAAIVLQLPQGTTLPKGFYAEGSRGGSQASSRSSSRSRNSSRNSTPGSSRGTSPARMAGNGGDAALALLLLDRLNQLESKMSGKGQQQQGQTVTKKSAAEASKKPRQKRTATKAYNVTQAFGRRGPEQTQGNFGDQELIRQGTDYKHWPQIAQFAPSASAFFGMSRIGMEVTPSGTWLTYTGAIKLDDKDPNFKDQVILLNKHIDAYKTFPPTEPKKDKKKKADETQALPQRQKKQQTVTLLPAADLDDFSKQLQQSMSSADSTQA

SEQ ID NO: 15621 - protein, 419 aa, Artificial Sequence
  SARS-CoV-2__MT509498.1__nucleocapsid protein (N)
MSDNGPQNQRNAPRITFGGPSDSTGSNQNGERSGARSKQRRPQGLPNNTASWFTALTQHGKEDLKFPRGQGVPINTNSSPDDQIGYYRRATRRIRGGDGKMKDLSPRWYFYYLGTGPEAGLPYGANKDGIIWVATEGALNTPKDHIGTRNPANNAAIVLQLPQGTTLPKGFYAEGSRGGSQASSRSSSRSRNSLRNSTPGSSRGTSPARMAGNGGDAALALLLLDRLNQLESKMSGKGQQQQGQTVTKKSAAEASKKPRQKRTATKAYNVTQAFGRRGPEQTQGNFGDQELIRQGTDYKHWPQIAQFAPSASAFFGMSRIGMEVTPSGTWLTYTGAIKLDDKDPNFKYQVILLNKHIDAYKTFPPTEPKKDKKKKADETQALPQRQKKQQTVTLLPAADLDDFSKQLQQSMSSADSTQA

SEQ ID NO: 15622 - protein, 419 aa, Artificial Sequence
  SARS-CoV-2__MT506566.1__nucleocapsid protein (N)
MSDNGPQNQRNAPHITFGGPSDSTGSNQNGERSGARSKQRRPQGLPNNTASWFTALTQHGKEDLKFPRGQGVPINTNSSPDDQIGYYRRATRRIRGGDGKMKDLSPRWYFYYLGTGPEAGLPYGANKDGIIWVATEGALNTPKDHIGTRNPANNAAIVLQLPQGTTLPKGFYAEGSRGGSQASSRSSSRSRNSSRNSTPGSSRGTSPARMAGNGGDAALALLLLDRLNQLESKMSGKGQQQQGQTVTKKSAAEASKKPRQKRTATKAYNVTQAFGRRGPEQTQGNFGDQELIRQGTDYKHWPQIAQFAPSASAFFGMSRIGMEVTPSGTWLTYTGAIKLDDKDPNFKDQVILLNKHIDAYKTFPPTEPKKDKKKKADETQALPQRQKKQQTVTLLPAADLDDFSKQLQQSMSSADSTQA

SEQ ID NO: 15623 - protein, 419 aa, Artificial Sequence
  SARS-CoV-2__MT502774.1__nucleocapsid protein (N)
MSDNGPQNQRNAPRITFGGPSDSTGSNQNGERSGARSKQRRPQGLPNNTASWFTALTQHGKEDLKFPRGQGVPINTNSSPDDQIGYYRRATRRIRGGDGKMKDLSPRWYFYYLGTGPEAGLPYGANKDGIIWVATEGALNTPKDHIGTRNPANNAAIVLQLPQGTTLPKGFYAEGSRGGSQASSRSSSRSRNSSRNSTPGSNRGTSPARMAGNGGDAALALLLLDRLNQLESKMSGKGQQQQGQTVTKKSAAEASKKPRQKRTATKAYNVTQAFGRRGPEQTQGNFGDQELIRQGTDYKHWPQIAQFAPSASAFFGMSRIGMEVTPSGTWLTYTGAIKLDDKDPNFKDQVILLNKHIDAYKTFPPTEPKKDKNKKADETQALPQRQKKQQTVTLLPAADLDDFSKQLQQSMSSADSTQA

SEQ ID NO: 15624 - protein, 419 aa, Artificial Sequence
  SARS-CoV-2__MT496974.1__nucleocapsid protein (N)
MSDNGPQNQRNAPRITFGGPSDSTGSNQNGERSGARSKQRRPQGLPNNTASWFTALTQHGKEDLKFPRGQGVPINTNSSPDDQIGYYRRATRRIRGGDGKMKDLSPRWYFYYLGTGPEAGLPYGANKDGIIWVATEGALNTPKDHIGTRNPANNAAIVLQLPQGTTLPKGFYAEGSRGGSQASSRSSSRSRNSLRNSTPGSSRGTSPARMAGNGGDAALALLLLDRLNQLESKMSGKGQQQQGQTVTKKSAAEASKKPRQKRTATKAYNVTQAFGRRGPEQTQGNFGDQELIRQGTDYKHWPQIAQFAPSASAFFGMSRIGMEVTPSGTWLTYTGAIKLDDKDPNFKDQVILLNKHIDAYKIFPPTEPKKDKKKKADETQALPQRQKKQQTVTLLPAADLDDFSKQLQQSMSSADSTQA

SEQ ID NO: 15625 - protein, 419 aa, Artificial Sequence
  SARS-CoV-2__MT496976.1__nucleocapsid protein (N)
MSDNGPQNQRNAPRITFGGPSDSTGSNQNGERSGARSKQRRPQGLPNNTASWFTALTQHGKEDLKFPRGQGVPINTNSSPDDQIGYYRRATRRIRGGDGKMKDLSPRWYFYYLGTGPEAGLPYGANKDGIIWVATEGALNTPKDHIGTRNPANNAAIVLQLPQGTTLPKGFYAEGSRGGSQASSRSSSRSLNSSRNSTPGSSRGTSPARMAGNGGDAALALLLLDRLNQLESKMSGKGQQQQGQTVTKKSAAEASKKPRQKRTATKAYNVTQAFGRRGPEQTQGNFGDQELIRQGTDYKHWPQIAQFAPSASAFFGMSRIGMEVTPSGTWLTYTGAIKLDDKDPNFKDQVILLNKHIDAYKTFPPTEPKKDKKKKADETQALPQRQKKQQTVTLLPAADLDDFSKQLQQSMSSADSTQA

SEQ ID NO: 15626 - protein, 419 aa, Artificial Sequence
  SARS-CoV-2__MT496984.1__nucleocapsid protein (N)
MSDNGPQNQRNAPRITFGGPSDSTGSNQNGERSGARSKQRRPQGLPNNTASWFTALTQHGKEDLKFPRGQGVPINTNSSPDDQIGYYRRATRRIRGGDGKMKDLSPRWYFYYLGTGPEAGLPYGANKDGIIWVATEGALNTPKDHIGTRNPANNAAIVLQLPQGTTLPKGFYAEGSRGGSQASSRSSSRSRNSSRNSTPGSSRGTSPARMAGNGGDAALALLLLDRLNQLESKMSGKGQQQQGQTVTKKSAAEASKKPRQKRTATKAYNVTQAFGRRGPEQTQGNFGDQELIRQGTDYKHWSQIAQFAPSASAFFGMSRIGMEVTPSGTWLTYTGAIKLDDKDPNFKDQVILLNKHIDAYKTFPPTEPKKDKKKKADETQALPQRQKKQQTVTLLPAADLDDFSKQLQQSMSSADSTQA

SEQ ID NO: 15627 - protein, 419 aa, Artificial Sequence
  SARS-CoV-2__MT496986.1__nucleocapsid protein (N)
MSDNGPQNQRNAPRITFGGPSDSTGSNQNGERSGARSKQRRPQGLPNNTASWFTALTQHGKEDLKFPRGQGVPINTNSSPDDQIGYYRRATRRIRGGDGKMKDLSPRWYFYYLGTGPEARLPYGANKDGIIWVATEGALNTPKDHIGTRNPANNAAIVLQLPQGTTLPKGFYAEGSRGGSQASSRSSSRSRNSLRNSTPGSSRGTSPARMAGNGGDAALALLLLDRLNQLESKMSGKGQQQQGQTVTKKSAAEASKKPRQKRTATKAYNVTQAFGRRGPEQTQGNFGDQELIRQGTDYKHWPQIAQFAPSASAFFGMSRIGMEVTPSGTWLTYTGAIKLDDKDPNFKDQVILLNKHIDAYKTFPPTEPKKDKKKKADETQALPQRQKKQQTVTLLPAADLDDFSKQLQQSMSSADSTQA

SEQ ID NO: 15628 - protein, 419 aa, Artificial Sequence
  SARS-CoV-2__MT477845.1__nucleocapsid protein (N)
MSDNGPQNQRNAPRITFGGPSDSTGSNQNGERSGARSKQRRPQGLPNNTASWFTALTQHGKEDLKFPRGQGVPINTNSSPDDQIGYYRRATRRIRGGDGKMKDLSPRWYFYYLGTGPEAGLPYGANKDGIIWVATEGALNTPKDHIGTRNPANNAAIVLQLPQGTTLPKGFYAEGSRGGSQASSRSSSRSLNSSRNSTPGSSKRTSPARMAGNGGDAALALLLLDRLNQLESKMSGKGQQQQGQTVTKKSAAEASKKPRQKRTATKAYNVTQAFGRRGPEQTQGNFGDQELIRQGTDYKHWPQIAQFAPSASAFFGMSRIGMEVTPSGTWLTYTGAIKLDDKDPNFKDQVILLNKHIDAYKTFPPTEPKKDKKKKADETQALPQRQKKQQTVTLLPAADLDDFSKQLQQSMSSADSTQA

SEQ ID NO: 15629 - protein, 419 aa, Artificial Sequence
  SARS-CoV-2__MT472625.1__nucleocapsid protein (N)
MSDNGPQNQRNAPRITFGGPSDSTGSNQNGERSGARSKQRRPQGLPNNTASWFTALTQHGKEDLKFPRGQGVPINTNSSPDDQIGYYRRATRRIRGGDGKMKDLSPRWYFYYLGTGPEAGLPYGANKDGIIWVATEGALNTPKDHIGTRNPANNAAIVLQLPQGTTLPKGFYAEGSRGGSQASSRSSSRSRNSSRNSTPGSSRGTSPARMAGNGGDAALALLLLDRLNQLESKMSGKGQQQQGQTVTKKSAAEASKKPRQKRTATKAYNVTQAFGRRGPEQTQGNFGDQELIRQGTDYKHWPQIAQFAPSASAFFGMSRIGMEVTPSGTWLTYTGAIKLDDKDPNFKDQVILLNKHIDAYKTFPPTEPKKDKKKKADETQALPQRQKKQQTVTLLPAAELDDFSKQLQQSMSSADSTQA

SEQ ID NO: 15630 - protein, 419 aa, Artificial Sequence
  SARS-CoV-2__MT358640.1__nucleocapsid protein (N)
MSDNGPQNQRNAPRITFGGPSDSTGSNQNGERSGARSKQRRPQGLPNNTASWFTALTQHGKEDLKFPRGQGVPINTNSSPDDQIGYYRRATRRIRGGDGKMKDLSPRWYFYYLGTGPEAGLPYGANKDGIIWVATEGALNTPKDHIGTRNPANNAAIVLQLPQGTTLPKGFYAEGSRGGSQASSRSSSRSRNSSRNSTPGSSKRTSPARMAGNGGDAALALLLLDRLNQFESKMSGKGQQQQGQTVTKKSAAEASKKPRQKRTATKAYNVTQAFGRRGPEQTQGNFGDQELIRQGTDYKHWPQIAQFAPSASAFFGMSRIGMEVTPSGTWLTYTGAIKLDDKDPNFKDQVILLNKHIDAYKTFPPTEPKKDKKKKADETQALPQRQKKQQTVTLLPAADLDDFSKQLQQSMSSADSTQA

SEQ ID NO: 15631 - protein, 419 aa, Artificial Sequence
  SARS-CoV-2__MT459857.1__nucleocapsid protein (N)
MSDNGPQNQRNAPRITFGGPSDSTGSNQNGERSGARSKQRRPQGLPNNTASWFTALTQHGKEDLKFPRGQGVPINTNSSPDDQIGYYRRATRRIRGGDGKMKDLSPRWYFYYLGTGPEAGLPYGANKDGIIWVATEGALNTPKDHIGTRNPANNAAIVLQLPQGTTLPKGFYAEGSRGGSQASSRSSSRSRNSSRNSTPGSSKRISPARMAGNGGDAALALLLLDRLNQLESKMSGKGQQQQGQTVTKKSAAEASKKPRQKRTATKAYNVTQAFGRRGPEQTQGNFGDQELIRQGTDYKHWPQIAQFAPSASAFFGMSRIGMEVTPSGTWLTYTGAIKLDDKDPNFKDQVILLNKHIDAYKTFPPTEPKKDKKKKADETQALPQRQKKQQTVTLLPAADLDDFSKQLQQSMSSADSTQA

SEQ ID NO: 15632 - protein, 419 aa, Artificial Sequence
  SARS-CoV-2__MT459903.1__nucleocapsid protein (N)
MSDNGPQNQRNAPRITFGGPSDSTGSNQNGERSGARSKQRRPQGLPNNTASWFTALTQHGKEDLKFPRGQGVPINTNSSPDDQIGYYRRATRRIRGGDGKMKDLSPRWYFYYLGTGPEAGLPYGANKDGIIWVATEGALNTPKDHIGTRNPANNAAIVLQLPQGTTLPKGFYAEGSRGGSQASSRSSSRSRNSSRNSTPGSSKRTSPARMAGNGGDAALALLLLDRLNQLESKMSGKGQQQQGQTVTKKSAAEASKKPRQKRTATKAYNVTQAFGRRGPEQTQGNFGDQELIRQGTDYKHWPQIAQFAPSASAFFGMSRIGMEVTPSGTWLTYTGAIKLDDKDPNFKDQVILLNKHIDAYKTFRPTEPKKDKKKKADETQALPQRQKKQQTVTLLPAADLDDFSKQLQQSMSSADSTQA

SEQ ID NO: 15633 - protein, 419 aa, Artificial Sequence
  SARS-CoV-2__MT459987.1__nucleocapsid protein (N)
MSDNGPQNQRNALRITFGGPSDSTGSNQNGERSGARSKQRRPQGLPNNTASWFTALTQHGKEDLKFPRGQGVPINTNSSPDDQIGYYRRATRRIRGGDGKMKDLSPRWYFYYLGTGPEAGLPYGANKDGIIWVATEGALNTPKDHIGTRNPANNAAIVLQLPQGTTLPKGFYAEGSRGGSQASSRSSSRSRNSSRNSTPGSSRGTSPARMAGNGGDAALALLLLDRLNQLESKMSGKGQQQQGQTVTKKSAAEASKKPRQKRTATKAYNVTQAFGRRGPEQTQGNFGDQELIRQGTYYKHWPQIAQFAPSASAFFGMSRIGMEVTPSGTWLTYTGAIKLDDKDPNFKDQVILLNKHIDAYKTFPPTEPKKDKKKKADETQALPQRQKKQQTVTLLPAADLDDFSKQLQQSMSSADSTQA

SEQ ID NO: 15634 - protein, 419 aa, Artificial Sequence
  SARS-CoV-2__MT461610.1__nucleocapsid protein (N)
MSDNGPQNQRNAPRITFGGPSDSTGSNQNGERSGARSKQRRPQGLPNNTASWFTALTQHGKEDLKFPRGQGVPINTNSSPYDQIGYYRRATRRIRGGDGKMKDLSPRWYFYYLGTGPEAGLPYGANKDGIIWVATEGALNTPKDHIGTRNPANNAAIVLQLPQGTTLPKGFYAEGSRGGSQASSRSSSRSRNSSRNSTPGSSRGTSPARMAGNGGDAALALLLLDRLNQLESKMSGKGQQQQGQTVTKKSAAEASKKPRQKRTATKAYNVTQAFGRRGPEQTQGNFGDQELIRQGTDYKHWPQIAQFAPSASAFFGMSRIGMEVTPSGTWLTYTGAIKLDDKDPNFKDQVILLNKHIDAYKTFPPTEPKKDKKKKADETQALPQRQKKQQTVTLLPAADLDDFSKQLQQSMSSADSTQA

SEQ ID NO: 15635 - protein, 419 aa, Artificial Sequence
  SARS-CoV-2__MT461663.1__nucleocapsid protein (N)
MSDNGPQNQRNAPRITFGGPSDSTGSNQNGERSGARSKQRRPQGLPNNTASWFTALTQHGKEDLKFPRGQGVPINTNSSPDDQIGYYRRATRRIRGGDGKMKDLSPRWYFYYLGTGPEAGLPYGANKDGIIWVATEGALNTPKDHIGTRNPANNAAIVLQLPQGTTLPKGFYAEGSRGGSQASSRSSSRSRNISRNSTPGSSKRTSPARMAGNGGDAALALLLLDRLNQLESKMSGKGQQQQGQTVTKKSAAEASKKPRQKRTATKAYNVTQAFGRRGPEQTQGNFGDQELIRQGTDYKHWPQIAQFAPSASAFFGMSRIGMEVTPSGTWLTYTGAIKLDDKDPNFKDQVILLNKHIDAYKTFPPTEPKKDKKKKADETQALPQRQKKQQTVTLLPAADLDDFSKQLQQSMSSADSTQA

SEQ ID NO: 15636 - protein, 419 aa, Artificial Sequence
  SARS-CoV-2__MT450889.1__nucleocapsid protein (N)
MSDNGPQNQRNAPRITFGGPSDSTGSNQNGERSGARSKQRRPQGLPNNTASWFTALTQHGKEDLKFPRGQGVPINTNSSPDDQIGYYRRATRRIRGGDGKMKDLSPRWYFYYLGTGPEAGLPYGANKDGIIWVATEGALNTPKDHIGTRNPANNAAIVLQLPQGTTLPKGFYAEGSRGGSQASSRSSSRSRNSSRNSTPGSSRGTSPARMAGNGGDAALALLLLDRLNQLESKMSGKGQQQQGQTVTKKSAAEASKKPRQKRTATKAYNVTQAFGRRGPEQTQGNFGDQELIRQGTDYKHWPQIAQFAPSASAFFGMSRIGMEVTPSGTWLTYTGAIKLDDKDPNFKDQVILLNKHIDAYKTFPPTEPKKDKKKKADETQALPQRHKKQQTVTLLPAADLDDFSKQLQQSMSSADSTQA

SEQ ID NO: 15637 - protein, 419 aa, Artificial Sequence
  SARS-CoV-2__MT451874.1__nucleocapsid protein (N)
MSDNGPQNQRNALRITFGGPSDSTGSNQNGERSGARSKQRRPQGLPNNTASWFTALTQHGKEDLKFPRGQGVPINTNSSPDDQIGYYRRATSRIRGGDGKMKDLSPRWYFYYLGTGPEAGLPYGANKDGIIWVATEGALNTPKDHIGTRNPANNAAIVLQLPQGTTLPKGFYAEGSRGGSQASSRSSSRSRNSSRNSTPGSSRGTSPARMAGNGGDAALALLLLDRLNQLESKMSGKGQQQQGQTVTKKSAAEASKKPRQKRTATKAYNVTQAFGRRGPEQTQGNFGDQELIRQGTDYKHWPQIAQFAPSASAFFGMSRIGMEVTPSGTWLTYTGAIKLDDKDPNFKDQVILLNKHIDAYKTFPPTEPKKDKKKKADETQALPQRQKKQQTVTLLPAADLDDFSKQLQQSMSSADSTQA

SEQ ID NO: 15638 - protein, 419 aa, Artificial Sequence
  SARS-CoV-2__MT451887.1__nucleocapsid protein (N)
MSDNGPQNQRNAPRITFGGPSDSTGSNQNGERSGARSKQRRPQGLPNNTASWFTALTQHGKEDLKFPRGQGVPINTNSSPDDQIGYYRRATRRIRGGDGKMKDLSPRWYFYYLGTGPEAGLPYGANKDGIIWVATEGALNTPKDHIGTRNPANNAAIVLQLPQGTTLPKGFYAEGSRGGSQASSRSSSRSRNSSRNSTPGSSRGTSPARMAGNGGDAALALLLLDRLNQLESKMSCKGQQQQGQTVTKKSAAEASKKPRQKRTATKAYNVTQAFGRRGPEQTQGNFGDQELIRQGTDYKHWPQIAQFAPSASAFFGMSRIGMEVTPSGTWLTYTGAIKLDDKDPNFKDQVILLNKHIDAYKTFPPTEPKKDKKKKADETQALPQRQKKQQTVTLLPAADLDDFSKQLQQSMSSADSTQA

SEQ ID NO: 15639 - protein, 419 aa, Artificial Sequence
  SARS-CoV-2__MT450966.1__nucleocapsid protein (N)
MSDNGPQNQRNAPRITFGGPSDSTGSNQNGERSGARSKQRRPQGLPNNTASWFTALTQHGKEDLKFPRGQGVPINTNSSPDDQIGYYRRATRRIRGGDGKMKDLSPRWYFYYLGTGPEAGLPYGANKDGIIWVATEGALNTPKDHIGTRNPANNAAIVLQLPQGTTLPKGFYAEGSRGGSQASSRSSSRSRNSSRNSTPGSSRGTSPARMAGNGGDAALALLLLDRLNQLESKMSGKGQQQQGQTVTKKSAAEASKKPRQKRTATKAYNVIQAFGRRGPEQTQGNFGDQELIRQGTDYKHWPQIAQFAPSASAFFGMSRIGMEVTPSGTWLTYTGAIKLDDKDPNFKDQVILLNKHIDAYKTFPPTEPKKDKKKKADETQALPQRQKKQQTVTLLPAADLDDFSKQLQQSMSSADSTQA

SEQ ID NO: 15640 - protein, 419 aa, Artificial Sequence
  SARS-CoV-2__MT451143.1__nucleocapsid protein (N)
MSDNGPQNQRNAPRITFGGPSDSTGSNQNGERSGARSKQRRPQGLPNNTASWFTALTQHRKEDLKFPRGQGVPINTNSSPDDQIGYYRRATRRIRGGDGKMKDLSPRWYFYYLGTGPEAGLPYGANKDGIIWVATEGALNTPKDHIGTRNPANNAAIVLQLPQGTTLPKGFYAEGSRGGSQASSRSSSRSRNSSRNSTPGSSRGTSPARMAGNGGDAALALLLLDRLNQLESKMSGKGQQQQGQTVTKKSAAEASKKPRQKRTATKAYNVTQAFGRRGPEQTQGNFGDQELIRQGTDYKHWPQIAQFAPSASAFFGMSRIGMEVTPSGTWLTYTGAIKLDDKDPNFKDQVILLNKHIDAYKTFPPTEPKKDKKKKADETQALPQRQKKQQTVTLLPAADLDDFSKQLQQSMSSADSTQA

SEQ ID NO: 15641 - protein, 419 aa, Artificial Sequence
  SARS-CoV-2__MT451189.1__nucleocapsid protein (N)
MSDNGPQNQRNAPRITFGGPSDSTGSNQNGERSGARSKQRRPQGLPNNTASWFTALTQHGKEDLKFPRGQGVPINTNSSPDDQIGYYRRATRRIRGGDGKMKDLSPRWYFYYLGTGPEAGLPYGANKDGIIWVATEGALNTPKDHIGTRNPANNAAIVLQLPQGTTLPKGFYAEGSRGGSQASSRSSSRSRNSSRNSIPGSSKRTSPARMAGNGGDAALALLLLDRLNQLESKMSGKGQQQQGQTVTKKSAAEASKKPRQKRTATKAYNVTQAFGRRGPEQTQGNFGDQELIRQGTDYKHWPQIAQFAPSASAFFGMSRIGMEVTPSGTWLTYTGAIKLDDKDPNFKDQVILLNKHIDAYKTFPPTEPKKDKKKKADETQALPQRQKKQQTVTLLPAADLDDFSKQLQQSMSSADSTQA

SEQ ID NO: 15642 - protein, 419 aa, Artificial Sequence
  SARS-CoV-2__MT451245.1__nucleocapsid protein (N)
MSDNGPQNQRNAPRITFGGPSDSTGSNQNGERSGARSKQRRPQGLPNNTASWFTALTQHGKEDLKFPRGQGVPINTNSSPDDQIGYYRRATRRIRGGDGKMKDLSPRWYFYYLGTGPEAGLPYGANKDGIIWVATEGALNTPKDHIGTRNPANNAAIVLQLPQGTTLPKGFYAEGSRGGGQASSRSSSRSRNSSRNSTPGSSKRTSPARMAGNGGDAALALLLLDRLNQLESKMSGKGQQQQGQTVTKKSAAEASKKPRQKRTATKAYNVTQAFGRRGPEQTQGNFGDQELIRQGTDYKHWPQIAQFAPSASAFFGMSRIGMEVTPSGTWLTYTGAIKLDDKDPNFKDQVILLNKHIDAYKTFPPTEPKKDKKKKADETQALPQRQKKQQTVTLLPAADLDDFSKQLQQSMSSADSTQA

SEQ ID NO: 15643 - protein, 419 aa, Artificial Sequence
  SARS-CoV-2__MT451258.1__nucleocapsid protein (N)
MSDNGPQNQRNAPRITFGGPSDSTGSNQNGERSGARSKQRRPQGLPNNTASWFTALTQHGKEDLKFPRGQGVPINTNSSPDDQIGYYRRATRRIRGGDGKMKDLSPRWYFYYLGTGPEAGLPYGANKDGIIWVATEGALNTPKDHIGTRNPANNAAIVLQLPKGTTLPKGFYAEGSRGGSQASSRSSSRSRNSSRNLTPGSSRGTSPARMAGNGGDAALALLLLDRLNQLESKMSGKGQQQQGQTVTKKSAAEASKKPRQKRTATKAYNVTQAFGRRGPEQTQGNFGDQELIRQGTDYKHWPQIAQFAPSASAFFGMSRIGMEVTPSGTWLTYTGAIKLDDKDPNFKDQVILLNKHIDAYKTFPPTEPKKDKKKKADETQALPQRQKKQQTVTLLPAADLDDFSKQLQQSMSSADSTQA

SEQ ID NO: 15644 - protein, 419 aa, Artificial Sequence
  SARS-CoV-2__MT451476.1__nucleocapsid protein (N)
MSDNGPQNQRNAPRITFGGPSDSTGSNQNGERSGARSKQRRPQGLPNNTASWFTALTQHGKEDLKFPRGQGVPINTNSSPDDQIGYYRRATRRIRGGDGKMKDLSPRWYFYYLGTGPEAGLPYGANKDGIIWVATEGALNTPKDHIGTRNPANNAAIVLQLPQGTTLPKGFYAEGSRGGSQASSRSSSRSRNSSRNSTPGSSRGTSPARMAGNGGDAALALLLLDRLYQLESKMSGKGQQQQGQTVTKKSAAEASKKPRQKRTATKAYNVTQAFGRRGPEQTQGNFGDQELIRQGTDYKHWPQIAQFAPSASAFFGMSRIGMEVTPSGTWLTYTGAIKLDDKDPNFKDQVILLNKHIDAYKTFPPTEPKKDKKKKADETQALPQRQKKQQTVTLLPAADLDDFSKQLQQSMSSADSTQA

SEQ ID NO: 15645 - protein, 419 aa, Artificial Sequence
  SARS-CoV-2__MT444626.1__nucleocapsid protein (N)
MSDNGPQNQRNAPRITFGGPSDSTGSNQNGERSLARSKQRRPQGLPNNTASWFTALTQHGKEDLKFPRGQGVPINTNSSPDDQIGYYRRATRRIRGGDGKMKDLSPRWYFYYLGTGPEAGLPYGANKDGIIWVATEGALNTPKDHIGTRNPANNAAIVLQLPQGTTLPKGFYAEGSRGGSQASSRSSSRSRNSSRNSTPGSSRGTSPARMAGNGGDAALALLLLDRLNQLESKMSGKGQQQQGQTVTKKSAAEASKKPRQKRTATKAYNVTQAFGRRGPEQTQGNFGDQELIRQGTDYKHWPQIAQFAPSASAFFGMSRIGMEVTPSGTWLTYTGAIKLDDKDPNFKDQVILLNKHIDAYKTFPPTEPKKDKKKKADETQALPQRQKKQQTVTLLPAADLDDFSKQLQQSMSSADSTQA

SEQ ID NO: 15646 - protein, 419 aa, Artificial Sequence
  SARS-CoV-2__MT447172.1__nucleocapsid protein (N)
MSDNGPQNQRNAPRITFGGPSDSTGSNQNGERSGARSKQRRPQGLPNNTASWFTALTQHGKEDLKFPRGQGVPINTNSSPDDQIGYYRRATRRIRGGDGKMKDLSPRWYFYYLGTGPEVGLPYGANKDGIIWVATEGALNTPKDHIGTRNPANNAAIVLQLPQGTTLPKGFYAEGSRGGSQASSRSSSRSRNSSRNSTPGSSRGTSPARMAGNGGDAALALLLLDRLNQLESKMSGKGQQQQGQTVTKKSAAEASKKPRQKRTATKAYNVTQAFGRRGPEQTQGNFGDQELIRQGTDYKHWPQIAQFAPSASAFFGMSRIGMEVTPLGTWLTYTGAIKLDDKDPNFKDQVILLNKHIDAYKTFPPTEPKKDKKKKADETQALPQRQKKQQTVTLLPAADLDDFSKQLQQSMSSADSTQA

SEQ ID NO: 15647 - protein, 416 aa, Artificial Sequence
  SARS-CoV-2__MT434815.1__nucleocapsid protein (N)
MSDNGPQNQRNAPRITFGGPSDSTGSNQNGERSGARSKQRRPQGLPNNTASWFTALTQHGKEDLKFPRGQGVPINTNSSPDDQIGYYRRATRRIRGGDGKMKDLSPRWYFYYLGTGPEAGLPYGANKDGIIWVATEGALNTPKDHIGTRNPANNAAIVLQLPQGTTLPKGFYAEGSRGGSQASSRSSSRSRNSSRNSTPGSSRGTSPARMAGNGGDAALALLLLDRLNQLESKMSGKGQQQQGQTVTKKSAAEASKKPRQKRTATKAYNVTQAFGRRGPEQTQGNFGDQELIRQGTDYKHWPQIAQFAPSASAFFGMSRIGMEVTPSGTWLTYTGAIKLDDKDPNFKDQVILLNKHIDAYKTFPPTEPKKDKKKKADETQALPQRQKKQTLLPAADLDDFSKQLQQSMSSADSTQA

SEQ ID NO: 15648 - protein, 419 aa, Artificial Sequence
  SARS-CoV-2__MT412280.1__nucleocapsid protein (N)
MSDNGPQNQRNAPRITFGGPSDSTGSNQNGERSGARSKQRRPQGLPNNTASWFTALTQHGKEDLKFPRGQGVPINTNSSPDDQIGYYRRATRRIRGGDGKMKDLSPRWYFYYLGTGPEAGLPYGANKDGIIWVATEGALNTPKDHIGTRNPANNAAIVLQLPQGTTLPKGFYAEGSRGGSQASSRSSSRSRNSSRNSTPGSSRGTSPARMAGNGGDAALALLLLDRLNQLESKMSGKGQQQQGQTVTKKSAAEASKKPRQKRTATKAYNVTQAFGRRGPEQTQGNFGDQELIRLGTDYKHWPQIAQFAPSASAFFGMSRIGMEVTPSGTWLTYTGAIKLDDKDPNFKDQVILLNKHIDAYKTFPPTEPKKDKKKKADETQALPQRQKKQQTVTLLPAADLDDFSKQLQQSMSSADSTQA

SEQ ID NO: 15649 - protein, 419 aa, Artificial Sequence
  SARS-CoV-2__MT412284.1__nucleocapsid protein (N)
MSDNGPQNQRNAPRITFGGPSDSTGSNQNGERSGARSKQRRPQGLPNNTASWFTALTQHGKEDLKFPRGQGVPINTNSSPDDQIGYYRRATRRIRGGDGKMKDLSPRWYFYYLGTGPEAGLPYGANKDGIIWVATEGALNTPKDHIGTRNPANNAAIVLQLPQGTTLPKGFYAEGSRGGSQASSRSSSRSRNSSRNSTPGSSRGTSPARMAGNGGDAALALLLLDRLNQLESKMSGKGQQQQGQTVTKKSAAEASKKPRQKRTATKAYNVTQAFGRRGPEQTQGNFGDQELIRQGTDYKHWPQIAQFALSASAFFGMSRIGMEVTPSGTWLTYTGAIKLDDKDPNFKDQVILLNKHIDAYKTFPPTEPKKDKKKKADETQALPQRQKKQQTVTLLPAADLDDFSKQLQQSMSSADSTQA

SEQ ID NO: 15650 - protein, 419 aa, Artificial Sequence
  SARS-CoV-2__MT412294.1__nucleocapsid protein (N)
MSDNGPQNQRNAPRITFGGPSDSTGSNQNGERSGARSKQRRPQGLPNNTASWFTALTQHGKEDLKFPRGQGVPINTNSSPDDQIGYYRRATRRIRGGDGKMKDLSPRWYFYYLGTGPEAGLPYGANKDGIIWVATEGALNTPKDHIGTRNPANNAAIVLQLPQGTTLPKGFYAEGSRGGSQASSRSSSRSRNSSRNSTPGSSRGTSPATMAGNGGDAALALLLLDRLNQLESKMSGKCQQQQGQTVTKKSAAEASKKPRQKRTATKAYNVTQAFGRRGPEQTQGNFGDQELIRQGTDYKHWPQIAQFAPSASAFFGMSRIGMEVTPSGTWLTYTGAIKLDDKDPNFKDQVILLNKHIDAYKTFPPTEPKKDKKKKADETQALPQRQKKQQTVTLLPAADLDDFSKQLQQSMSSADSTQA

SEQ ID NO: 15651 - protein, 419 aa, Artificial Sequence
  SARS-CoV-2__MT415320.1__nucleocapsid protein (N)
MSDNGPQNQRNAPRITFGGPSDSTGSNQNGERSGARSKQRRPQGLPNNTASWFTALTQHGKEDLKFPRGQGVPINTNSSPDDQIGYYRRATRRIRGGDGKMKDLSPRWYFYYLGTGPEAGLPYGANKDGIIWVATEGALNTPKDHIGTRNPANNAAIVLQLPQGTTLPKGFYAEGSRGGSQASSRSSSRSRNSSRNSTPGSSRGTSPARMAGNGGDAALALLLLDRLNQLESKMSGKGQQQQGQTVTKKSAAEASKKPRQKRTATKAYNVTQAFGRRGPEQTQGNFGDQELIRQGTDYKHWPQIAQFAPSASAFFGMSRIGMEVTPSGTWLTYTGAIKLDDKDSNFKDQVILLNKHIDAYKTFPPTEPKKDKKKKADETQALPQRQKKQQTVTLLPAADLDDFSKQLQQSMSSADSTQA

SEQ ID NO: 15652 - protein, 419 aa, Artificial Sequence
  SARS-CoV-2__MT385444.1__nucleocapsid protein (N)
MSDNGPQNQRNAPRITFGGPSDSTGSNQNGERSGARSKQLRPQGLPNNTASWFTALTQHGKEDLKFPRGQGVPINTNSSPDDQIGYYRRATRRIRGGDGKMKDLSPRWYFYYLGTGPEAGLPYGANKDGIIWVATEGALNTPKDHIGTRNPANNAAIVLQLPQGTTLPKGFYAEGSRGGSQASSRSSSRSRNSSRNSTPGSSRGTSPARMAGNGGDAALALLLLDRLNQLESKMSGKGQQQQGQTVTKKSAAEASKKPRQKRTATKAYNVTQAFGRRGPEQTQGNFGDQELIRQGTDYKHWPQIAQFAPSASAFFGMSRIGMEVTPSGTWLTYTGAIKLDDKDPNFKDQVILLNKHIDAYKTFPPTEPKKDKKKKADETQALPQRQKKQQTVTLLPAADLDDFSKQLQQSMSSADSTQA

SEQ ID NO: 15653 - protein, 419 aa, Artificial Sequence
  SARS-CoV-2__MT375432.1__nucleocapsid protein (N)
MSDNGPQNQRNAPRITFGGPSDSTGSNQNGERSGARSKQRRPQGLPNNTASWFTALTQHGKEDLKFPRGQGVPINTNSSPDDQIGYYRRSTRRIRGGDGKMKDLSPRWYFYYLGTGPEAGLPYGANKDGIIWVATEGALNTPKDHIGTRNPANNAAIVLQLPQGTTLPKGFYAEGSRGGSQASSRSSSRSRNSSRNSTPGSSRGTSPARMAGNGGDAALALLLLDRLNQLESKMSGKGQQQQGQTVTKKSAAEASKKPRQKRTATKAYNVTQAFGRRGPEQTQGNFGDQELIRQGTDYKHWPQIAQFAPSASAFFGMSRIGMEVTPSGTWLTYTGAIKLDDKDPNFKDQVILLNKHIDAYKTFPPTEPKKDKKKKADETQALPQRQKKQQTVTLLPAADLDDFSKQLQQSMSSADSTQA

SEQ ID NO: 15654 - protein, 419 aa, Artificial Sequence
  SARS-CoV-2__MT374106.1__nucleocapsid protein (N)
MSDNGPQNQRNAPRITFGGPSDSTGSNQNGERSGARSKQRRPQGLPNNTASWFTALTQHGKEDLKFPRGQGVPINTNSSPDDQIGYYRRATRRIRGGDGKMKDLSPRWYFYYLGTGPEAGLPYGANKDGIIWVATEGALNTPKDHIGTRNPANNAAIVLQLPQGTTLPKGFYAEGSRGGSQASSRSSPRSRNSSRNSTPGSSRGTSPARMAGNGGDAALALLLLDRLNQLESKMSGKGQQQQGQTVTKKSAAEASKKPRQKRTATKAYNVTQAFGRRGPEQTQGNFGDQELIRQGTDYKHWPQIAQFAPSASAFFGMSRIGMEVTPSGTWLTYTGAIKLDDKDPNFKDQVILLNKHIDAYKTFPPTEPKKDKKKKADETQALPQRQKKQQTVTLLPAADLDDFSKQLQQSMSSADSTQA

SEQ ID NO: 15655 - protein, 419 aa, Artificial Sequence
  SARS-CoV-2__MT252737.1__nucleocapsid protein (N)
MSDNGPQNQRNAPRITFGGPSDSTGSNQNGERSGARSKQRRPQGLPNNTASWFTALTQHGKEDLKFPRGQGVPINTNSSPDDQIGYYRRATRRIRGGDGKMKDLSPRWYFYYLGTGPEAGLPYGANKDGIIWVATEGALNTPKDHIGTRNPANNAAIVLQLPQGTTLPKGFYAEGSRGGSQASSRSSSRSRNSSRNSTPGSSRGTSPARMAGNGGDAALALLLLDRLNQLESKMSGKGQQQQGQTVTKKSAAEASKKPRQKRTATKAYNVTQAFGRRGPEQTQGNFGDQELIRQGTDYKHWPQIAQFAPSASAFFGMSRIGMEVTPSGTWLTYTGAIKLDDKDPNFKDQVILLNKHIDAYKTFPPTEPKKDKKKKADETQALPQRQKKQQIVTLLPAADLDDFSKQLQQSMSSADSTQA

SEQ ID NO: 15656 - protein, 419 aa, Artificial Sequence
  SARS-CoV-2__MT371047.1__nucleocapsid protein (N)
MSDNGPQNQRNAPRITFGGPSDSTGSNQNGERSGARSKQRRPQGLPNNTASWFTALTQHGKEDLKFPRGQGVPINTNSSPDDQIGYYRRATRRIRGGDGKMKDLSPRWYFYYLGTGPEAGLPYGANKDGIIWVATEGALNTPKDHIGTRNPANNAAIVLQLPQGTTLPKGFYAEGSRGGSQASSRSSSRSRNSSRNSTPGSSRGTSPARMAGNGGDAALALLLLDRLNQLESKMSGKGQQQQGQTVTKKSAAEASKKPRQKRTATKAYNVTQAFGRRGPEQTQGNFGDQELIRQGTDYKHWPQIAQFAPSASAFFGMSRIGMEVTPSGTWLTYTGAIKLDDKDPNFKDQVILLNKHIDAYKTFPPTEPKKDKKKKADETQALPQRQKKQQTVTLLPASDLDDFSKQLQQSMSSADSTQA

SEQ ID NO: 15657 - protein, 419 aa, Artificial Sequence
  SARS-CoV-2__MT370850.1__nucleocapsid protein (N)
MSDNGPQNQRNAPRITFGGPSDSTGSNQNGERSGARSKQRRPQGLPNNTASWFTALTQHGKEDLKFSRGQGVPINTNSSPDDQIGYYRRATRRIRGGDGKMKDLSPRWYFYYLGTGPEAGLPYGANKDGIIWVATEGALNTPKDHIGTRNPANNAAIVLQLPQGTTLPKGFYAEGSRGGSQASSRSSSRSRNSSRNSTPGSSRGTSPARMAGNGGDAALALLLLDRLNQLESKMSGKGQQQQGQTVTKKSAAEASKKPRQKRTATKAYNVTQAFGRRGPEQTQGNFGDQELIRQGTDYKHWPQIAQFAPSASAFFGMSRIGMEVTPSGTWLTYTGAIKLDDKDPNFKDQVILLNKHIDAYKTFPPTEPKKDKKKKADETQALPQRQKKQQTVTLLPAADLDDFSKQLQQSMSSADSTQA

SEQ ID NO: 15658 - protein, 419 aa, Artificial Sequence
  SARS-CoV-2__MT370876.1__nucleocapsid protein (N)
MSDNGPQNQRNAPRITFGGPSDSTGSNQNGERSGARSKQRRPQGLPNNTASWFTALTQHGKEDLKFPRGQGVPINTNSSPDDQIGYYRRATRRIRGGDGKMKDLSPRWYFYYLGTGPEAGLPYGANKDGIIWVATEGALNTPKDHIGTRNPANNAAIVLQLPQGTTLPKGFYAEGSRGGSQASSRSSSRSRNSSRNSTPGSSRGTSPARMAGNGGDAALALLLLDRLNQLESKMSGKGQQQQGQTVTKKSAAEASKKPRQKRTATKAYNVTQAFGRRGPEQTQGNFGDQELIRQGTDYKHWPQIAQFAPSASAFFGMSRIGMEVTPSGTWLTYIGAIKLDDKDPNFKDQVILLNKHIDAYKTFPPTEPKKDKKKKADETQALPQRQKKQQTVTLLPAADLDDFSKQLQQSMSSADSTQA

SEQ ID NO: 15659 - protein, 419 aa, Artificial Sequence
  SARS-CoV-2__MT370904.1__nucleocapsid protein (N)
MSDNGPQNQRNAPRITFGGPSDSTGSNQNGERSGARSKQRRPQGLPNNTASWFTALTQHGKEDLKFPRGQGVPINTNSSPDDQIGYYRRATRRIRGGDGKMKDLSPRWYFYYLGTGPEAGLPYGANKDGIIWVATEGALNTPKDHIGTRNPANNAAIVLQLPQGTTLPKGFYAEGSRGGSQASSRSSSRSRNSSRNSTPGSSRGTSPARMAGNGGDAALALLLLDRLNQLESKMSGKGQQQQGQTVTKKSASEASKKPRQKRTATKAYNVTQAFGRRGPEQTQGNFGDQELIRQGTDYKHWPQIAQFAPSASAFFGMSRIGMEVTPSGTWLTYTGAIKLDDKDPNFKDQVILLNKHIDAYKTFPPTEPKKDKKKKADETQALPQRQKKQQTVTLLPAADLDDFSKQLQQSMSSADSTQA

SEQ ID NO: 15660 - protein, 419 aa, Artificial Sequence
  SARS-CoV-2__MT370948.1__nucleocapsid protein (N)
MSDNGPQNQRNAPRITFGGPSDSTGSNQNGERSGARSKQRRPQGLPNNTASWFTALTQHGKEDLKFPRGQGVPINTNSSPDDQIGYYRRATRRIRGGDGKMKDLSPRWYFYYLGTGPEAGLPYGANKDGIIWVATEGALNTPKDHIGTRNPANNAAIVLQLPQGTTLPKGFYAEGSRGGSQASSRSSSRSRNSSRNSTPGSSRGTSPARMAGNGGDAALALLLLDRLNQLESKMSGKGQQQQGQTVTKKSAAEASKKPRQKRTATKAYNVTQAFGRRGPEQTQGNFGDQELIRQGTDYKHWPQIAQFAPSASAFFGMSRIGMEVTPSGTWLTYTGAIKLDDKDPNFKDQVILLNKHIDAYKTFPPTEPKKDKKKKADETQALPQRQKKQQTVTLLPAADLDDFSKQLQQSMSIADSTQA

SEQ ID NO: 15661 - protein, 419 aa, Artificial Sequence
  SARS-CoV-2__MT370961.1__nucleocapsid protein (N)
MSDNGPQNQRNAPRITFGGPSDSTGSNQNGERSGARSKQRRPQGLPNNTASWFTALTQHGKEDLKFPRGQGVPINTNSSPDDQIGYYRRATRRIRGGDGKMKDLSPRWYFYYLGTGPEAGLPYGANKDGIIWVATEGALNTPKDHIGTRNPANNAAIVLQLPQGTTLPKGFYAEGSRGGSQASSRSSSRSRNSSRNSTPGSSRGTSPARMAGNGGDAALALLLLDRLNQLERKMSGKGQQQQGQTVTKKSAAEASKKPRQKRTATKAYNVTQAFGRRGPEQTQGNFGDQELIRQGTDYKHWPQIAQFAPSASAFFGMSRIGMEVTPSGTWLTYTGAIKLDDKDPNFKDQVILLNKHIDAYKTFPPTEPKKDKKKKADETQALPQRQKKQQTVTLLPAADLDDFSKQLQQSMSSADSTQA

SEQ ID NO: 15662 - protein, 419 aa, Artificial Sequence
  SARS-CoV-2__MT371035.1__nucleocapsid protein (N)
MSDNGPQNQRNAPRITFGGPSDSTGSNQNGERSGARSKQRRPQGLPNNTASWFTALTQHGKEDLKFPRGQGVPINTNSSPDDQIGYYRRATRRIRGGDGKMKDLSPRWYFYYLGTGPEAGLPYGANKDGIIWVATEGALNTPKDHIGTRNPANNAAIVLQLPQGTTLPKGFYAEGSRGGSQASSRSSSRSRNSSRNSTPGSSRGTSPARMAGNGGDAALALLLLDRLNQLESKMSGKGQQQQGQTVTKKSAAEASKKPRQKRTATKAYNVTQAFGRRGPEQTQGNFGDQELIRQGTDYKHWPQIAQFAPSASAFFGMSRIGIEVTPSGTWLTYTGAIKLDDKDPNFKDQVILLNKHIDAYKTFPPTEPKKDKKKKADETQALPQRQKKQQTVTLLPAADLDDFSKQLQQSMSSADSTQA

SEQ ID NO: 15663 - protein, 419 aa, Artificial Sequence
  SARS-CoV-2__MT371038.1__nucleocapsid protein (N)
MSDNGPQNQRNAPRITFGGLSDSTGSNQNGERSGARSKQRRPQGLPNNTASWFTALTQHGKEDLKFPRGQGVPINTNSSPDDQIGYYRRATRRIRGGDGKMKDLSPRWYFYYLGTGPEAGLPYGANKDGIIWVATEGALNTPKDHIGTRNPANNAAIVLQLPQGTTLPKGFYAEGSRGGSQASSRSSSRSRSSSRNSTPGSSRGTSPARMAGNGGDAALALLLLDRLNQLESKMSGKGQQQQGQTVTKKSAAEASKKPRQKRTATKAYNVTQAFGRRGPEQTQGNFGDQELIRQGTDYKHWPQIAQFAPSASAFFGMSRIGMEVTPSGTWLTYTGAIKLDDKDPNFKDQVILLNKHIDAYKTFPPTEPKKDKKKKADETQALPQRQKKQQTVTLLPAADLDDFSKQLQQSMSSADSTQA

SEQ ID NO: 15664 - protein, 419 aa, Artificial Sequence
  SARS-CoV-2__MT358690.1__nucleocapsid protein (N)
MSDNGPQNQRNAPRITFGGPSDSTGSNQNGERSGARSKQRRPQGLPNNTASWFTALTQHGKEDLKFPRGQGVPINTNSSPDDQIGYYRRATRRIRGGDGKMKDLSPRWYFYYLGTGPEAGLPYGANKDGIIWVATEGALNTPKDHIGTRNPANNAAIVLQLPQGTTLPKGFYAEGSRGGSQASSRSSSRSRNSSRNSTPGSSRGTSPGRMAGNGGDAALALLLLDRLNQLESKMSGKCQQQQGQTVAKKSAAEASKKPRQKRTATKAYNVTQAFGRRGPEQTQGNFGDQELIRQGTDYKHWPQIAQFAPSASAFFGMSRIGMEVTPSGTWLTYTGAIKLDDKDPNFKDQVILLNKHIDAYKTFPPTEPKKDKKKKADETQALPQRQKKQQTVTLLPAADLDDFSKQLQQSMSSADSTQA

SEQ ID NO: 15665 - protein, 419 aa, Artificial Sequence
  SARS-CoV-2__MT358737.1__nucleocapsid protein (N)
MSDNGPQNQRNAPRITFGGPSDSTGSNQNGERSGARSKQRRPQGLPNNTASWFTALTQHGKEDLKFPRGQGVPINTNSSPDDQIGYYRRATRRIRGGDGKMKDLSPRWYFYYLGTGPEAGLPYGANKDGIIWVATEGALNTPKDHIGTRNPANNAAIVLQLPQGTTLPKGFYAEGSRGGSQASSRSSSRSRNSSRNSTPGSSRGTSPARMAGNGGDAALALLLLDRLNQLESKMSGKGQQQQGQTVTKKSAAEASKKPRQKRTATKAYNVTQAFGRRGPEQTQGNFGDQELIRQGTDYKHWPQIAQFAPSASAFFGMSRIGMEVTPSGTWLTYTGAIKLGDKDPNFKDQVILLNKHIDAYKTFPPTEPKKDKKKKADETQALPQRQKKQQTVTLLPAADLDDFSKQLQQSMSSADSTQA

SEQ ID NO: 15666 - protein, 419 aa, Artificial Sequence
  SARS-CoV-2__MT334533.1__nucleocapsid protein (N)
MSDNGPQNQRNAPRITFGGPSDSTGSNQNGERSGARSKQRRPQGLPNNTASWFTALTQHGKEDLKFPRGQGVPINTNSSPDDQIGYYRRATRRIRGGDGKMKDLSPRWYFYYLGTGPEAGLPYGANKDGIIWVATEGALNTPKDHIGTRNPSNNAAIVLQLPQGTTLPKGFYAEGSRGGSQASSRSSSRSRNSSRNSTPGSSRGTSPARMAGNGGDAALALLLLDRLNQLESKMSGKGQQQQGQTVTKKSAAEASKKPRQKRTATKAYNVTQAFGRRGPEQTQGNFGDQELIRQGTDYKHWPQIAQFAPSASAFFGMSRIGMEVTPSGTWLTYTGAIKLDDKDPNFKDQVILLNKHIDAYKTFPPTEPKKDKKKKADETQALPQRQKKQQTVTLLPAADLDDFSKQLQQSMSSADSTQA

SEQ ID NO: 15667 - protein, 419 aa, Artificial Sequence
  SARS-CoV-2__MT293159.1__nucleocapsid protein (N)
MSDNGPQNQRNAPRITFGGPSDSTGSNQNGERSGARSKQRRPQGLPNNTASWFTALTQHGKEDLKFPRGQGVPINTNSSPDDQIGYYRRATRRIRGGDGKMKDLSPRWYFYYLGTGPEAGLPYGANKDGIIWVATEGALNTPKDHIGTRNPANNAAIVLQLPQGTTLPKGFYAEGSRGGSQASSRSSSRSRNSSRNSTPGSSRGTSPATMAGNGGDAALALLLLDRLNQLESKMSGKGQQQQGQTVTKKSAAEASKKPRQKRTATKAYNVTQAFGRRGPEQTQGNFGDQELIRQGTDYKHWPQIAQFAPSASAFFGMSRIGMEVTPSGTWLTYTGAIKLDDKDPNFKDQVILLNKHIDAYKTFPPTEPKKDKKKKADETQALPQRQKKQQTVTLLPAADLDDFSKQLQQSMSSADSTQA

SEQ ID NO: 15668 - protein, 419 aa, Artificial Sequence
  SARS-CoV-2__MT293178.1__nucleocapsid protein (N)
MSDNGTQNQRNAPRITFGGPSDTTGSNQNGERSGARSKQRRPQGLPNNTASWFTALTQHGKEDLKFPRGQGVPINTNSSPDDQIGYYRRATRRIRGGDGKMKDLSPRWYFYYLGTGPEAGLPYGANKDGIIWVATEGALNTPKDHIGTRNPANNAAIVLQLPQGTTLPKGFYAEGSRGGSQASSRSSSRSRNSSRNSTPGSSRGTSPARMAGNGGDAALALLLLDRLNQLESKMSGKGQQQQGQTVTKKSAAEASKKPRQKRTATKAYNVTQAFGRRGPEQTQGNFGDQELIRQGTDYKHWPQIAQFAPSASAFFGMSRIGMEVTPSGTWLTYTGAIKLDDKDPNFKDQVILLNKHIDAYKTFPPTEPKKDKKKKADETQALPQRQKKQQTVTLLPAADLDDFSKQLQQSMSSADSTQA

SEQ ID NO: 15669 - protein, 419 aa, Artificial Sequence
  SARS-CoV-2__MT263411.1__nucleocapsid protein (N)
MSDNGPQNQRNAPRITFGGPSDSTGSNQNGERSGARSKQRRPQGLPNNTASWFTALTQHGKEDLKFPRGQGVPINTNSSPDDQIGYYRRATRRIRGGDGKMKDLSPRWYFYYLGTGPEAGLPYGANKDGIIWVATEGALNTPKDHIGTRNPANNAAIVLQLPQGTTLPKGFYAEGSRGGSQASSRSSSRSRNSSRNSTPGSSRGTSPARMAGNGGDAALALLLLDRLNQLETKMSGKGQQQQGQTVTKKSAAEASKKPRQKRTATKAYNVTQAFGRRGPEQTQGNFGDQELIRQGTDYKHWPQIAQFAPSASAFFGMSRIGMEVTPSGTWLTYTGAIKLDDKDPNFKDQVILLNKHIDAYKTFPPTEPKKDKKKKADETQALPQRQKKQQTVTLLPAADLDDFSKQLQQSMSSADSTQA

SEQ ID NO: 15670 - protein, 419 aa, Artificial Sequence
  SARS-CoV-2__MT259237.1__nucleocapsid protein (N)
MSYNGPQNQRNAPRITFGGPSDSTGSNQNGERSGARSKQRRPQGLPNNTASWFTALTQHGKEDLKFPRGQGVPINTNSSPDDQIGYYRRATRRIRGGDGKMKDLSPRWYFYYLGTGPEAGLPYGANKDGIIWVATEGALNTPKDHIGTRNPANNAAIVLQLPQGTTLPKGFYAEGSRGGSQASSRSSSRSRNSSRNSTPGSSRGTSPARMAGNGGDAALALLLLDRLNQLESKMSGKGQQQQGQTVTKKSAAEASKKPRQKRTATKAYNVTQAFGRRGPEQTQGNFGDQELIRQGTDYKHWPQIAQFAPSASAFFGMSRIGMEVTPSGTWLTYTGAIKLDDKDPNFKDQVILLNKHIDAYKTFPPTEPKKDKKKKADETQALPQRQKKQQTVTLLPAADLDDFSKQLQQSMSSADSTQA

SEQ ID NO: 15671 - protein, 419 aa, Artificial Sequence
  SARS-CoV-2__MT259269.1__nucleocapsid protein (N)
MSDDGPQNQRNAPRITFGGPSDSTGSNQNGERSGARSKQRRPQGLPNNTASWFTALTQHGKEDLKFPRGQGVPINTNSSPDDQIGYYRRATRRIRGGDGKMKDLSPRWYFYYLGTGPEAGLPYGANKDGIIWVATEGALNTPKDHIGTRNPANNAAIVLQLPQGTTLPKGFYAEGSRGGSQASSRSSSRSRNSSRNSTPGSSRGTSPARMAGNGGDAALALLLLDRLNQLESKMSGKGQQQQGQTVTKKSAAEASKKPRQKRTATKAYNVTQAFGRRGPEQTQGNFGDQELIRQGTDYKHWPQIAQFAPSASAFFGMSRIGMEVTPSGTWLTYTGAIKLDDKDPNFKDQVILLNKHIDAYKTFPPTEPKKDKKKKADETQALPQRQKKQQTVTLLPAADLDDFSKQLQQSMSSADSTQA

SEQ ID NO: 15672 - protein, 419 aa, Artificial Sequence
  SARS-CoV-2__MT259274.1__nucleocapsid protein (N)
MSDNGPQNQRNAPRITFGGPSDSTGSNQNGERSGTRSKQRRPQGLPNNTASWFTALTQHGKEDLKFPRGQGVPINTNSSPDDQIGYYRRATRRIRGGDGKMKDLSPRWYFYYLGTGPEAGLPYGANKDGIIWVATEGALNTPKDHIGTRNPANNAAIVLQLPQGTTLPKGFYAEGSRGGSQASSRSSSRSRNSSRNSTPGSSRGTSPARMAGNGGDAALALLLLDRLNQLESKMSGKGQQQQGQTVTKKSAAEASKKPRQKRTATKAYNVTQAFGRRGPEQTQGNFGDQELIRQGTDYKHWPQIAQFAPSASAFFGMSRIGMEVTPSGTWLTYTGAIKLDDKDPNFKDQVILLNKHIDAYKTFPPTEPKKDKKKKADETQALPQRQKKQQTVTLLPAADLDDFSKQLQQSMSSADSTQA

SEQ ID NO: 15673 - protein, 419 aa, Artificial Sequence
  SARS-CoV-2__MT159718.2__nucleocapsid protein (N)
MSDNGPQNQRNAPRITFGGPSDSTGSNQNGERSGARSKQRRPQGLSNNTASWFTALTQHGKEDLKFPRGQGVPINTNSSPDDQIGYYRRATRRIRGGDGKMKDLSPRWYFYYLGTGPEAGLPYGANKDGIIWVATEGALNTPKDHIGTRNPANNAAIVLQLPQGTTLPKGFYAEGSRGGSQASSRSSSRSRNSSRNSTPGSSRGTSPARMAGNGGDAALALLLLDRLNQLESKMSGKGQQQQGQTVTKKSAAEASKKPRQKRTATKAYNVTQAFGRRGPEQTQGNFGDQELIRQGTDYKHWPQIAQFAPSASAFFGMSRIGMEVTPSGTWLTYTGAIKLDDKDPNFKDQVILLNKHIDAYKTFPPTEPKKDKKKKADETQALPQRQKKQQTVTLLPAADLDDFSKQLQQSMSSADSTQA

SEQ ID NO: 15674 - protein, 419 aa, Artificial Sequence
  SARS-CoV-2__MT135043.1__nucleocapsid protein (N)
MSDNGPQNQRNAPRITFGGPSDSTGSNQNGERSGARSKQRRPQGLPNNTASWFTALTQHGKEDLKFPRGQGVPINTNSSPDDQIGYYRRATRRIRGGDGKMKDLSPRWYFYYLGTGPEAGLPYGANKDGIIWVATEGALNTPKDHIGTRNPANNAAIVLQLPQGTTLPKGFYAEGSRGGSQASSRSSSRSRNSSRNSTPGSSRGTSPARMAGNGGDAALALLLLDRLNQLESKMSGKGQQQQGQTVTKKSAAEASKKPRQKRTATKAYNVTQAFGRRGPEQTQGNFGDQELIRQGTDYKHWPQIAQFAPSASAFFGMSRIGMEVTPSGTWLTYTGAIKLDDKVPNFKDQVILLNKHIDAYKTFPPTEPKKDKKKKADETQALPQRQKKQQTVTLLPAADLDDFSKQLQQSMSSADSTQA

SEQ ID NO: 15675 - protein, 82 aa, Artificial Sequence
  MERS-CoV/MERS-CoV-Jeddah-human-1__KF958702.1__envelope protein (E)
MLPFVQERIGLFIVNFFIFTVVCAITLLVCMAFLTATRLCVQCMTGFNTLLVQPALYLYNTGRSVYVKFQDSKPPLPPDEWV

SEQ ID NO: 15676 - protein, 82 aa, Artificial Sequence; identical to SEQ ID NO: 15675
  MERS-CoV/Al-Hasa_4_2013__KF186564.1__envelope protein (E)

SEQ ID NO: 15677 - protein, 82 aa, Artificial Sequence; identical to SEQ ID NO: 15675
  MERS-CoV/Riyadh_14_2013__KJ156934.1__envelope protein (E)

SEQ ID NO: 15678 - protein, 82 aa, Artificial Sequence; identical to SEQ ID NO: 15675
  MERS-CoV/England 1__NC_038294.1__envelope protein (E)

SEQ ID NO: 15679 - protein, 76 aa, Artificial Sequence
  SARS-CoV/Tor2__NC_004718.3__envelope protein (E)
MYSFVSEETGTLIVNSVLLFLAFVVFLLVTLAILTALRLCAYCCNIVNVSLVKPTVYVYSRVKNLNSSEGVPDLLV

SEQ ID NO: 15680 - protein, 84 aa, Artificial Sequence
  HCoV/OC43__NC_006213.1__envelope protein (E)
MFMADAYLADTVWYVGQIIFIVAICLLVTIVVVAFLATFKLCIQLCGMCNTLVLSPSIYVFNRGRQFYEFYNDVKPPVLDVDDV

SEQ ID NO: 15681 - protein, 82 aa, Artificial Sequence
  HCoV/HKU1__NC_006577.2__envelope protein (E)
MVDLFFNDTAWYIGQILVLVLFCLISLIFVVAFLATIKLCMQLCGFCNFFIISPSAYVYKRGMQLYKSYSEQVIPPTSDYLI

SEQ ID NO: 15682 - protein, 77 aa, Artificial Sequence
  HCoV/229E/BN1/GER/2015__KU291448.1__envelope protein (E)
MFLKLVDDHALIVNVLIWCVVLIVILLVCITIIKLIKLCFTCHMFCNRTVYGPIKNVYHIYQSYMHIDPFPKRVIDF

SEQ ID NO: 15683 - protein, 77 aa, Artificial Sequence
  HCoV/NL63/RPTEC/2004__JX504050.1__envelope protein (E)
MFLRLIDDNGIVLNSILWLLVMIFFFVLAMTFIKLIQLCFTCHYFFSRTLYQPVYKIFLAYQDYMQIAPVPAEVLNV

SEQ ID NO: 15684 - protein, 76 aa, Artificial Sequence; identical to SEQ ID NO: 15679
  Bat SARS-like CoV/WIV1__KF367457.1__envelope protein (E)

SEQ ID NO: 15685 - protein, 79 aa, Artificial Sequence
  BatCoV/HKU9-1 BF_005I__NC_009021.1__envelope protein (E)
MYDIVGTNNSILIANVLVLIIICLLVVIVGCALLLILQFVFGVCGFVFKFVCKPTILVYNKFRNESLLNEREELLCDNV

SEQ ID NO: 15686 - protein, 83 aa, Artificial Sequence
  PDCoV/Swine/Thailand/S5011/2015__KU051641.1__envelope protein (E)
MVVDDWAVTIPGQYIIAILVVICIGVALLFINTCLACVKLFYKCYLGAAYLVRPIIVYYSKPNPVPEDEFVKVHQFPRNTHYV

SEQ ID NO: 15687 - protein, 76 aa, Artificial Sequence
  PEDV/NPL-PEDv/2013/P10__KJ778616.1__envelope protein (E)
MLQLVNDNGLVVNVILWLFVLFFLLIISITFVQLVNLCFTCHRLCNSAVYTPIGRLYRVYKSYMQIDPLPSTVIDV

SEQ ID NO: 15688 - protein, 83 aa, Artificial Sequence
  MHV/A59__NC_048217.1__envelope protein (E)
MFNLFLTDTVWYVGQIIFIFAVCLMVTIIVVAFLASIKLCIQLCGLCNTLVLSPSIYLYDRSKQLYKYYNEEMRLPLLEVDDI

SEQ ID NO: 15689 - protein, 75 aa, Artificial Sequence
  SARS-CoV-2/Wuhan-Hu-1__NC_045512.2/MN908947.2/EPI_ISL_402128__env elope protein (E)
MYSFVSEETGTLIVNSVLLFLAFVVFLLVTLAILTALRLCAYCCNIVNVSLVKPSFYVYSRVKNLNSSRVPDLLV

SEQ ID NO: 15690 - protein, 75 aa, Artificial Sequence
  SARS-CoV-2__MT919790.1__envelope protein (E)
MYSFVSEETGTLIVNSVLLFFAFVVFLLVTLAILTALRLCAYCCNIVNVSLVKPSFYVYSRVKNLNSSRVPDLLV

SEQ ID NO: 15691 - protein, 75 aa, Artificial Sequence
  SARS-CoV-2__MT907517.1__envelope protein (E)
MYSFVSEETGTLIVNSVLLFLAFVVFLLVTLAILTALRLCAYCCNIVNVSLVKPSFYVYSRVKDLNSSRVPDLLV

SEQ ID NO: 15692 - protein, 75 aa, Artificial Sequence
  SARS-CoV-2__MT905416.1__envelope protein (E)
MYSFFSEETGTLIVNSVLLFLAFVVFLLVTLAILTALRLCAYCCNIVNVSLVKPSFYVYSRVKNLNSSRVPDLLV

SEQ ID NO: 15693 - protein, 75 aa, Artificial Sequence
  SARS-CoV-2__MT873051.1__envelope protein (E)
MYSFVSEETGTLIVNSVLLFLAFVVFLLVTLAILTALRLCAYCCNIVNVSLVKPSFYVYSRVKNLNSSRVLDLLV

SEQ ID NO: 15694 - protein, 75 aa, Artificial Sequence
  SARS-CoV-2__MT873111.1__envelope protein (E)
MYSFVSEETGTLIVNSVLLFLAFVVFLLVTLAILTALRLCAYCCNIVNVSLVKPSFYVYSRVKNLNSFRVPDLLV

SEQ ID NO: 15695 - protein, 75 aa, Artificial Sequence
  SARS-CoV-2__MT873335.1__envelope protein (E)
MYSFVSEETGTLIVNSVLLFLAFVVFLLVTLAILTALRLCAYCCNIVNVSFVKPSFYVYSRVKNLNSSRVPDLLV

SEQ ID NO: 15696 - protein, 75 aa, Artificial Sequence
  SARS-CoV-2__MT873370.1__envelope protein (E)
MYSFVSEETGTLIVNSVLLFLAFVVFLLVTLAILTALRLCAYCCNIVNVSLVKPSFYVYSRFKNLNSSRVPDLLV

SEQ ID NO: 15697 - protein, 75 aa, Artificial Sequence
  SARS-CoV-2__MT872498.1__envelope protein (E)
MYSFVSEETGTLIVNSVLFFLAFVVFLLVTLAILTALRLCAYCCNIVNVSLVKPSFYVYSRFKNLNSSRVPDLLV

SEQ ID NO: 15698 - protein, 75 aa, Artificial Sequence
  SARS-CoV-2__MT846585.1__envelope protein (E)
MYSFISEETGTLIVNSVLLFLAFVVFLLVTLAILTALRLCAYCCNIVNVSLVKPSFYVYSRVKNLNSSRVPDLLV

SEQ ID NO: 15699 - protein, 75 aa, Artificial Sequence
  SARS-CoV-2__MT835383.1__envelope protein (E)
MYSFASEETGTLIVNSVLLFLAFVVFLLVTLAILTALRLCAYCCNIVNVSLVKPSFYVYSRVKNLNSSRVPDLLV

SEQ ID NO: 15700 - protein, 75 aa, Artificial Sequence
  SARS-CoV-2__MT833965.1__envelope protein (E)
MYSFVSEETGTLIVNSVLLFLAFVVFLLVILAILTALRLCAYCCNIVNVSLVKPSFYVYSRVKNLNSSRVPDLLV

SEQ ID NO: 15701 - protein, 75 aa, Artificial Sequence
  SARS-CoV-2__MT834224.1__envelope protein (E)
MYSFVSEETGTLIVNSVLLFLAFVVFLLVTLAILTALRLCAYCCNIVNVSLVKPSFYVYSRVKNLNSSRVSDLLV

SEQ ID NO: 15702 - protein, 75 aa, Artificial Sequence
  SARS-CoV-2__MT704816.1__envelope protein (E)
MYSFVSEETGTLIVNSVLLFLAFVVFLLVTLAILTALRLCAYFCNIVNVSLVKPSFYVYSRVKNLNSSRVPDLLV

SEQ ID NO: 15703 - protein, 75 aa, Artificial Sequence
  SARS-CoV-2__MT827831.1__envelope protein (E)
MYSFVSEEIGTLIVNSVLLFLAFVVFLLVTLAILTALRLCAYCCNIVNVSLVKPSFYVYSRVKNLNSSRVPDLLV

SEQ ID NO: 15704 - protein, 75 aa, Artificial Sequence
  SARS-CoV-2__MT825091.1__envelope protein (E)
MYSFVSEETGTLIVNSVLLFLAFVVFLLVTLATLTALRLCAYCCNIVNVSLVKPSFYVYSRVKNLNSSRVPDLLV

SEQ ID NO: 15705 - protein, 75 aa, Artificial Sequence
  SARS-CoV-2__MT821604.1__envelope protein (E)
MYSFVSEETGTLIVNSVLLFLAFVVFLLVTLAILTALRLCVYCCNIVNVSLVKPSFYVYSRVKNLNSSRVPDLLV

SEQ ID NO: 15706 - protein, 75 aa, Artificial Sequence
  SARS-CoV-2__MT810623.1__envelope protein (E)
MYSFVSEDTGTLIVNSVLLFLAFVVFLLVTLAILTALRLCAYCCNIVNVSLVKPSFYVYSRVKNLNSSRVPDLLV

SEQ ID NO: 15707 - protein, 75 aa, Artificial Sequence
  SARS-CoV-2__MT811741.1__envelope protein (E)
MYSFVSEETGTLIVNSVLLFLAFVVLLLVTLAILTALRLCAYCCNIVNVSLVKPSFYVYSRVKNLNSSRVPDLLV

SEQ ID NO: 15708 - protein, 75 aa, Artificial Sequence
  SARS-CoV-2__MT666099.1__envelope protein (E)
MYSFVSEETGTLIVNSVLLLLAFVVFLLVTLAILTALRLCAYCCNIVNVSLVKPSFYVYSRVKNLNSSRVPDLLV

SEQ ID NO: 15709 - protein, 75 aa, Artificial Sequence
  SARS-CoV-2__MT627619.1__envelope protein (E)
MYSFVSEETGTLIVNSVLLFLAFVVFLLVTLAILTALRLCSYCCNIVNVSLVKPSFYVYSRVKNLNSSRVPDLLV

SEQ ID NO: 15710 - protein, 75 aa, Artificial Sequence
  SARS-CoV-2__MT630422.1__envelope protein (E)
MYSFVSEETGTLIVNSVLFFLAFVVFLLVTLAILTALRLCAYCCNIVNVSLVKPSFYVYSRVKNLNSSRVPDLLV

SEQ ID NO: 15711 - protein, 75 aa, Artificial Sequence
  SARS-CoV-2__MT632491.1__envelope protein (E)
MYSFVSQETGTLIVNSVLLFLAFVVFLLVTLAILTALRLCAYCCNIVNVSLVKPSFYVYSRVKNLNSSRVPDLLV

SEQ ID NO: 15712 - protein, 75 aa, Artificial Sequence
  SARS-CoV-2__MT632864.1__envelope protein (E)
MYSFVSEETGTLIVNSVLLFLAFVVFLLVTLAILTALRLCAYCCNIVNVSLVKPFFYVYSRVKNLNSSRVPDLLV

SEQ ID NO: 15713 - protein, 75 aa, Artificial Sequence
  SARS-CoV-2__MT598173.1__envelope protein (E)
MYSFVSEKTGTLIVNSVLLFLAFVVFLLVTLAILTALRLCAYCCNIVNVSLVKPSFYVYSRVKNLNSSRVPDLLV

SEQ ID NO: 15714 - protein, 75 aa, Artificial Sequence
  SARS-CoV-2__MT568636.1__envelope protein (E)
MYSFVSEETGTLIVNSVLLFLAFVVFLLVTLAILTALRLCAYCCNIVNVSLVKPSFYVYSRVKNLNSSRVPYLLV

SEQ ID NO: 15715 - protein, 75 aa, Artificial Sequence
  SARS-CoV-2__MT568638.1__envelope protein (E)
MYSFVSEETGTLIVNSVLLFLAFVVFLLVTLAILTALRLCAYCCNIVNVSLVKPSFYVYSRVKNLNSCRVPDLLV

SEQ ID NO: 15716 - protein, 75 aa, Artificial Sequence
  SARS-CoV-2__MT459833.1__envelope protein (E)
MYSFVSEETGTLIVNSVLLFLAFVVFLLVTLAILTALRMCAYCCNIVNVSLVKPSFYVYSRVKNLNSSRVPDLLV

SEQ ID NO: 15717 - protein, 75 aa, Artificial Sequence
  SARS-CoV-2__MT451171.1__envelope protein (E)
MYSFVSEETGTLIVNSVLLFLAFVVFLLVTLAILTALRLCAYCCNIVNVSLVKPSFYVYSRVKNLNSSRVPDFLV

SEQ ID NO: 15718 - protein, 75 aa, Artificial Sequence
  SARS-CoV-2__MT350246.1__envelope protein (E)
MYSFVSEETGTLIVNSVLLFLAFVVFLLVTLAILTVLRLCAYCCNIVNVSLVKPSFYVYSRVKNLNSSRVPDLLV

SEQ ID NO: 15719 - protein, 75 aa, Artificial Sequence
  SARS-CoV-2__MT039890.1__envelope protein (E)
MYSFVSEETGTLIVNSVLLFLAFVVFLLVTLAILTAHRLCAYCCNIVNVSLVKPSFYVYSRVKNLNSSRVPDLLV

SEQ ID NO: 15720 - protein, 1888 aa, Artificial Sequence
  MERS-CoV/MERS-CoV-Jeddah-human-1__KF958702.1__non-structural protein 3 (NSP3)
MAPVKKVAFGGDQVHEVAAVRSVTVEYNIHAVLDTLLASSSLRTFVVDKSLSIEEFADVVKEQVSDLLVKLLRGMPIPDFDLDDFIDAPCYCFNAEGDASWSSTMIFSLHPVECDEECSEVEASDLEEGESECISETSTEQVDVSHEISDDEWAAAVDEAFPLDEAEDVTESVQEEAQPVEVPVEDIVQVVIADTLQETPVVSDTVEVPPQVVKLPSEPQTIQPEVKEVAPVYEADTEQTQSVTVKPKRLRKKRNVDPLSNFEHKVITECVTIVLGDAIQVAKCYGESVLVNAANTHLKHGGGIAGAINAASKGAVQKESDEYILAKGPLQVGDSVLLQGHSLAKNILHVVGPDARAKQDVSLLSKCYKAMNAYPLVVTPLVSAGIFGVKPAVSFDYLIREAKTRVLVVVNSQDVYKSLTIVDIPQSLTFSYDGLRGAIRKAKDYGFTVFVCTDNSANTKVLRNKGVDYTKKFLTVDGVQYYCYTSKDTLDDILQQANKSVGIISMPLGYVSHGLDLIQAGSVVRRVNVPYVCLLANKEQEAILMSEDVKLNPSEDFIKHVRTNGGYNSWHLVEGELLVQDLRLNKLLHWSDQTICYKDSVFYVVKNSTAFPFETLSACRAYLDSRTTQQLTIEVLVTVDGVNFRTVVLNNKNTYRSQLGCVFFNGADISDTIPDEKQNGHSLYLADNLTADETKALKELYGPVDPTFLHRFYSLKAAVHEWKMVVCDKVRSLKLSDNNCYLNAVIMTLDLLKDIKFVIPALQHAFMKHKGGDSTDFIALIMAYGNCTFGAPDDASRLLHTVLAKAELCCSARMVWREWCNVCGIKDVVLQGLKACCYVGVQTVEDLRARMTYVCQCGGERHRQIVEHTTPWLLLSGTPNEKLVTTSTAPDFVAFNVFQGIETAVGHYVHARLKGGLILKFDSGTVSKTSDWKCKVTDVLFPGQKYSSDCNVVRYSLDGNFRTEVDPDLSAFYVKDGKYFTSEPPVTYSPATILAGSVYTNSCLVSSDGQPGGDAISLSFNNLLGFDSSKPVIKKYTYSFLPKEDGDVLLAEFDTYDPIYKNGAMYKGKPILWVNKASYDTNLNKFNRASLRQIFDVAPIELENKFTPLSVESTPVEPPTVDVVALQQEMTIVKCKGLNKPFVKDNVSFVADDSGTPVVEYLSKEDLHTLYVDPKYQVIVLKDNVLSFMLRLHTVESGDINVVAASGSLTRKVKLLFRASFYFKEFATRTFTATTAVGSCIKSVVRHLGVTKGILTGCFSFVKMLFMLPLAYFSDSKLGTTEVKVSALKTAGVVTGNVVKQCCTAAVDLSMDKLRRVDWKSTLRLLLMLCTTMVLLSSVYHLYVFNQVLSSDVMFEDAQGLKKFYKEVRAYLGISSACDGLASAYRANSFDVPTFCANRSAMCNWCLISQDSITHYPALKMVQTHLSHYVLNIDWLWFAFETGLAYMLYTSAFNWLLLAGTLHYFFAQTSIFVDWRSYNYAVSSAFWLFTHIPMAGLVRMYNLLACLWLLRKFYQHVINGCKDTACLLCYKRNRLTRVEASTVVCGGKRTFYITANGGISFCRRHNWNCVDCDTAGVGNTFICEEVANDLTTALRRPINATDRSHYYVDSVTVKETVVQFNYRRDGQPFYERFPLCAFTNLDKLKFKEVCKTTTGIPEYNFIIYDSSDRGQESLARSACVYYSQVLCKSILLVDSSLVTSVGDSSEIATKMFDSFVNSFVSLYNVTRDKLEKLISTARDGVRRGDNFHSVLTTFIDAARGPAGVESDVETNEIVDSVQYAHKHDIQITNESYNNYVPSYVKPDSVSTSDLGSLIDCNAASVNQIVLRNSNGACIWNAAAYMKLSDALKRQIRIACRKCNLAFRLTTSKLRANDNILSVRFTANKIVGG

SEQ ID NO: 15721 - protein, 1888 aa, Artificial Sequence
  MERS-CoV/Al-Hasa_4_2013__KF186564.1__non-structural protein 3 (NSP3)
MAPVKKVAFGGDQVHEVAAVRSVTVEYNIHAVLDTLLASSSLRTFVVDKSLSIEEFADVVKEQVSDLLVKLLRGMPIPDFDLDDFIDAPCYCFNAEGDASWSSTMIFSLHPVECDEECSEVEASDLEEGESECISETSTEQVDVSHEVSDDEWAAAVDEAFPLDEAEDVTESVQEEAQPVEVPVEDIAQVVIADTLQETPVVSDTVEVPPQVVKLPSEPQTIQPEVKEVAPVYEADTEQTQSVTVKPKRLRKKRNVDPLSNFEHKVITECVTIVLGDAIQVAKCYGESVLVNAANTHLKHGGGIAGAINAASKGAVQKESDEYILAKGPLQVGDSVLLQGHSLAKNILHVVGPDARAKQDVSLLSKCYKAMNAYPLVVTPLVSAGIFGVKPAVSFDYLIREAKTRVLVVVNSQDVYKSLTIVDIPQSLTFSYDGLRGAIRKAKDYGFTVFVCTDNSANTKVLRNKGVDYTKKFLTVDGVQYYCYTSKDTLDDILQQANKSVGIISMPLGYVSHGLDLIQAGSVVRRVNVPYVCLLANKEQEAILMSEDVKLNPSEDFIKHVRTNGGYNSWHLVEGELLVQDLRLNKLLHWSDQTICYKDSVFYVVKNSTAFPFETLSACRAYLDSRTTQQLTIEVLVTVDGVNFRTVVLNNKNTYRSQLGCVFFNGADISDTIPDEKQNGHSLYLADNLTADETKALKELYGPVDPTFLHRFYSLKAAVHKWKMVVCDKVRSLKLSDNNCYLNAVIMTLDLLKDIKFVIPALQHAFMKHKGGDSTDFIALIMAYGNCTFGSPDDASRLLHTVLAKAELCCSARMVWREWCNVCGIKDVVLQGLKACCYVGVQTVEDLRARMTYVCQCGGERHRQIVEHTTPWLLLSGTPNEKLVTTSTAPDFVAFNVFQGIETAVGHYVHARLKGGLILKFDSGTVSKTSDWKCKVTDVLFPGQKYSSDCNVVRYSLDGNFRTEVDPDLSAFYVKDGKYFTSEPPVTYSPATILAGSVYTNSCLVSSDGQPGGDAISLSFNNLLGFDSSKPVTKKYTYSFLPKEDGDVLLAEFDTYDPIYKNGAMYKGKPILWVNKASYDTNLNKFNRASLRQIFDVAPIELENKFTPLSVESTPVEPPTVDVVALQQEMTIVKCKGLNKPFVKDNVSFVADDSGTPVVEYLSKEDLHTLYVDPKYQVIVLKDNVLSSMLRLHTVESGDINVVAASGSLTRKVKLLFRASFYFKEFATRTFTATTAVGSCIKSVVRHLGVTKGILTGCFSFVKMLFMLPLAYFSDSKLGTTEVKVSALKTAGVVTGNVVKQCCTAAVDLSMDKLRRVDWKSTLRLLLMLCTTMVLLSSVYHLYVFNQVLSSDVMFEDAQGLKKFYKEVRAYLGISSACDGLASAYRANSFDVPTFCANRSAMCNWCLISQDSITHYPALKMVQTHLSHYVLNIDWLWFAFETGLAYMLYTSAFNWLLLAGTLHYFFAQTSIFVDWRSYNYAVSSAFWLFTHIPMAGLVRMYNLLACLWLLRKFYQHVINGCKDTACLLCYKRNRLTRVEASTVVCGGKRTFYITANGGISFCRRHNWNCVDCDTAGVGNTFICEEVANDLTTALRRPINATDRSHYYVDSVTVKETVVQFNYRRDGQPFYERFPLCAFTNLDKLKFKEVCKTTTGIPEYNFIIYDSSDRGQESLARSACVYYSQVLCKSILLVDSSLITSVGDSSEIATKMFDSFVNSFVSLYNVTRDKLEKLISTARDGVRRGDNFHSVLTTFIDAARGPAGVESDVETNEIVDSVQYAHKHDIQITNESYNNYVPSYVKPDSVSTSDLGSLIDCNAASVNQIVLRNSNGACIWNAAAYMKLSDALKRQIRIACRKCNLAFRLTTSKLRANDNILSVRFTANKIVGG

SEQ ID NO: 15722 - protein, 1888 aa, Artificial Sequence
  MERS-CoV/Riyadh_14_2013__KJ156934.1__non-structural protein 3 (NSP3)
MAPVKKVAFGGDQVHEVAAVRSVTVEYNIHAVLDTLLASSSLRTFVVDKSLSIEEFADVVKEQVSDLLVKLLRGMPIPDFDLDDFIDAPCYCFNAEGDASWYSTMIFSLHPVECDEECSEVEASDLEEGESECISETSTEQVDVSHEVSDDEWAAAVDEAFPLDEAEDVTESVQEEAQPVEVPVEDIAQVVIADTLQETPVVSDTVEVPPQVVKLPSEPQTIQPEVKEVAPVYEADTEQTQSVTVKPKRLRKKRNVDPLSNFEHKVITECVTIVLGDAIQVAKCYGESVLVNAANTHLKHGGGIAGAINAASKGAVQKESDEYILAKGPLQVGDSVLLQGHSLAKNILHVVGPDARAKQDVSLLSKCYKAMNAYPLVVTPLVSAGIFGVKPAVSFDYLIREAKTRVLVVVNSQDVYKSLTIVDIPQSLTFSYDGLRGAIRKAKDYGFTVFVCTDNSANTKVLRNKGVDYTKKFLTVDGVQYYCYTSKDTLDDILQQANKSVGIISMPLGYVSHGLDLIQAGSVVRRVNVPYVCLLANKEQEAILMSEDVKLNPSEDFIKHVRTNGGYNSWHLVEGELLVQDLRLNKLLHWSDQTICYKDSVFYVVKNSTAFPFETLSACRAYLDSRTTQQLTIEVLVTVDGVNFRTVVLNNKNTYRSQLGCVFFNGADISDTIPDEKQNGHSLYLADNLTADETKALKELYGPVDPTFLHRFYSLKAAVHKWKMVVCDKVRSLKLSDNNCYLNAVIMTLDLLKDIKFVIPALQHAFMKHKGGDSTDFIALIMAYGNCTFGAPDDASRLLHTVLAKAELCCSARMVWREWCNVCGIKDVVLQGLKACCYVGVQTVEDLRARMTYVCQCGGERHRQIVEHTTPWLLLSGTPNEKLVTTSTAPDFVAFNVFQGIETAVGHYVHARLKGGLILKFDSGTVSKTSDWKCKVTDVLFPGQKYSSDCNVVRYSLDGNFRTEVDPDLSAFYVKDGKYFTSEPPVTYSPATILAGSVYTNSCLVSSDGQPGGDAISLSFNNLLGFDSSKPVTKKYTYSFLPKEDGDVLLAEFDTYDPIYKNGAMYKGKPILWVNKASYDTNLNKFNRASLRQIFDVAPIELENKFTPLSVESTPVEPPTVDVVALQQEMTIVKCKGLNKPFVKDNVSFVADDSGTPVVEYLSKEDLHTLYVDPKYQVIVLKDNVLSSMLRLHTVESGDINVVAASGSLTRKVKLLFRASFYFKEFATRTFTATTAVGSCIKSVVRHLGVTKGILTGCFSFVKMLFMLPLAYFSDSKLGTTEVKVSALKTAGVVTGNVVKQCCTAAVDLSMDKLRRVDWKSTLRLLLMLCTTMVLLSSVYHLYVFNQVLSSDVMFEDAQGLKKFYKEVRAYLGISSACDGLASAYRANSFDVPTFCANRSAMCNWCLISQDSITHYPALKMVQTHLSHYVLNIDWLWFAFETGLAYMLYTSAFNWLLLAGTLHYFFAQTSIFVDWRSYNYAVSSAFWLFTHIPMAGLVRMYNLLACLWLLRKFYQHVINGCKDTACLLCYKRNRLTRVEASTVVCGGKRTFYITANGGISFCRRHNWNCVDCDTAGVGNTFICEEVANDLTTALRRPINATDRSHYYVDSVTVKETVVQFNYRRDGQPFYERFPLCAFTNLDKLKFKEVCKTTTGIPEYNFIIYDSSDRGQESLARSACVYYSQVLCKSILLVDSSLVTSVGDSSEIATKMFDSFVNSFVSLYNVTRDKLEKLISTARDGVRRGDNFHSVLTTFIDAARGPAGVESDVETNEIVDSVQYAHKHDIQITNESYNNYVPSYVKPDSVSTSDLGSLIDCNAASVNQIVLRNSNGACIWNAAAYMKLSDALKRQIRIACRKCNLAFRLTTSKLRANDNILSVRFTANKIVGG

SEQ ID NO: 15723 - protein, 1888 aa, Artificial Sequence
  MERS-CoV/England 1__NC_038294.1__non-structural protein 3 (NSP3)
MAPVKKVAFGGDQVHEVAAVRSVTVEYNIHAVLDTLLASSSLRTFVVDKSLSIEEFADVVKEQVSDLLVKLLRGMPIPDFDLDDFIDAPCYCFNAEGDASWSSTMIFSLHPVECDEECSEVEASDLEEGESECISETSTEQVDVSHEISDDEWAAAVDEAFPLDEAEDVTESVQEEAQPVEVPVEDIAQVVIADTLQETPVVSDTVEVPPQVVKLPSEPQTIQPEVKEVAPVYEADTEQTQSVTVKPKRLRKKRNVDPLSNFEHKVITECVTIVLGDAIQVAKCYGESVLVNAANTHLKHGGGIAGAINAASKGAVQKESDEYILAKGPLQVGDSVLLQGHSLAKNILHVVGPDARAKQDVSLLSKCYKAMNAYPLVVTPLVSAGIFGVKPAVSFDYLIREAKTRVLVVVNSQDVYKSLTIVDIPQSLTFSYDGLRGAIRKAKDYGFTVFVCTDNSANTKVLRNKGVDYTKKFLTVDGVQYYCYTSKDTLDDILQQANKSVGIISMPLGYVSHGLDLIQAGSVVRRVNVPYVCLLANKEQEAILMSEDVKLNPSEDFIKHVRTNGGYNSWHLVEGELLVQDLRLNKLLHWSDQTICYKDSVFYVVKNSTAFPFETLSACRAYLDSRTTQQLTIEVLVTVDGVNFRTVVLNNKNTYRSQLGCVFFNGADISDTIPDEKQNGHSLYLADNLTADETKALKELYGPVDPTFLHRFYSLKAAVHKWKMVVCDKVRSLKLSDNNCYLNAVIMTLDLLKDIKFVIPALQHAFMKHKGGDSTDFIALIMAYGNCTFGAPDDASRLLHTVLAKAELCCSARMVWREWCNVCGIKDVVLQGLKACCYVGVQTVEDLRARMTYVCQCGGERHRQIVEHTTPWLLLSGTPNEKLVTTSTAPDFVAFNVFQGIETAVGHYVHARLKGGLILKFDSGTVSKTSDWKCKVTDVLFPGQKYSSDCNVVRYSLDGNFRTEVDPDLSAFYVKDGKYFTSEPPVTYSPATILAGSVYTNSCLVSSDGQPGGDAISLSFNNLLGFDSSKPVTKKYTYSFLPKEDGDVLLAEFDTYDPIYKNGAMYKGKPILWVNKASYDTNLNKFNRASLRQIFDVAPIELENKFTPLSVESTPVEPPTVDVVALQQEMTIVKCKGLNKPFVKDNVSFVADDSGTPVVEYLSKEDLHTLYVDPKYQVIVLKDNVLSSMLRLHTVESGDINVVAASGSLTRKVKLLFRASFYFKEFATRTFTATTAVGSCIKSVVRHLGVTKGILTGCFSFVKMLFMLPLAYFSDSKLGTTEVKVSALKTAGVVTGNVVKQCCTAAVDLSMDKLRRVDWKSTLRLLLMLCTTMVLLSSVYHLYVFNQVLSSDVMFEDAQGLKKFYKEVRAYLGISSACDGLASAYRANSFDVPTFCANRSAMCNWCLISQDSITHYPALKMVQTHLSHYVLNIDWLWFAFETGLAYMLYTSAFNWLLLAGTLHYFFAQTSIFVDWRSYNYAVSSAFWLFTHIPMAGLVRMYNLLACLWLLRKFYQHVINGCKDTACLLCYKRNRLTRVEASTVVCGGKRTFYITANGGISFCRRHNWNCVDCDTAGVGNTFICEEVANDLTTALRRPINATDRSHYYVDSVTVKETVVQFNYRRDGQPFYERFPLCAFTNLDKLKFKEVCKTTTGIPEYNFIIYDSSDRGQESLARSACVYYSQVLCKSILLVDSSLVTSVGDSSEIATKMFDSFVNSFVSLYNVTRDKLEKLISTARDGVRRGDNFHSVLTTFIDAARGPAGVESDVETNEIVDSVQYAHKHDIQITNESYNNYVPSYVKPDSVSTSDLGSLIDCNAASVNQIVLRNSNGACIWNAAAYMKLSDALKRQIRIACRKCNLAFRLTTSKLRANDNILSVRFTANKIVGG

SEQ ID NO: 15724 - protein, 1923 aa, Artificial Sequence
  SARS-CoV/Tor2__NC_004718.3__non-structural protein 3 (NSP3)
MAPIKGVTFGEDTVWEVQGYKNVRITFELDERVDKVLNEKCSVYTVESGTEVTEFACVVAEAVVKTLQPVSDLLTNMGIDLDEWSVATFYLFDDAGEENFSSRMYCSFYPPDEEEEDDAECEEEEIDETCEHEYGTEDDYQGLPLEFGASAETVRVEEEEEEDWLDDTTEQSEIEPEPEPTPEEPVNQFTGYLKLTDNVAIKCVDIVKEAQSANPMVIVNAANIHLKHGGGVAGALNKATNGAMQKESDDYIKLNGPLTVGGSCLLSGHNLAKKCLHVVGPNLNAGEDIQLLKAAYENFNSQDILLAPLLSAGIFGAKPLQSLQVCVQTVRTQVYIAVNDKALYEQVVMDYLDNLKPRVEAPKQEEPPNTEDSKTEEKSVVQKPVDVKPKIKACIDEVTTTLEETKFLTNKLLLFADINGKLYHDSQNMLRGEDMSFLEKDAPYMVGDVITSGDITCVVIPSKKAGGTTEMLSRALKKVPVDEYITTYPGQGCAGYTLEEAKTALKKCKSAFYVLPSEAPNAKEEILGTVSWNLREMLAHAEETRKLMPICMDVRAIMATIQRKYKGIKIQEGIVDYGVRFFFYTSKEPVASIITKLNSLNEPLVTMPIGYVTHGFNLEEAARCMRSLKAPAVVSVSSPDAVTTYNGYLTSSSKTSEEHFVETVSLAGSYRDWSYSGQRTELGVEFLKRGDKIVYHTLESPVEFHLDGEVLSLDKLKSLLSLREVKTIKVFTTVDNTNLHTQLVDMSMTYGQQFGPTYLDGADVTKIKPHVNHEGKTFFVLPSDDTLRSEAFEYYHTLDESFLGRYMSALNHTKKWKFPQVGGLTSIKWADNNCYLSSVLLALQQLEVKFNAPALQEAYYRARAGDAANFCALILAYSNKTVGELGDVRETMTHLLQHANLESAKRVLNVVCKHCGQKTTTLTGVEAVMYMGTLSYDNLKTGVSIPCVCGRDATQYLVQQESSFVMMSAPPAEYKLQQGTFLCANEYTGNYQCGHYTHITAKETLYRIDGAHLTKMSEYKGPVTDVFYKETSYTTTIKPVSYKLDGVTYTEIEPKLDGYYKKDNAYYTEQPIDLVPTQPLPNASFDNFKLTCSNTKFADDLNQMTGFTKPASRELSVTFFPDLNGDVVAIDYRHYSASFKKGAKLLHKPIVWHINQATTKTTFKPNTWCLRCLWSTKPVDTSNSFEVLAVEDTQGMDNLACESQQPTSEEVVENPTIQKEVIECDVKTTEVVGNVILKPSDEGVKVTQELGHEDLMAAYVENTSITIKKPNELSLALGLKTIATHGIAAINSVPWSKILAYVKPFLGQAAITTSNCAKRLAQRVFNNYMPYVFTLLFQLCTFTKSTNSRIRASLPTTIAKNSVKSVAKLCLDAGINYVKSPKFSKLFTIAMWLLLLSICLGSLICVTAAFGVLLSNFGAPSYCNGVRELYLNSSNVTTMDFCEGSFPCSICLSGLDSLDSYPALETIQVTISSYKLDLTILGLAAEWVLAYMLFTKFFYLLGLSAIMQVFFGYFASHFISNSWLMWFIISIVQMAPVSAMVRMYIFFASFYYIWKSYVHIMDGCTSSTCMMCYKRNRATRVECTTIVNGMKRSFYVYANGGRGFCKTHNWNCLNCDTFCTGSTFISDEVARDLSLQFKRPINPTDQSSYIVDSVAVKNGALHLYFDKAGQKTYERHPLSHFVNLDNLRANNTKGSLPINVIVFDGKSKCDESASKSASVYYSQLMCQPILLLDQALVSDVGDSTEVSVKMFDAYVDTFSATFSVPMEKLKALVATAHSELAKGVALDGVLSTFVSAARQGVVDTDVDTKDVIECLKLSHHSDLEVTGDSCNNFMLTYNKVENMTPRDLGACIDCNARHINAQVAKSHNVSLIWNVKDYMSLSEQLRKQIRSAAKKNNIPFRLTCATTRQVVNVITTKISLKGG

SEQ ID NO: 15725 - protein, 1900 aa, Artificial Sequence
  HCoV/OC43__NC_006213.1__non-structural protein 3 (NSP3)
MGRRVTFKEQPTVKEIISMPKIIKVFYELDNDFNTILNTACGVFEVDDTVDMEEFYAVVIDAIEEKLSPCKELEGVGAKVSAFLQKLEDNPLFLFDEAGEEVLAPKLYCAFTAPEDDDFLEESDVEEDDVEGEETDLTVTSAGQPCVASEQEESSEVLEDTLDDGPSVETSDSQVEEDVEMSDFVDLESVIQDYENVCFEFYTTEPEFVKVLGLYVPKATRNNCWLRSVLAVMQKLPCQFKDKNLQDLWVLYKQQYSQLFVDTLVNKIPANIVLPQGGYVADFAYWFLTLCDWQCVAYWKCIKCDLALKLKGLDAMFFYGDVVSHICKCGESMVLIDVDVPFTAHFALKDKLFCAFITKRIVYKAACVVDVNDSHSMAVVDGKQIDDHRITSITSDKFDFIIGHGMSFSMTTFEIAQLYGSCITPNVCFVKGDIIKVSKLVKAEVVVNPANGHMAHGGGVAKAIAVAAGQQFVKETTDMVKSKGVCATGDCYVSTGGKLCKTVLNVVGPDARTQGKQSYVLLERVYKHLNNYDCVVTTLISAGIFSVPSDVSLTYLLGTAKKQVVLVSNNQEDFDLISKCQITAVEGTKKLAARLSFNVGRSIVYETDANKLILINDVAFVSTFNVLQDVLSLRHDIALDDDARTFVQSNVDVVPEGWRVVNKFYQINGVRTVKYFECTGGIDICSQDKVFGYVQQGIFNKATVAQIKALFLDKVDILLTVDGVNFTNRFVPVGESFGKSLGNVFCDGVNVTKHKCDINYKGKVFFQFDNLSSEDLKAVRSSFNFDQKELLAYYNMLVNCFKWQVVVNGKYFTFKQANNNCFVNVSCLMLQSLHLTFKIVQWQEAWLEFRSGRPARFVALVLAKGGFKFGDPADSRDFLRVVFSQVDLTGAICDFEIACKCGVKQEQRTGLDAVMHFGTLSREDLEIGYTVDCSCGKKLIHCVRFDVPFLICSNTPASVKLPKGVGSANIFIGDKVGHYVHVKCEQSYQLYDASNVKKVTDVTGKLSDCLYLKNLKQTFKSVLTTYYLDDVKKIEYKPDLSQYYCDGGKYYTQRIIKAQFKTFEKVDGVYTNFKLIGHTVCDSLNAKLGFDSSKEFVEYKITEWPTATGDVVLATDDLYVKRYERGCITFGKPVIWLSHEKASLNSLTYFNRPSLVDDNKFDVLKVDDVDDGGDSSESGAKETKEINIIKLSGVKKPFKVEDSVIVNDDTSETKYVKSLSIVDVYDMWLTGCKYVVRTANALSRAVNVPTIRKFIKFGMTLVSIPIDLLNLREIKPAVNVVKAVRNKISVCFNFIKWLFVLLFGWIKISADNKVIYTTEIASKLTCKLVALAFKNAFLTFKWSMVARGACIIATIFLLWFNFIYANVIFSDFYLPKIGFLPTFVGKIAQWIKNTFSLVTICDLYSIQDVGFKNQYCNGSIACQFCLAGFDMLDNYKAIDVVQYEADRRAFVDYTGVLKIVIELIVSYALYTAWFYPLFALISIQILTTWLPELFMLSTLHWSFRLLVALANMLPAHVFMRFYIIIASFIKLFSLFRHVAYGCSKSGCLFCYKRNRSLRVKCSTIVGGMIRYYDVMANGGTGFCSKHQWNCIDCDSYKPGNTFITVEAALDLSKELKRPIQPTDVAYHTVTDVKQVGCSMRLFYDRDGQRTYDDVNASLFVDYSNLLHSKVKSVPNMHVVVVENDADKANFLNAAVFYAQSLFRPILMVDKNLITTANTGTSVTETMFDVYVDTFLSMFDVDKKSLNALIATAHSSIKQGTQIYKVLDTFLSCARKSCSIDSDVDTKCLADSVMSAVSAGLELTDESCNNLVPTYLKSDNIVAADLGVLIQNSAKHVQGNVAKIAGVSCIWSVDAFNQFSSDFQHKLKKACCKTGLKLKLTYNKQMANVSVLTTPFSLKGG

SEQ ID NO: 15726 - protein, 2030 aa, Artificial Sequence
  HCoV/HKU1__NC_006577.2__non-structural protein 3 (NSP3)
MGRKVNFNEKPVVMEIPSLMTVKVMFDLDSTFDDILGKVCSEFEVEKGVTVDDFVAVVCDAIENALNSCKEHPVVGYQVRAFLNKLNENVVYLFDEAGDEAMASRMYCTFAIEDVEDVISSEAVEDTIDGVVEDTINDDEDVVTGDNDDEDVVTGDNDDEDVVTGDNDDEDVVTGDNDDEDVVTGDNDDEDVVTGDNDDEDVVTGDNDDEDVVTGDNDDEDVVTGDNDDEDVVTGDNDDEDVVTGDNDDEDVVTGDNDDEDVVTGDNDDEDVVTGDNNDEEIVTGDNDDQIVVTGDDVDDIESIYDFDTYKALLVFNDVYNDALFVSYGSSVETETYFKVNGLWSPTITHTNCWLRSVLLVMQKLPFKFKDLAIENMWLSYKVGYNQSFVDYLLTTIPKAIVLPQGGFVADFAYWFLNQFDINAYANWCCLKCGFSFDLNGLDALFFYGDIVSHVCKCGHNMTLIAADLPCTLHFSLFDDNFCAFCTPKKIFIAACAVDVNVCHSVAVIGDEQIDGKFVTKFSGDKFDFIVGYGMSFSMSSFELPQLYGLCITPNVCFVKGDIINVARLVKADVIVNPANGHMLHGGGVAKAIAVAAGKKFSKETAAMVKSKGVCQVGDCYVSTGGKLCKTILNIVGPDARQDGRQSYVLLARAYKHLNNYDCCLSTLISAGIFSVPADVSLTYLLGVVDKQVILVSNNKEDFDIIQKCQITSVVGTKALAVRLTANVGRVIKFETDAYKLFLSGDDCFVSNSSVIQEVLLLRHDIQLNNDVRDYLLSKMTSLPKDWRLINKFDVINGVKTVKYFECPNSIYICSQGKDFGYVCDGSFYKATVNQVCVLLAKKIDVLLTVDGVNFKSISLTVGEVFGKILGNVFCDGIDVTKLKCSDFYADKILYQYENLSLADISAVQSSFGFDQQQLLAYYNFLTVCKWSVVVNGPFFSFEQSHNNCYVNVACLMLQHINLKFNKWQWQEAWYEFRAGRPHRLVALVLAKGHFKFDEPSDATDFIRVVLKQADLSGAICELELICDCGIKQESRVGVDAVMHFGTLAKTDLFNGYKIGCNCAGRIVHCTKLNVPFLICSNTPLSKDLPDDVVAANMFMGVGVGHYTHLKCGSPYQHYDACSVKKYTGVSGCLTDCLYLKNLTQTFTSMLTNYFLDDVEMVAYNPDLSQYYCDNGKYYTKPIIKAQFKPFAKVDGVYTNFKLVGHDICAQLNDKLGFNVDLPFVEYKVTVWPVATGDVVLASDDLYVKRYFKGCETFGKPVIWFCHDEASLNSLTYFNKPSFKSENRYSVLSVDSVSEESQGNVVTSVMESQISTKEVKLKGVRKTVKIEDAIIVNDENSSIKVVKSLSLVDVWDMYLTGCDYVVWVANELSRLVKSPTVREYIRYGIKPITIPIDLLCLRDDNQTLLVPKIFKARAIEFYGFLKWLFIYVFSLLHFTNDKTIFYTTEIASKFTFNLFCLALKNAFQTFRWSIFIKGFLVVATVFLFWFNFLYINVIFSDFYLPNISVFPIFVGRIVMWIKATFGLVTICDFYSKLGVGFTSHFCNGSFICELCHSGFDMLDTYAAIDFVQYEVDRRVLFDYVSLVKLIVELVIGYSLYTVWFYPLFCLIGLQLFTTWLPDLFMLETMHWLIRFIVFVANMLPAFVLLRFYIVVTAMYKVVGFIRHIVYGCNKAGCLFCYKRNCSVRVKCSTIVGGVIRYYDITANGGTGFCVKHQWNCFNCHSFKPGNTFITVEAAIELSKELKRPVNPTDASHYVVTDIKQVGCMMRLFYDRDGQRVYDDVDASLFVDINNLLHSKVKVVPNLYVVVVESDADRANFLNAVVFYAQSLYRPILLVDKKLITTACNGISVTQTMFDVYVDTFMSHFDVDRKSFNNFVNIAHASLREGVQLEKVLDTFVGCVRKCCSIDSDVETRFITKSMISAVAAGLEFTDENYNNLVPTYLKSDNIVAADLGVLIQNGAKHVQGNVAKAANISCIWFIDAFNQLTADLQHKLKKACVKTGLKLKLTFNKQEASVPILTTPFSLKGG

SEQ ID NO: 15727 - protein, 1593 aa, Artificial Sequence
  HCoV/229E/BN1/GER/2015__KU291448.1__non-structural protein 3 (NSP3)
MGKVSFSDDVEVKDIEPVYRVKLCFEFEDEKLVDVCEKAIGKKIKHEGDWDSFCKTIQSALSVVSCYVNLPTYYIYDEEGGNDLSLPVMISEWPLFESDKEEDVQQAQQEATHIAEDVVDQVEEVNSIFDIETVDVKHEMSPFEMPFEELNGLKILKQLDNNCWVNSVMLQIQLTGILDGDYAMQFFKMGRVAKMIERCYTAEQCIRGAMGDVGLCMYRLLKDLHTGFMVMDYKCSCTSGRLEESGAVLFCTPTKKAFPYGTCLNCNAPRMCTIRQLQGTIIFVQQKPEPVNPVSFVVKPVCSSIFRGAVSCGHYQTNIYSQNLCVDGFGVNKIQPWTNDALNTICIKDADYNAKDEISVTPIKNTVDTIPKEEFVVKEKLNAFLVHGNVVFYQGDVDTVVNGVDFDFIVNAANENLAHGGGLAKALDVYTKGKLQRLSKEHIGLAGKVRVGTGVMVECDSLRIFNVVGPRKGKHERDLLVKAYNTINNEQGTPLTPILSCGIFGVKLETSLEVLLDVCNTKEFKVFVYTDTEVCKVKDFVSGLVNVQKVAQPKIEQKPVSLIKVAPKPYRVDGKFSYFTEDLLCVADDKPIVLFTDSMLTLDDRGLALDNALSGVLSAAIKDCVDINKAIPSGNLIKFDIDSVVVYMCVVPSEKDKHLDNNVQRCTRKLNRLMCDIVCTIPADYILPLVLSSLTCNVSFVGELKAAEAKVITIKVTEDGVNVHDVTVTTDKSFEQQVGVIADKDKDLSGAVPSDLNTSELLTKAIDVDWVEFYGFKDAVTFATVDHSAFAYESAVVNGIRVLKTSDNNCWVNAVCIALQYLKPHFISQGLDAAWNKFVLGDVEIFVAFVYYVARLVKGDKGDAEDTLNKLSKYLVNEAQVQLEHYSSCVECDAKFKNSVTSINSAIVCASVKRDGVQVGYCVHGIKYYSRVKSVRGRAIIVSVEQLEPCVQSRLLSGVAYTAFSGPVDKGHYTVYDTAKKSMYDGDRFVKHDLSLLSVTSVVMVGDYVAPVSTVKPKPVISQLDENAQKFFDFGDFLVHNFVIFFTWLLSMFTLCKTAVTTCDVKIMAKAPQRTGVVLKRSLKYNLKASAAVLKSKWWLLAKFTKLLLLIYTLYSVVLFCVRFGPFEFCSETVNGYAKSNFVKDDYCDGSLGCKMCLFGYQELSQFSHLDVVWKHITDPLFSNIQPFIVMVLLLIFGDNYLRCFLLYFVAQMISTVGVFLGYKETNWFLHFIPFDVICDELFVTVIVIKVISFVRHVLFGCENPDCIACSKSARLKRFPVNTIVNGVQRSFYVNANGGSKFCKKHRFFCVDCDSYGYGSTFITPEVSRELGNITKTNVQPTGPAYVMIDKVEFENGFYRLYSGETFWRYNFDITESKYSCKEVFKNCNVLDDFIVFNNNGTNVTQVKNASVYFSQLLCRPIKLVDSELLSTLSVDFNGVLHKAYIDVLRNSFGKDLNANMSLADCKSALGLSISDHEFTSAISNAHRCDVLLSDLSFNNFVSSYAKPEEKLSAYDLACCMRAGAKVVNANVLTKDQTPIVWHAKDFNSLSAEGRKYIVKTSKAKGLTFLLTINENQAVTQIPATSIVAKQGA

SEQ ID NO: 15728 - protein, 1565 aa, Artificial Sequence
  HCoV/NL63/RPTEC/2004__JX504050.1__non-structural protein 3 (NSP3)
MGKISFSDDVIVHDVEPTHKVKLIFEFEDDVVTSLCKKSFGKSIIYTGDWEGLHEVLTSAMNVIGQHIKLPQFYIYDEEGGYDVSKPVMISQWPISNDSNGCVVEASTDFHQLECIVDDSVREEVDIIEQPFEEVEHVLSIKQPFSFSFRDELGVRVLDQSDNNCWISTTLVQLQLTKLLDDSIEMQLFKVGKVDSIVQKCYELSHLISGSLGDSGKLLSELLKEKYTCSITFEMSCDCGKKFDDQVGCLFWIMPYTKLFQKGECCICHKMQTYKLVSMKGTGVFVQDPAPIDIDAFPVKPICSSVYLGVKGSGHYQTNLYSFNKAIDGFGVFDIKNSSVNTVCFVDVDFHSVEIEAGEVKPFAVYKNVKFYLGDISHLVNCVSFDFVVNAANENLLHGGGVARAIDILTEGQLQSLSKDYISSNGPLKVGAGVMLECEKFNVFNVVGPRTGKHEHSLLVEAYNSILFENGIPLMPLLSCGIFGVRIENSLKALFSCDINKPLQVFVYSSNEEQAVLKFLDGLDLTPVIDDVDVVKPFRVEGNFSFFDCGVNALDGDIYLLFTNSILMLDKQGQLLDTKLNGILQQAALDYLATVKTVPAGNLVKLVVESCTIYMCVVPSINDLSFDKNLGRCVRKLNRLKTCVIANVPAIDVLKKLLSSLTLTVKFVVESNVMDVNDCFKNDNVVLKITEDGINVKDVVVESSKSLGKQLGVVSDGVDSFEGVLPINTDTVLSVAPEVDWVAFYGFEKAALFASLDVKPYGYPNDFVGGFRVLGTTDNNCWVNATCIILQYLKPTFKSKGLNVLWNKFVTGDVGPFVSFIYFITMSSKGQKGDAEEALSKLSEYLISDSIVTLEQYSTCDICKSTVVEVKSAIVCASVLKDGCDVGFCPHRHKLRSRVKFVNGRVVITNVGEPIISQPSKLLNGIAYTTFSGSFDNGHYVVYDAANNAVYDGARLFSSDLSTLAVTAIVVVGGCVTSNVPTIVSEKISVMDKLDTGAQKFFQFGDFVMNNIVLFLTWLLSMFSLLRTSIMKHDIKVIAKAPKRTGVILTRSFKYNIRSALFVIKQKWCVIVTLFKFLLLLYAIYALVFMIVQFSPFNSLLCGDIVSGYEKSTFNKDIYCGNSMVCKMCLFSYQEFNDLDHTSLVWKHIRDPILISLQPFVILVILLIFGNMYLRFGLLYFVAQFISTFGSFLGFHQKQWFLHFVPFDVLCNEFLATFIVCKIVLFVRHIIVGCNNADCVACSKSARLKRVPLQTIINGMHKSFYVNANGGTCFCNKHNFFCVNCDSFGPGNTFINGDIARELGNVVKTAVQPTAPAYVIIDKVDFVNGFYRLYSGDTFWRYDFDITESKYSCKEVLKNCNVLENFIVYNNSGSNITQIKNACVYFSQLLCEPIKLVNSELLSTLSVDFNGVLHKAYVDVLCNSFFKELTANMSMAECKATLGLTVSDDDFVSAVANAHRYDVLLSDLSFNNFFISYAKPEDKLSVYDIACCMRAGSKVVNHNVLIKESIPIVWGVKDFNTLSQEGKKYLVKTTKAKGLTFLLTFNDNQAITQVPATSIVAKQGA

SEQ ID NO: 15729 - protein, 1923 aa, Artificial Sequence
  Bat SARS-like CoV/WIV1__KF367457.1__non-structural protein 3 (NSP3)
MAPTKGVTFGEDTVLEVQGYKNVRITFELDERVDKVLNEKCSVYTVESGTEVTEFACVVAEAVVKTLQPVSDLLTNMGIDLDEWSVATFYLFDDAGEEKLSSRMYCSFYPPDDEEDCDEYDEEEEVLEESCAHEYGTEEDYQGLSLEFGASTEMQVEEEEEEDWLGDATELSEHEPEPELTPEEPVNQFTGYLKLTDNVAIKCVDIVKEAQNANPTVIVNAANIHLKHGGGVAGALNKATNGAMQKESDDYIKLNGPLVVGGSCLLSGHNLAKKCLHVVGPNLNAGEDIQLLKAAYENFNSQDTLLAPLLSAGIFGAKPLQSLQVCVQTVRTQVYIAVNDKALYEQVVMDYLDSLKPRVEAPKQEEPPRTEDPKIEEKSVVQKPIDVKPKIKACIDEVTTTLEETKFLTNKLLLFADINGKLYHDSHNMLRGEDMSFLEKDAPYVVGDVITSGDITCVVIPSKKAGGTTEMLSRALKKVPVDEYITTYPGQGCAGYTLEEAKTALKKCKSAFYVLPSETPNAKEEILGTVSWNLREMLAHAEETRKLMPICMDVRAIMATIQRKYKGIKVQEGIVDYGVRFFFYTSKEPVASIITKLNSLNEPLVTMPIGYVTHGFNLEEAARCMRSLKAPAVVSVSSPDAVTTYNGYLTSSSKTSEEHFVETVSLAGSYRDWYYSGQRTELGVEFLKRGDKIVYHTLESPVEFHLDGEVLPLDKLKSLLSLREVKTIKVFTTVDNTNLHTQLVDMSMTYGQQFGPTYLDGADVTKIKPHVNHEGKTFFVLPSDDTLRSEAFEYYHTLDESFLGRYMSALNHTKKWKFPQVGGLTSIKWADNNCYLSSVLLALQQIEVKFNAPALQEAYYRARAGDAANFCALILAYSNKTVGELGDVRETMTHLLQHANLESAKRVLNVVCKHCGQKTTTLTGVEAVMYMGTLSYDNLKTGVSIPCVCGRDATQYLVQQESSFVMMSAPPAEYKLQQGTFLCANEYTGNYQCGHYTHITAKETLYRIDGAHLTKMSEYKGPVTDVFYKETSYTTTIKPVSYKLDGVTYTEIEPKLDGYYKKDNAYYTEQPIDLVPTQPLPNASFDNFKLTCSNTKFADDLNQMTGFTKPASRELYVTFFPDLNGDVVAIDYRHYSASFKKGAKLLHKPIVWHINQATTKTTFKPNTWCLRCLWSTKPVDTSNSFEVLAVEDTQGMDNLACESQQPTSEEVVENPTIQKEVIECDVKTTEVVGNVILKPSDEGVKVTQELDHEDLMAAYVENTSITIKKPNELSLALGLKTIATHGIAAINSVPWSKILAYVKPFLGQAAITTSNCAKRLAQRVFNNYMPYVLTLLFQLCTFTKSTNSRIRASLPTTIAKNSVRGVARLCLDAGINYVKSPKFSKLFTIAMWLLLLSICLGSLIYVTAALGVLLSNFGAPSYCSGVRESYLNSSNVTTMDFCEGSFPCSVCLSGLDSLDSYPALETIQVTISSYKLDLTILGLAAEWFLAYMLFTKFFYLLGLSAIMQVFFGYFASHFISNSWLMWFIISIVQMAPVSAMVRMYIFFASFYYIWKSYVHIMDGCTSSTCMMCYKRNRATRVECTTIVNGMKRSFYVYANGGRGFCKTHNWNCLNCDTFCTGSTFISDEVARDLSLQFKRPINPTDQSSYIVDSVAVKNGALHLYFDKAGQKTYERHPLSHFINLDNLRANNTKGSLPINVIVFDGKSKCDESAARSASVYYSQLMCQPILLLDQALISDVGDSTEVSVKMFDAYVDTFSATFSVPMEKLRALVATAHSELAKGVALDGVLSTFVSAARQGVVDTDVDTKDVIECLKLSHHSDLEVTGDSCNNFMLTYNKVENMTPRDLGACIDCNARHINAQVAKSHNVSLIWNVKDYMSLSEQLRKQIRSAAKKNNIPFRLTCATTRQVVNVITTKISLKGG

SEQ ID NO: 15730 - protein, 1838 aa, Artificial Sequence
  BatCoV/HKU9-1 BF_005I__NC_009021.1__non-structural protein 3 (NSP3)
MGVSKVTFGDEEVHTIPNTVTVNFSYDVCEGLDAILDKVMAPFQVEEGTKLEDLACVVQKAVYERLSDLFSDCPAELRPINLEDFLTSECFVYSKDYEKILMPEMYFSLEDAVPVDDEMVDDIEDTVEQASDSDDQWLGDEGAEDCDNTIQDVDVATSMTTPCGYTKIAEHVYIKCADIVQEARNYSYAVLVNAANVNLHHGGGVAGALNRATNNAMQKESSEYIKANGSLQPGGHVLLSSHGLASHGILHVVGPDKRLGQDLALLDAVYAAYTGFDSVLTPLVSAGIFGFTVEESLCSLVKNVACTTYVVVYDRQLYERALATSFDVPGPQSSVQHVPAIDWAEAVEVQESIVDQVETPSLGAVDTVDSNADSGLNETARSPENVVGSVPDDVVADVESCVRDLVRQVVKKVKRDKRPPPIVPQQTVEQQPQEISSPGDCNTVLVDVVSMSFSAMVNFGKEKGLLIPVVIDYPAFLKVLKRFSPKEGLFSSNGYEFYGYSRDKPLHEVSKDLNSLGRPLIMIPFGFIVNGQTLAVSAVSMRGLTVPHTVVVPSESSVPLYRAYFNGVFSGDTTAVQDFVVDILLNGARDWDVLQTTCTVDRKVYKTICKRGNTYLCFDDTNLYAITGDVVLKFATVSKARAYLETKLCAPEPLIKVLTTVDGINYSTVLVSTAQSYRAQIGTVFCDGHDWSNKNPMPTDEGTHLYKQDNFSSAEVTAIREYYGVDDSNIIARAMSIRKTVQTWPYTVVDGRVLLAQRDSNCYLNVAISLLQDIDVSFSTPWVCRAYDALKGGNPLPMAEVLIALGKATPGVSDDAHMVLSAVLNHGTVTARRVMQTVCEHCGVSQMVFTGTDACTFYGSVVLDDLYAPVSVVCQCGRPAIRYVSEQKSPWLLMSCTPTQVPLDTSGIWKTAIVFRGPVTAGHYMYAVNGTLISVYDANTRRRTSDLKLPATDILYGPTSFTSDSKVETYYLDGVKRTTIDPDFSKYVKRGDYYFTTAPIEVVAAPKLVTSYDGFYLSSCQNPQLAESFNKAINATKTGPMKLLTMYPNVAGDVVAISDDNVVAHPYGSLHMGKPVLFVTRPNTWKKLVPLLSTVVVNTPNTYDVLAVDPLPVNNETSEEPISVKAPIPLYGLKATMVLNGTTYVPGNKGHLLCLKEFTLTDLQTFYVEGVQPFVLLKASHLSKVLGLRVSDSSLHVNHLSKGVVYAYAATRLTTRVTTSLLGGLVTRSVRKTADFVRSTNPGSKCVGLLCLFYQLFMRFWLLVKKPPIVKVSGIIAYNTGCGVTTCVLNYLRSRCGNISWSRLLKLLRYMLYIWFVWTCLTICGVWLSEPYAPSLVTRFKYFLGIVMPCDYVLVNETGTGWLHHLCMAGMDSLDYPALRMQQHRYGSPYNYTYILMLLEAFFAYLLYTPALPIVGILAVLHLIVLYLPIPLGNSWLVVFLYYIIRLVPFTSMLRMYIVIAFLWLCYKGFLHVRYGCNNVACLMCYKKNVAKRIECSTVVNGVKRMFYVNANGGTHFCTKHNWNCVSCDTYTVDSTFICRQVALDLSAQFKRPIIHTDEAYYEVTSVEVRNGYVYCYFESDGQRSYERFPMDAFTNVSKLHYSELKGAAPAFNVLVFDATNRIEENAVKTAAIYYAQLACKPILLVDKRMVGVVGDDATIARAMFEAYAQNYLLKYSIAMDKVKHLYSTALQQISSGMTVESVLKVFVGSTRAEAKDLESDVDTNDLVSCIRLCHQEGWEWTTDSWNNLVPTYIKQDTLSTLEVGQFMTANAKYVNANIAKGAAVNLIWRYADFIKLSESMRRQLKVAARKTGLNLLVTTSSLKADVPCMVTPFKIIG

SEQ ID NO: 15731 - protein, 1622 aa, Artificial Sequence
  PEDV/NPL-PEDv/2013/P10__KJ778616.1__non-structural protein 3 (NSP3)
MGDVKFSDEVSVKTIDPVYKVSLEFEFESETIMAVLNKAVGNCIKVTGGWDDVVEYINVAIEVLKDHIDVPKYYIYDEEGGTDPNLPVMVSQWPLNDDTISQDLLDVEVVTDAPVDFEGDEVDSSDPDKVADVANSEPEDDGLNVAPETNVESEVEEVAATLSFIKDTPSTVTKDPFAFDFASYGGLKVLRQSHNNCWVTSTLVQLQLLGIVDDPAMELFSAGRVGPMVRKCYESQKAILGSLGDVSACLESLTKDLHTLKITCSVVCGCGTGERIYDGCAFRMTPTLEPFPYGACAQCAQVLMHTFKSIVGTGIFCRDTTALSLDSLVVKPLCAAAFIGKDSGHYVTNFYDAAMAIDGYGRHQIKYDTLNTICVKDVNWTAPFVPDVEPVLELVVKPFYSYKNVDFYQGDFSDLVKLPCDFVVNAANENLSHGGGIAKAIDVYTKGMLQKCSNDYIKAHGPIKVGRGVMLEALGLKVFNVVGPRKGKHAPELLVKAYKSVFANSGVALTPLISVGIFSVPLEESLSAFLACVGDRHCKCFCYSDKEREAIINYMDGLVDAIFKDALVDTTPVQEDVQQVSQKPVLPNFEPFRIEGAHAFYECNPEGLMSLGADKLVLFTNSNLDFCSVGKCLNNVTGGALLEAINVFKKSNKTVPAGNCVTFECADMISITMVVLPSDGDANYDKNYARAVVKVSKLKGKLLLAVGDAMLYSKLSHLSVLGFVSTPDDVERFYANKSVVIKVTEDTRSVKTVKVESTVTYGQQIGPCLVNDTVVTDNKPVVADVVAKVVPSANWDSHYGFDKAGEFHMLDHTGFAFPSEVVNGRRVLKTTDNNCWVNVTCLQLQFARFRFKSAGLQAMWESYCTGDVAMFVHWLYWLTGVDKGQPSDSENALNMLSKYIVPAGSVTIERVTHDGCCCSKRVVTAPVVNASVLKLGVEDGLCPHGLNYIDKVVVVKGTTIVVNVGKPVVAPSHLFLKGVSYTTFLDNGNGVAGHYTVFDHDTGMVHDGDVFVPGDLNVSPVTNVVVSEQTAVVIKDPVKKVELDATKLLDTMNYASERFFSFGDFMSRNLITVFLYILSILGLCFRAFRKRDVKVLAGVPQRTGIILRKSVRYNAKALGVFFKLKLYWFKVLGKFSLGIYALYALLFMTIRFTPIGGPVCDDVVAGYANSSFDKNEYCNSVICKVCLYGYQELSDFSHTQVVWQHLRDPLIGNVMPFFYLAFLAIFGGVYVKAITLYFIFQYLNILGVFLGLQQSIWFLQLVPFDVFGDEIVVFFIVTRVLMFLKHVFLGCDKASCVACSKSARLKRVPVQTIFQGTSKSFYVHANGGSKFCKKHNFFCLNCDSYGPGCTFINDVIATEVGNVVKLNVQPTGPATILIDKVEFSNGFYYLYSGDTFWKYNFDITDNKYTCKESLKNCSIITDFIVFNNNGSNVNQVKNACVYFSQMLCKPVKLVDSALLASLSVDFGASLHSAFVSVLSNSFGKDLSSCNDMQDCKSTLGFDDVPLDTFNAAVAEAHRYDVLLTDMSFNNFTTSYAKPEEKLPVHDIATCMRVGAKIVNHNVLVKDSIPVVWLVRDFIALSEETRKYIIRTTKVKGITFMLTFNDCRMHTTIPTVCIANKKG

SEQ ID NO: 15732 - protein, 2006 aa, Artificial Sequence
  MHV/A59__NC_048217.1__non-structural protein 3 (NSP3)
MGKKVEFNDKPKVRKIPSTRKIKITFALDATFDSVLSKACSEFEVDKDVTLDELLDVVLDAVESTLSPCKEHDVIGTKVCALLDRLAGDYVYLFDEGGDEVIAPRMYCSFSAPDDEDCVAADVVDADENQDDDAEDSAVLVADTQEEDGVAKGQVEADSEICVAHTGSQEELAEPDAVGSQTPIASAEETEVGEASDREGIAEAKATVCADAVDACPDQVEAFEIEKVEDSILDELQTELNAPADKTYEDVLAFDAVCSEALSAFYAVPSDETHFKVCGFYSPAIERTNCWLRSTLIVMQSLPLEFKDLEMQKLWLSYKAGYDQCFVDKLVKSVPKSIILPQGGYVADFAYFFLSQCSFKAYANWRCLECDMELKLQGLDAMFFYGDVVSHMCKCGNSMTLLSADIPYTLHFGVRDDKFCAFYTPRKVFRAACAVDVNDCHSMAVVEGKQIDGKVVTKFIGDKFDFMVGYGMTFSMSPFELAQLYGSCITPNVCFVKGDVIKVVRLVNAEVIVNPANGRMAHGAGVAGAIAEKAGSAFIKETSDMVKAQGVCQVGECYESAGGKLCKKVLNIVGPDARGHGKQCYSLLERAYQHINKCDNVVTTLISAGIFSVPTDVSLTYLLGVVTKNVILVSNNQDDFDVIEKCQVTSVAGTKALSLQLAKNLCRDVKFVTNACSSLFSESCFVSSYDVLQEVEALRHDIQLDDDARVFVQANMDCLPTDWRLVNKFDSVDGVRTIKYFECPGGIFVSSQGKKFGYVQNGSFKEASVSQIRALLANKVDVLCTVDGVNFRSCCVAEGEVFGKTLGSVFCDGINVTKVRCSAIYKGKVFFQYSDLSEADLVAVKDAFGFDEPQLLKYYTMLGMCKWPVVVCGNYFAFKQSNNNCYINVACLMLQHLSLKFPKWQWQEAWNEFRSGKPLRFVSLVLAKGSFKFNEPSDSIDFMRVVLREADLSGATCNLEFVCKCGVKQEQRKGVDAVMHFGTLDKGDLVRGYNIACTCGSKLVHCTQFNVPFLICSNTPEGRKLPDDVVAANIFTGGSVGHYTHVKCKPKYQLYDACNVNKVSEAKGNFTDCLYLKNLKQTFSSVLTTFYLDDVKCVEYKPDLSQYYCESGKYYTKPIIKAQFRTFEKVDGVYTNFKLVGHSIAEKLNAKLGFDCNSPFVEYKITEWPTATGDVVLASDDLYVSRYLSGCITFGKPVVWLGHEEASLKSLTYFNRPSVVCENKFNVLPVDVSEPTDKGPVPAAVLVTGVPGADASAGAGIAKEQKACASASVEDQVVTEVRQEPSVSAADVKEVKLNGVKKPVKVEGSVVVNDPTSETKVVKSLSIVDVYDMFLTGCKYVVWTANELSRLVNSPTVREYVKWGMGKIVTPAKLLLLRDEKQEFVAPKVVKAKAIACYCAVKWFLLYCFSWIKFNTDNKVIYTTEVASKLTFKLCCLAFKNALQTFNWSVVSRGFFLVATVFLLWFNFLYANVILSDFYLPNIGPLPTFVGQIVAWFKTTFGVSTICDFYQVTDLGYRSSFCNGSMVCELCFSGFDMLDNYDAINVVQHVVDRRLSFDYISLFKLVVELVIGYSLYTVCFYPLFVLIGMQLLTTWLPEFFMLETMHWSARLFVFVANMLPAFTLLRFYIVVTAMYKVYCLCRHVMYGCSKPGCLFCYKRNRSVRVKCSTVVGGSLRYYDVMANGGTGFCTKHQWNCLNCNSWKPGNTFITHEAAADLSKELKRPVNPTDSAYYSVTEVKQVGCSMRLFYERDGQRVYDDVNASLFVDMNGLLHSKVKGVPETHVVVVENEADKAGFLGAAVFYAQSLYRPMLMVEKKLITTANTGLSVSRTMFDLYVDSLLNVLDVDRKSLTSFVNAAHNSLKEGVQLEQVMDTFIGCARRKCAIDSDVETKSITKSVMSAVNAGVDFTDESCNNLVPTYVKSDTIVAADLGVLIQNNAKHVQANVAKAANVACIWSVDAFNQLSADLQHRLRKACSKTGLKIKLTYNKQEANVPILTTPFSLKGG

SEQ ID NO: 15733 - protein, 1946 aa, Artificial Sequence
  SARS-CoV-2/Wuhan-Hu-1__NC_045512.2/MN908947.2__non-structural protein 3 (NSP3)
MAPTKVTFGDDTVIEVQGYKSVNITFELDERIDKVLNEKCSAYTVELGTEVNEFACVVADAVIKTLQPVSELLTPLGIDLDEWSMATYYLFDESGEFKLASHMYCSFYPPDEDEEEGDCEEEEFEPSTQYEYGTEDDYQGKPLEFGATSAALQPEEEQEEDWLDDDSQQTVGQQDGSEDNQTTTIQTIVEVQPQLEMELTPVVQTIEVNSFSGYLKLTDNVYIKNADIVEEAKKVKPTVVVNAANVYLKHGGGVAGALNKATNNAMQVESDDYIATNGPLKVGGSCVLSGHNLAKHCLHVVGPNVNKGEDIQLLKSAYENFNQHEVLLAPLLSAGIFGADPIHSLRVCVDTVRTNVYLAVFDKNLYDKLVSSFLEMKSEKQVEQKIAEIPKEEVKPFITESKPSVEQRKQDDKKIKACVEEVTTTLEETKFLTENLLLYIDINGNLHPDSATLVSDIDITFLKKDAPYIVGDVVQEGVLTAVVIPTKKAGGTTEMLAKALRKVPTDNYITTYPGQGLNGYTVEEAKTVLKKCKSAFYILPSIISNEKQEILGTVSWNLREMLAHAEETRKLMPVCVETKAIVSTIQRKYKGIKIQEGVVDYGARFYFYTSKTTVASLINTLNDLNETLVTMPLGYVTHGLNLEEAARYMRSLKVPATVSVSSPDAVTAYNGYLTSSSKTPEEHFIETISLAGSYKDWSYSGQSTQLGIEFLKRGDKSVYYTSNPTTFHLDGEVITFDNLKTLLSLREVRTIKVFTTVDNINLHTQVVDMSMTYGQQFGPTYLDGADVTKIKPHNSHEGKTFYVLPNDDTLRVEAFEYYHTTDPSFLGRYMSALNHTKKWKYPQVNGLTSIKWADNNCYLATALLTLQQIELKFNPPALQDAYYRARAGEAANFCALILAYCNKTVGELGDVRETMSYLFQHANLDSCKRVLNVVCKTCGQQQTTLKGVEAVMYMGTLSYEQFKKGVQIPCTCGKQATKYLVQQESPFVMMSAPPAQYELKHGTFTCASEYTGNYQCGHYKHITSKETLYCIDGALLTKSSEYKGPITDVFYKENSYTTTIKPVTYKLDGVVCTEIDPKLDNYYKKDNSYFTEQPIDLVPNQPYPNASFDNFKFVCDNIKFADDLNQLTGYKKPASRELKVTFFPDLNGDVVAIDYKHYTPSFKKGAKLLHKPIVWHVNNATNKATYKPNTWCIRCLWSTKPVETSNSFDVLKSEDAQGMDNLACEDLKPVSEEVVENPTIQKDVLECNVKTTEVVGDIILKPANNSLKITEEVGHTDLMAAYVDNSSLTIKKPNELSRVLGLKTLATHGLAAVNSVPWDTIANYAKPFLNKVVSTTTNIVTRCLNRVCTNYMPYFFTLLLQLCTFTRSTNSRIKASMPTTIAKNTVKSVGKFCLEASFNYLKSPNFSKLINIIIWFLLLSVCLGSLIYSTAALGVLMSNLGMPSYCTGYREGYLNSTNVTIATYCTGSIPCSVCLSGLDSLDTYPSLETIQITISSFKWDLTAFGLVAEWFLAYILFTRFFYVLGLAAIMQLFFSYFAVHFISNSWLMWLIINLVQMAPISAMVRMYIFFASFYYVWKSYVHVVDGCNSSTCMMCYKRNRATRVECTTIVNGVRRSFYVYANGGKGFCKLHNWNCVNCDTFCAGSTFISDEVARDLSLQFKRPINPTDQSSYIVDSVTVKNGSIHLYFDKAGQKTYERHSLSHFVNLDNLRANNTKGSLPINVIVFDGKSKCEESSAKSASVYYSQLMCQPILLLDQALVSDVGDSAEVAVKMFDAYVNTFSSTFNVPMEKLKTLVATAEAELAKNVSLDNVLSTFISAARQGFVDSDVETKDVVECLKLSHQSDIEVTGDSCNNYMLTYNKVENMTPRDLGACIDCSARHINAQVAKSHNIALIWNVKDFMSLSEQLRKQIRSAAKKNNLPFKLTCATTRQVVNVVTTKIALKGG

SEQ ID NO: 15734 - protein, 1946 aa, Artificial Sequence
  SARS-CoV-2/Wuhan/WIV05/2019__EPI_ISL_402128__non-structural protein 3 (NSP3)
MAPTKVTFGDDTVIEVQGYKSVNITFELDERIDKVLNEKCSAYTVELGTEVNEFACVVADAVIKTLQPVSELLTPLGIDLDEWSMATYYLFDESGEFKLASHMYCSFYPPDEDEEEGDCEEEEFEPSTQYEYGTEDDYQGKPLEFGATSAALQPEEEQEEDWLDDDSQQTVGQQDGSEDNQTTTIQTIVEVQPQLEMELTPVVQTIEVNSFSGYLKLTDNVYIKNADIVEEAKKVKPTVVVNAANVYLKHGGGVAGALNKATNNAMQVESDDYIATNGPLKVGGSCVLSGHNLAKHCLHVVGPNVNKGEDIQLLKSAYENFNQHEVLLAPLLSAGIFGADPIHSLRVCVDTVRTNVYLAVFDKNLYDKLVSSFLEMKSEKQVEQKIAEIPKEEVKPFITESKPSVEQRKQDDKKIKACVEEVTTTLEETKFLTENLLLYIDINGNLHPDSATLVSDIDITFLKKDAPYIVGDVVQEGVLTAVVIPTKKAGGTTEMLAKALRKVPTDNYITTYPGQGLNGYTVEEAKTVLKKCKSAFYILPSIISNEKQEILGTVSWNLREMLAHAEETRKLMPVCVETKAIVSTIQRKYKGIKIQEGVVDYGARFYFYTSKTTVASLINTLNDLNETLVTMPLGYVTHGLNLEEAARYMRSLKVPATVSVSSPDAVTAYNGYLTSSSKTPEEHFIETISLAGSYKDWSYSGQSTQLGIEFLKRGDKSVYYTSNPTTFHLDGEVITFDNLKTLLSLREVRTIKVFTTVDNINLHTQVVDMSMTYGQQFGPTYLDGADVTKIKPHNSHEGKTFYVLPNDDTLRVEAFEYYHTTDPSFLGRYMSALNHTKKWKYPQVNGLTSIKWADNNCYLATALLTLQQIELKFNPPALQDAYYRARAGEAANFCALILAYCNKTVGELGDVRETMSYLFQHANLDSCKRVLNVVCKTCGQQQTTLKGVEAVMYMGTLSYEQFKKGVQIPCTCGKQATKYLVQQESPFVMMSAPPAQYELKHGTFTCASEYTGNYQCGHYKHITSKETLYCIDGALLTKSSEYKGPITDVFYKENSYTTTIKPVTYKLDGVVCTEIDPKLDNYYKKDNSYFTEQPIDLVPNQPYPNASFDNFKFVCDNIKFADDLNQLTGYKKPASRELKVTFFPDLNGDVVAIDYKHYTPSFKKGAKLLHKPIVWHVNNATNKATYKPNTWCIRCLWSTKPVETSNSFDVLKSEDAQGMDNLACEDLKPVSEEVVENPTIQKDVLECNVKTTEVVGDIILKPANNSLKITEEVGHTDLMAAYVDNSSLTIKKPNELSRVLGLKTLATHGLAAVNSVPWDTIANYAKPFLNKVVSTTTNIVTRCLNRVCTNYMPYFFTLLLQLCTFTRSTNSRIKASMPTTIAKNTVKSVGKFCLEASFNYLKSPNFSKLINIIIWFLLLSVCLGSLIYSTAALSVLMSNLGMPSYCTGYREGYLNSTNVTIATYCTGSIPCSVCLSGLDSLDTYPSLETIQITISSFKWDLTAFGLVAEWFLAYILFTRFFYVLGLAAIMQLFFSYFAVHFISNSWLMWLIINLVQMAPISAMVRMYIFFASFYYVWKSYVHVVDGCNSSTCMMCYKRNRATRVECTTIVNGVRRSFYVYANGGKGFCKLHNWNCVNCDTFCAGSTFISDEVARDLSLQFKRPINPTDQSSYIVDSVTVKNGSIHLYFDKAGQKTYERHSLSHFVNLDNLRANNTKGSLPINVIVFDGKSKCEESSAKSASVYYSQLMCQPILLLDQALVSDVGDSAEVAVKMFDAYVNTFSSTFNVPMEKLKTLVATAEAELAKNVSLDNVLSTFISAARQGFVDSDVETKDVVECLKLSHQSDIEVTGDSCNNYMLTYNKVENMTPRDLGACIDCSARHINAQVAKSHNIALIWNVKDFMSLSEQLRKQIRSAAKKNNLPFKLTCATTRQVVNVVTTKIALKGG

SEQ ID NO: 15735 - protein, 1946 aa, Artificial Sequence
  SARS-CoV-2__MT919525.1__non-structural protein 3 (NSP3)
MAPTKVTFGDDTVIEVQGYKSVNITFELDERIDKVLNEKCSAYTVELGTEVNEFACVVADAVIKTLQPVSELLTPLGIDLDEWSMATYYLFDESGEFKLASHMYCSFYPPDEDEEEGDCEEEEFEPSTQYEYGTEDDYQGKPLEFGATSAALQPEEEQEEDWLDDDSQQTVGQQDGSEDNQTTTIQTIVEVQPQLEMELTPVVQTIEVNSFSGYLKLTDNVYIKNADIVEEAKKVKPTVVVNAANVYLKHGGGVAGALNKATNNAMQVESDDYIATNGPLKVGGSCVLSGHNLAKHCLHVVGPNVNKGEDIQLLKSAYENFNQHEVLLAPLLSAGIFGADPIHSLRVCVDTVRTNVYLAVFDKNLYDKLVSSFLEMKSEKQVEQKIAEIPKEEVKPFITESKPSVEQRKQDDKKIKACVEEVTTTLEETKFLTENLLLYIDINGNLHPDSATLVSDIDITFLKKDAPYIVGDVVQEGVLTAVVIPTKKAGGTTEMLAKALRKVPTDNYITTYPGQGLNGYTVEEAKTVLKKCKSAFYILPSIISNEKQEILGTVSWNLREMLAHAEETRKLMPVCVETKAIVSTIQRKYKGIKIQEGVVDYGARFYFYTSKTTVASLINTLNDLNETLVTMPLGYVTHGLNLEEAARYMRSLKVPATVSVSSPDAVTAYNGYLTSSSKTPEEHFIETISLAGSYKDWSYSGQSTQLGIEFLKRGDKSVYYTSNPTTFHLDGEVITFDNLKTLLSLREVRTIKVFTTVDNINLHTQVVDMSMTYGQQFGPTYLDGADVTKIKPHNSHEGKTFYVLPNDDTLRVEAFEYYHTTDPSFLGRYMSALNHTKKWKYPQVNGLTSIKWADNNCYLATALLTLQQIELKFNPPALQDAYYRARAGEAANFCALILAYCSKTVGELGDVRETMSYLFQHANLDSCKRVLNVVCKTCGQQQTTLKGVEAVMYMGTLSYEQFKKGVQIPCTCGKQATKYLVQQESPFVMMSAPPAQYELKHGTFTCASEYTGNYQCGHYKHITSKETLYCIDGALLTKSSEYKGPITDVFYKENSYTTTIKPVTYKLDGVVCTEIDPKLDNYYKKDNSYFTEQPIDLVPNQPYPNASFDNFKFVCDNIKFADDLNQLTGYKKPASRELKVTFFPDLNGDVVAIDYKHYTPSFKKGAKLLHKPIVWHVNNATNKATYKPNTWCIRCLWSTKPVETSNSFDVLKSEDAQGMDNLACEDLKPVSEEVVENPTIQKDVLECNVKTTEVVGDIILKPANNSLKITEEVGHTDLMAAYVDNSSLTIKKPNELSRVLGLKTLATHGLAAVNSVPWDTIANYAKPFLNKVVSTTTNIVTRCLNRVCTNYMPYFFTLLLQLCTFTRSTNSRIKASMPTTIAKNTVKSVGKFCLEASFNYLKSPNFSKLINIIIWFLLLSVCLGSLIYSTAALGVLMSNLGMPSYCTGYREGYLNSTNVTIATYCTGSIPCSVCLSGLDSLDTYPSLETIQITISSFKWDLTAFGLVAEWFLAYILFTRFFYVLGLAAIMQLFFSYFAVHFISNSWLMWLIINLVQMAPISAMVRMYIFFASFYYVWKSYVHVVDGCNSSTCMMCYKRNRATRVECTTIVNGVRRSFYVYANGGKGFCKLHNWNCVNCDTFCAGSTFISDEVARDLSLQFKRPINPTDQSSYIVDSVTVKNGSIHLYFDKAGQKTYERHSLSHFVNLDNLRANNTKGSLPINVIVFDGKSKCEESSAKSASVYYSQLMCQPILLLDQALVSDVGDSAEVAVKMFDAYVNTFSSTFNVPMEKLKTLVATAEAELAKNVSLDNVLSTFISAARQGFVDSDVETKDVVECLKLSHQSDIEVTGDSCNNYMLTYNKVENMTPRDLGACIDCSARHINAQVAKSHNIALIWNVKDFMSLSEQLRKQIRSAAKKNNLPFKLTCATTRQVVNVVTTKIALKGG

SEQ ID NO: 15736 - protein, 1946 aa, Artificial Sequence
  SARS-CoV-2__MT919768.1__non-structural protein 3 (NSP3)
MAPTKVTFGDDTVIEVQGYKSVNITFELDERIDKVLNEKCSAYTVELGTEVNEFACVVADAVIKTLQPVSELLTPLGIDLDEWSMATYYLFDESGEFKLASHMYCSFYPPDEDEEEGDCEEEEFEPSTQYEYGTEDDYQGKPLEFGATSAALQPEEEQEEDWLDDDSQQTVGQQDGSEDNQTTTIQTIVEVQPQLEMELTPVVQTIEVNSFSGYLKLTDNVYIKNADIVEEAKKVKPTVVVNAANVYLKHGGGVAGALNKATNNAMQVESDDYIATNGPLKVGGSCVLSGHNLAKHCLHVVGPNVNKGEDIQLLKSAYENFNQHEVLLAPLLSAGIFGADPIHSLRVCVDTVRTNVYLAVFDKNLYDKLVSSFLEMKSEKQVEQKIAEIPKEEVKPFITESKPSVEQRKQDDKKIKACVEEVTTTLEETKFLTENLLLYIDINGNLHPDSATLVSDIDITFLKKDAPYIVGDVVQEGVLTAVVIPTKKAGGTTEMLAKALRKVPTDNYITTYPGQGLNGYTVEEAKTVLKKCKSAFYILPSIISNEKQEILGTVSWNLREMLAHAEETRKLMPVCVETKAIVSTIQRKYKGIKIQEGVVDYGARFYFYTSKTTVASLINTLNDLNETLVTMPLGYVTHGLNLEEAARYMRSLKVPATVSVSSPDAVTAYNGYLTSSSKTPEEHFIETISLAGSYKDWSYSGQSTQLGIEFLKRGDKSVYYTSNPTTFHLDGEVITFDNLKTLLSLREVRTIKVFTTVDNINLHTQVVDMSMTYGQQFGPTYLDGADVTKIKPHNSHEGKTFYVLPNDDTLRVEAFEYYHTTDPSFLGRYMSALNHTKKWKYPQVNGLTSIKWADNNCYLATALLTLQQIELKFNPPALQDAYYRARAGEAANFCALILAYCNKTVGELGDVRETMSYLFQHANLDSCKRVLNVVCKTCGQQQTTLKGVEAVMYMGTLSYEQFKKGVQIPCTCGKQATKYLVQQESPFVMMSAPPAQYELKHGTFTCASEYTGNYQCGHYKHITSKETLYCIDGALLTKSSEYKGPITDVFYKENSYTTTIKPVTYKLDGVVCTEIDPKLDNYYKKDNSYFTEQPIDLVPNQPYPNASFDNFKFVCDNIKFADDLNQLTGYKKPASRELKVTFFPDLNGDVVAIDYKHYTPSFKKGAKLLHKPIVWHVNNATNKATYKPNTWCIRCLWSKKPVETSNSFDVLKSEDAQGMDNLACEDLKPVSEEVVENPTIQKDVLECNVKTTEVVGDIILKPANNSLKITEEVGHTDLMAAYVDNSSLTIKKPNELSRVLGLKTLATHGLAAVNSVPWDTIANYAKPFLNKVVSTTTNIVTRCLNRVCTNYMPYFFTLLLQLCTFTRSTNSRIKASMPTTIAKNTVKSVGKFCLEASFNYLKSPNFSKLINIIIWFLLLSVCLGSLIYSTAALGVLMSNLGMPSYCTGYREGYLNSTNVTIATYCTGSIPCSVCLSGLDSLDTYPSLETIQITISSFKWDLTAFGLVAEWFLAYILFTRFFYVLGLAAIMQLFFSYFAVHFISNSWLMWLIINLVQMAPISAMVRMYIFFASFYYVWKSYVHVVDGCNSSTCMMCYKRNRATRVECTTIVNGVRRSFYVYANGGKGFCKLHNWNCVNCDTFCAGSTFISDEVARDLSLQFKRPINPTDQSSYIVDSVTVKNGSIHLYFDKAGQKTYERHSLSHFVNLDNLRANNTKGSLPINVIVFDGKSKCEESSAKSASVYYSQLMCQPILLLDQALVSDVGDSAEVAVKMFDAYVNTFSSTFNVPMEKLKTLVATAEAELAKNVSLDNVLSTFISAARQGFVDSDVETKDVVECLKLSHQSDIEVTGDSCNNYMLTYNKVENMTPRDLGACIDCSARHINAQVAKSHNIALIWNVKDFMSLSEQLRKQIRSAAKKNNLPFKLTCATTRQVVNVVTTKIALKGG

SEQ ID NO: 15737 - protein, 1946 aa, Artificial Sequence
  SARS-CoV-2__MT919771.1__non-structural protein 3 (NSP3)
MAPTKVTFGDDTVIEVQGYKSVNITFELDERIDKVLNEKCSAYTVELGTEVNEFACVVADAVIKTLQPVSELLTPLGIDLDEWSMATYYLFDESGEFKLASHMYCSFYPPDEDEEEGDCEEEEFEPSTQYEYGTEDDYQGKPLEFGATSAALQPEEEQEEDWLDDDSQQTVGQQDGSEDNQTTTIQTIVEVQPQLEMELTPVVQTIEVNSFSGYLKLTDNVYIKNADIVEEAKKVKPTVVVNAANVYLKHGGGVAGALNKATNNAMQVESDDYIATNGPLKVGGSCVLSGHNLAKHCLHVVGPNVNKGEDIQLLKSAYENFNQHEVLLAPLLSAGIFGADPIHSLRVCVDTVRTNVYLAVFDKNLYDKLVSSFLEMKSEKQVEQKIAEIPKEEVKPFITESKPSVEQRKQDDKKIKACVEEVTTTLEETKFLTENLLLYIDINGNLHPDSATLVSDIDITFLKKDAPYIVGDVVQEGVLTAVVIPTKKAGGTTEMLAKALRKVPTDNYITTYPGQGLNGYTVEEAKTVLKKCKSAFYILPSIISNEKQEILGTVSWNLREMLAHAEETRKLMPVCVETKAIVSTIQRKYKGIKIQEGVVDYGARFYFYTSKTTVASLINTLNDLNETLVTMPLGYVTHGLNLEEAARYMRSLKVPATVSVSSPDAVTAYNGYLTSSSKTPEEHFIETISLAGSYKDWSYSGQSTQLGIEFLKRGDKSVYYTSNPTTFHLDGEVITFDNLKTLLSLREVRTIKVFTTVDNINLHTQVVDMSMTYGQQFGPTYLDGADVTKIKPHNSHEGKTFYVLPNDDTLRVEAFEYYHTTDPSFLGRYMSALNHTKKWKYPQVNGLTSIKWADNNCYLATALLTLQQIELKFNPPALQDAYYRARAGEAANFCALILAYCNKTVGELGDVRETMSYLFQHANLDSCKRVLNVVCKTCGQQQTTLKGVEAVMYMGTLSYEQFKKGVQIPCTCGKQATKYLVQQESPFVMMSAPPAQYELKHGTFTCASEYTGNYQCGHYKHITSKETLYCIDGALLTKSSEYKGPITDVFYKENSYTTTIKPVTYKLDGVVCTEIDPKLDNYYKKDNSYFTEQPIDLVPNQPYPNASFDNFKFVCDNIKFADDLNQLTGYKKPASRELKVTFFPDLNGDVVAIDYKHYTPSFKKGAKLLHKPIVWHVNNATNKATYKPNTWCIRCLWSTKPVETSNSFDVLKSEDAQGMDNLACEDLKPVSEEVVENPTIQKDVLECNVKTTEVVGDIILKPANNSLKITEEVGHTDLMAAYVDNSSLTIKKPNELSRVLGLKTLATHGLAAVNSVPWDTIANYAKPFLNKVVSTTINIVTRCLNRVCTNYMPYFFTLLLQLCTFTRSTNSRIKASMPTTIAKNTVKSVGKFCLEASFNYLKSPNFSKLINIIIWFLLLSVCLGSLIYSTAALGVLMSNLGMPSYCTGYREGYLNSTNVTIATYCTGSIPCSVCLSGLDSLDTYPSLETIQITISSFKWDLTAFGLVAEWFLAYILFTRFFYVLGLAAIMQLFFSYFAVHFISNSWLMWLIINLVQMAPISAMVRMYIFFASFYYVWKSYVHVVDGCNSSTCMMCYKRNRATRVECTTIVNGVRRSFYVYANGGKGFCKLHNWNCVNCDTFCAGSTFISDEVARDLSLQFKRPINPTDQSSYIVDSVTVKNGSIHLYFDKAGQKTYERHSLSHFVNLDNLRANNTKGSLPINVIVFDGKSKCEESSAKSASVYYSQLMCQPILLLDQALVSDVGDSAEVAVKMFDAYVNTFSSTFNVPMEKLKTLVATAEAELAKNVSLDNVLSTFISAARQGFVDSDVETKDVVECLKLSHQSDIEVTGDSCNNYMLTYNKVENMTPRDLGACIDCSARHINAQVAKSHNIALIWNVKDFMSLSEQLRKQIRSAAKKNNLPFKLTCATTRQVVNVVTTKIALKGG

SEQ ID NO: 15738 - protein, 1946 aa, Artificial Sequence
  SARS-CoV-2__MT919775.1__non-structural protein 3 (NSP3)
MAPTKVTFGDDTVIEVQGYKSVNITFELDERIDKVLNEKCSAYTVELGTEVNEFACVVADAVIKTLQPVSELLTPLGIDLDEWSMATYYLFDESGEFKLASHMYCSFYPPDEDEEEGDCEEEEFEPSTQYEYGTEDDYQGKPLEFGATSAALQPEEEQEEDWLDDDSQQTVGQQDGSEDNQTTTIQTIVEVQPQLEMELTPVVQTIEVNSFSGYLKLTDNVYIKNADIVEEAKKVKPTVVVNAANVYLKHGGGVAGALNKATNNAMQVESDDYIATNGPLKVGGSCVLSGHNLAKHCLHVVGPNVNKGEDIQLLKSAYENFNQHEVLLAPLLSAGIFGADPIHSLRVCVDTVRTNVYLAVFDKNLYDKLVSSFLEMKSEKQVEQKIAEIPKEEVKPFITESKPSVEQRKQDDKKIKACVEEVTTTLEETKFLTENLLLYIDINGNLHPDSATLVSDIDITFLKKDAPYIVGDVVQEGVLTAVVIPTKKAGGTTEMLAKALRKVPTDNYITTYPGQGLNGYTVEEAKTVLKKCKSAFYILPSIISNEKQEILGTVSWNLREMLAHAEETRKLMPVCVETKAIVSTIQRKYKGIKIQEGVVDYGARFYFYTSKTTVASLINTLNDLNETLVTMPLGYVTHGLNLEEAARYMRSLKVPATVSVSSPDAVTAYNGYLTSSSKTPEEHFIETISLAGSYKDWSYSGQSTQLGIEFLKRGDKSVYYTSNPTTFHLDGEVITFDNLKTLLSLREVRTIKVFTTVDNINLHTQVVDMSMTYGQQFGPTYLDGADVTKIKPHNSHEGKTFYVLPNDDTLRVEAFEYYHTTDPSFLGRYMSALNHTKKWKYPQVNGLTSIKWADNNCYLATALLTLQQIELKFNPPALQDAYYRARAGEAANFCALILAYCNKTVGELGDVRETMSYLFQHANLDSCKRVLNVVCKTCGQQQTTLKGVEAVMYMGTLSYEQFKKGVQIPCTCGKQATKYLVQQESPFVMMSAPPAQYELKHGTFTCASEYTGNYQCGHYKHITSKETLYCIDGALLTKSSEYKGPITDVFYKENSYTTTIKPVTYKLDGVVCTEIDPKLDNYYKKDNSYFTEQPIDLVPNQPYPNASFDNFKFVCDNIKFADDLNQLTGYKKPASRELKVTFFPDLNGDVVAIDYKHYTPSFKKGAKLLHKPIVWHVNNATNKATYKPNTWCIRCLWSTKPVETSNSFDVLKSEDAQGMDNLACEDLKPVSEEVVENPTIQKDVLECNVKTTEVVGDIILKPANNSLKITEEVGHTDLMAAYVDNSSLTIKKPNELSRVLGLKTLATHGLAAVNSVPWDTIANYAKPFLNKVVSTTTNIVTRCLNRVCTNYMPYFFTLLLQLCTFTRSTNSRIKASMPTTIAKNTVKSVGKFCLEASFNYLKSPNFSKLINIIIWFLLLSVCLGSLIYSTAALGVLMSNLGMPSYCTGYREGYLNSINVTIATYCTGSIPCSVCLSGLDSLDTYPSLETIQITISSFKWDLTAFGLVAEWFLAYILFTRFFYVLGLAAIMQLFFSYFAVHFISNSWLMWLIINLVQMAPISAMVRMYIFFASFYYVWKSYVHVVDGCNSSTCMMCYKRNRATRVECTTIVNGVRRSFYVYANGGKGFCKLHNWNCVNCDTFCAGSTFISDEVARDLSLQFKRPINPTDQSSYIVDSVTVKNGSIHLYFDKAGQKTYERHSLSHFVNLDNLRANNTKGSLPINVIVFDGKSKCEESSAKSASVYYSQLMCQPILLLDQALVSDVGDSAEVAVKMFDAYVNTFSSTFNVPMEKLKTLVATAEAELAKNVSLDNVLSTFISAARQGFVDSDVETKDVVECLKLSHQSDIEVTGDSCNNYMLTYNKVENMTPRDLGACIDCSARHINAQVAKSHNIALIWNVKDFMSLSEQLRKQIRSAAKKNNLPFKLTCATTRQVVNVVTTKIALKGG

SEQ ID NO: 15739 - protein, 1946 aa, Artificial Sequence
  SARS-CoV-2__MT919776.1__non-structural protein 3 (NSP3)
MAPTKVTFGDDTVIEVQGYKSVNITFELDERIDKVLNEKCSAYTVELGTEVNEFACVVADAVIKTLQPVSELLTPLGIDLDEWSMATYYLFDESGEFKLASHMYCSFYPPDEDEEEGDCEEEEFEPSTQYEYGTEDDYQGKPLEFGATSAALQPEEEQEEDWLDDDSQQTVGQQDGSEDNQTTTIQTIVEVQPQLEMELTPVVQTIEVNSFSGYLKLTDNVYIKNADIVEEAKKVKPTVVVNAANVYLKHGGGVAGALNKATNNAMQVESDDYIATNGPLKVGGSCVLSGHNLAKHCLHVVGPNVNKGKDIQLLKSAYENFNQHEVLLAPLLSAGIFGADPIHSLRVCVDTVRTNVYLAVFDKNLYDKLVSSFLEMKSEKQVEQKIAEIPKEEVKPFITESKPSVEQRKQDDKKIKACVEEVTTTLEETKFLTENLLLYIDINGNLHPDSATLVSDIDITFLKKDAPYIVGDVVQEGVLTAVVIPTKKAGGTTEMLAKALRKVPTDNYITTYPGQGLNGYTVEEAKTVLKKCKSAFYILPSIISNEKQEILGTVSWNLREMLAHAEETRKLMPVCVETKAIVSTIQRKYKGIKIQEGVVDYGARFYFYTSKTTVASLINTLNDLNETLVTMPLGYVTHGLNLEEAARYMRSLKVPATVSVSSPDAVTAYNGYLTSSSKTPEEHFIETISLAGSYKDWSYSGQSTQLGIEFLKRGDKSVYYTSNPTTFHLDGEVITFDNLKTLLSLREVRTIKVFTTVDNINLHTQVVDMSMTYGQQFGPTYLDGADVTKIKPHNSHEGKTFYVLPNDDTLRVEAFEYYHTTDPSFLGRYMSALNHTKKWKYPQVNGLTSIKWADNNCYLATALLTLQQIELKFNPPALQDAYYRARAGEAANFCALILAYCNKTVGELGDVRETMSYLFQHANLDSCKRVLNVVCKTCGQQQTTLKGVEAVMYMGTLSYEQFKKGVQIPCTCGKQATKYLVQQESPFVMMSAPPAQYELKHGTFTCASEYTGNYQCGHYKHITSKETLYCIDGALLTKSSEYKGPITDVFYKENSYTTTIKPVTYKLDGVVCTEIDPKLDNYYKKDNSYFTEQPIDLVPNQPYPNASFDNFKFVCDNIKFADDLNQLTGYKKPASRELKVTFFPDLNGDVVAIDYKHYTPSFKKGAKLLHKPIVWHVNNATNKATYKPNTWCIRCLWSTKPVETSNSFDVLKSEDAQGMDNLACEDLKPVSEEVVENPTIQKDVLECNVKTTEVVGDIILKPANNSLKITEEVGHTDLMAAYVDNSSLTIKKPNELSRVLGLKTLATHGLAAVNSVPWDTIANYAKPFLNKVVSTTTNIVTRCLNRVCTNYMPYFFTLLLQLCTFTRSTNSRIKASMPTTIAKNTVKSVGKFCLEASFNYLKSPNFSKLINIIIWFLLLSVCLGSLIYSTAALGVLMSNLGMPSYCTGYREGYLNSTNVTIATYCTGSIPCSVCLSGLDSLDTYPSLETIQITISSFKWDLTAFGLVAEWFLAYILFTRFFYVLGLAAIMQLFFSYFAVHFISNSWLMWLIINLVQMAPISAMVRMYIFFASFYYVWKSYVHVVDGCNSSTCMMCYKRNRATRVECTTIVNGVRRSFYVYANGGKGFCKLHNWNCVNCDTFCAGSTFISDEVARDLSLQFKRPINPTDQSSYIVDSVTVKNGSIHLYFDKAGQKTYERHSLSHFVNLDNLRANNTKGSLPINVIVFDGKSKCEESSAKSASVYYSQLMCQPILLLDQALVSDVGDSAEVAVKMFDAYVNTFSSTFNVPMEKLKTLVATAEAELAKNVSLDNVLSTFISAARQGFVDSDVETKDVVECLKLSHQSDIEVTGDSCNNYMLTYNKVENMTPRDLGACIDCSARHINAQVAKSHNIALIWNVKDFMSLSEQLRKQIRSAAKKNNLPFKLTCATTRQVVNVVTTKIALKGG

SEQ ID NO: 15740 - protein, 1946 aa, Artificial Sequence
  SARS-CoV-2__MT919777.1__non-structural protein 3 (NSP3)
MAPTKVTFGDDTVIEVQGYKSVNITFELDERIDKVLNEKCSAYTVELGTEVNEFACVVADAVIKTLQPVSELLTPLGIDLDEWSMVTYYLFDESGEFKLASHMYCSFYPPDEDEEEGDCEEEEFEPSTQYEYGTEDDYQGKPLEFGATSAALQPEEEQEEDWLDDDSQQTVGQQDGSEDNQTTTIQTIVEVQPQLEMELTPVVQTIEVNSFSGYLKLTDNVYIKNADIVEEVKKVKPTVVVNAANVYLKHGGGVAGALNKATNNAMQVESDDYIATNGPLKVGGSCVLSGHNLAKHCLHVVGPNVNKGEDIQLLKSAYENFNQHEVLLAPLLSAGIFGADPIHSLRVCVDTVRTNVYLAVFDKNLYDKLVSSFLEMKSEKQVEQKIAEIPKEEVKPFITESKPSVEQRKQDDKKIKACVEEVTTTLEETKFLTENLLLYIDINGNLHPDSATLVSDIDITFLKKDAPYIVGDVVQEGVLTAVVIPTKKAGGTTEMLAKALRKVPTDNYITTYPGQGLNGYTVEEAKTVLKKCKSAFYILPSIISNEKQEILGTVSWNLREMLAHAEETRKLMPVCVETKAIVSTIQRKYKGIKIQEGVVDYGARFYFYTSKTTVASLINTLNDLNETLVTMPLGYVTHGLNLEEAARYMRSLKVPATVSVSSPDAVTAYNGYLTSSSKTPEEHFIETISLAGSYKDWSYSGQSTQLGIEFLKRGDKSVYYTSNPTTFHLDGEVITFDNLKTLLSLREVRTIKVFTTVDNINLHTQVVDMSMTYGQQFGPTYLDGADVTKIKPHNSHEGKTFYVLPNDDTLRVEAFEYYHTTDPSFLGRYMSALNHTKKWKYPQVNGLTSIKWADNNCYLATALLTLQQIELKFNPPALQDAYYRARAGEAANFCALILAYCNKTVGELGDVRETMSYLFQHANLDSCKRVLNVVCKTCGQQQTTLKGVEAVMYMGTLSYEQFKKGVQIPCTCGKQATKYLVQQESPFVMMSAPPAQYELKHGTFTCASEYTGNYQCGHYKHITSKETLYCIDGALLTKSSEYKGPITDVFYKENSYTTTIKPVTYKLDGVVCTEIDPKLDNYYKKDNSYFTEQPIDLVPNQPYPNASFDNFKFVCDNIKFADDLNQLTGYKKPASRELKVTFFPDLNGDVVAIDYKHYTPSFKKGAKLLHKPIVWHVNNATNKATYKPNTWCIRCLWSTKPVETSNSFDVLKSEDAQGMDNLACEDLKPVSEEVVENPTIQKDVLECNVKTTEVVGDIILKPANNSLKITEEVGHTDLMAAYVDNSSLTIKKPNELSRVLGLKTLATHGLAAVNSVPWDTIANYAKPFLNKVVSTTTNIVTRCLNRVCTNYMPYFFTLLLQLCTFTRSTNSRIKASMPTTIAKNTVKSVGKFCLEASFNYLKSPNFSKLINIIIWFLLLSVCLGSLIYSTAALGVLMSNLGMPSYCTGYREGYLNSTNVTIATYCTGSIPCSVCLSGLDSLDTYPSLETIQITISSFKWDLTAFGLVAEWFLAYILFTRFFYVLGLAAIMQLFFSYFAVHFISNSWLMWLIINLVQMAPISAMVRMYIFFASFYYVWKSYVHVVDGCNSSTCMMCYKRNRATRVECTTIVNGVRRSFYVYANGGKGFCKLHNWNCVNCDTFCAGSTFISDEVARDLSLQFKRPINPTDQSSYIVDSVTVKNGSIHLYFDKAGQKTYERHSLSHFVNLDNLRANNTKGSLPINVIVFDGKSKCEESSAKSASVYYSQLMCQPILLLDQALVSDVGDSAEVAVKMFDAYVNTFSSTFNVPMEKLKTLVATAEAELAKNVSLDNVLSTFISAARQGFVDSDVETKDVVECLKLSHQSDIEVTGDSCNNYMLTYNKVENMTPRDLGACIDCSARHINAQVAKSHNIALIWNVKDFMSLSEQLRKQIRSAAKKNNLPFKLTCATTRQVVNVVTTKIALKGG

SEQ ID NO: 15741 - protein, 1946 aa, Artificial Sequence
  SARS-CoV-2__MT919783.1__non-structural protein 3 (NSP3)
MAPTKVTFGDDTVIEVQGYKSVNITFELDERIDKVLNEKCSAYTVELGTEVNEFACVVADAVIKTLQPVSELLTPLGIDLDEWSMATYYLFDESGEFKLASHMYCSFYPPDEDEEEGDCEEEEFEPSTQYEYGTEDDYQGKPLEFGATSAALQPEEEQEEDWLDDDSQQTVGQQDGSEDNQTTTIQTIVEVQPQLEMELTPVVQTIEVNSFSGYLKLTDNVYIKNADIVEEAKKVKPTVVVNAANVYLKHGGGVAGALNKATNNAMQVESDDYIATNGPLKVGGSCVLSGHNLAKHCLHVVGPNVNKGEDIQLLKSAYENFNQHEVLLAPLLSAGIFGADPIHSLRVCVDTVRTNVYLAVFDKNLYDKLVSSFLEMKSEKQVEQKIAEIPKEEVKPFITESKPSVEQRKQDDKKIKACVEEVTTTLEETKFLTENLLLYIDINGNLHPDSATLVSDIDITFLKKDAPYIVGDVVQEGVLTAVVIPTKKAGGTTEMLAKALRKVPTDNYITTYPGQGLNGYTVEEAKTVLKKCKSAFYILPSIISNEKQEILGTVSWNLREMLAHAEETRKLMPVCVETKAIVSTIQRKYKGIKIQEGVVDYGARFYFYTSKTTVASLINTLNDLNETLVTMPLGYVTHGLNLEEAARYMRSLKVPATVSVSSPDAVTAYNGYLTSSSKTPEEHFIETISLAGSYKDWSYSGQSTQLGIEFLKRGDKSVYYTSNPTTFHLDGEVITFDNLKTLLSLREVRTIKVFTTVDNINLHTQVVDMSMTYGQQFGPTYLDGADVTKIKPHNSHEGKTFYVLPNDDTLRVEAFEYYHTTDPSFLGRYMSALNHTKKWKYPQVNGLTSIKWADNNCYLATALLTLQQIELKFNPPALQDAYYRARAGEAANFCALILAYCNKTVGELGDVRETMSYLFQHANLDSCKRVLNVVCKTCGQQQTTLKGVEAVMYMGTLSYEQFKKGVQIPCTCGKQATKYLVQQESPFVMMSAPPAQYELKHGTFTCASEYTGNYQCGHYKHITSKETLYCIDGALLTKSSEYKGPITDVFYKENSYTTTIKPVTYKLDGIVCTEIDPKLDNYYKKDNSYFTEQPIDLVPNQPYPNASFDNFKFVCDNIKFADDLNQLTGYKKPASRELKVTFFPDLNGDVVAIDYKHYTPSFKKGAKLLHKPIVWHVNNATNKATYKPNTWCIRCLWSTKPVETSNSFDVLKSEDAQGMDNLACEDLKPVSEEVVENPTIQKDVLECNVKTTEVVGDIILKPANNSLKITEEVGHTDLMAAYVDNSSLTIKKPNELSRVLGLKTLATHGLAAVNSVPWDTIANYAKPFLNKVVSTTTNIVTRCLNRVCTNYMPYFFTLLLQLCTFTRSTNSRIKASMPTTIAKNTVKSVGKFCLEASFNYLKSPNFSKLINIIIWFLLLSVCLGSLIYSTAALGVLMSNLGMPSYCTGYREGYLNSTNVTIATYCTGSIPCSVCLSGLDSLDTYPSLETIQITISSFKWDLTAFGLVAEWFLAYILFTRFFYVLGLAAIMQLFFSYFAVHFISNSWLMWLIINLVQMAPISAMVRMYIFFASFYYVWKSYVHVVDGCNSSTCMMCYKRNRATRVECTTIVNGVRRSFYVYANGGKGFCKLHNWNCVNCDTFCAGSTFISDEVARDLSLQFKRPINPTDQSSYIVDSVTVKNGSIHLYFDKAGQKTYERHSLSHFVNLDNLRANNTKGSLPINVIVFDGKSKCEESSAKSASVYYSQLMCQPILLLDQALVSDVGDSAEVAVKMFDAYVNTFSSTFNVPMEKLKTLVATAEAELAKNVSLDNVLSTFISAARQGFVDSDVETKDVVECLKLSHQSDIEVTGDSCNNYMLTYNKVENMTPRDLGACIDCSARHINAQVAKSHNIALIWNVKDFMSLSEQLRKQIRSAAKKNNLPFKLTCATTRQVVNVVTTKIALKGG

SEQ ID NO: 15742 - protein, 1946 aa, Artificial Sequence
  SARS-CoV-2__MT919784.1__non-structural protein 3 (NSP3)
MAPTKVTFGDDTVIEVQGYKSVNITFELDERIDKVLNEKCSAYTVELGTEVNEFACVVADAVIKTLQPVSELLTPLGIDLDEWSMVTYYLFDESGEFKLASHMYCSFYPPDEDEEEGDCEEEEFEPSTQYEYGTEDDYQGKPLEFGATSAALQPEEEQEEDWLDDDSQQTVGQQDGSEDNQTTTIQTIVEVQPQLEMELTPVVQTIEVNSFSGYLKLTDNVYIKNADIVEEAKKVKPTVVVNAANVYLKHGGGVAGALNKATNNAMQVESDDYIATNGPLKVGGSCVLSGHNLAKHCLHVVGPNVNKGEDIQLLKSAYENFNQHEVLLAPLLSAGIFGADPIHSLRVCVDTVRTNVYLAVFDKNLYDKLVSSFLEMKSEKQVEQKIAEIPKEEVKPFITESKPSVEQRKQDDKKIKACVEEVTTTLEETKFLTENLLLYIDINGNLHPDSATLVSDIDITFLKKDAPYIVGDVVQEGVLTAVVIPTKKAGGTTEMLAKALRKVPTDNYITTYPGQGLNGYTVEEAKTVLKKCKSAFYILPSIISNEKQEILGTVSWNLREMLAHAEETRKLMPVCVETKAIVSTIQRKYKGIKIQEGVVDYGARFYFYTSKTTVASLINTLNDLNETLVTMPLGYVTHGLNLEEAARYMRSLKVPATVSVSSPDAVTAYNGYLTSSSKTPEEHFIETISLAGSYKDWSYSGQSTQLGIEFLKRGDKSVYYTSNPTTFHLDGEVITFDNLKTLLSLREVRTIKVFTTVDNINLHTQVVDMSMTYGQQFGPTYLDGADVTKIKPHNSHEGKTFYVLPNDDTLRVEAFEYYHTTDPSFLGRYMSALNHTKKWKYPQVNGLTSIKWADNNCYLATALLTLQQIELKFNPPALQDAYYRARAGEAANFCALILAYCNKTVGELGDVRETMSYLFQHANLDSCKRVLNVVCKTCGQQQTTLKGVEAVMYMGTLSYEQFKKGVQIPCTCGKQATKYLVQQESPFVMMSAPPAQYELKHGTFTCASEYTGNYQCGHYKHITSKETLYCIDGALLTKSSEYKGPITDVFYKENSYTTTIKPVTYKLDGVVCTEIDPKLDNYYKKDNSYFTEQPIDLVPNQPYPNASFDNFKFVCDNIKFADDLNQLTGYKKPASRELKVTFFPDLNGDVVAIDYKHYTPSFKKGAKLLHKPIVWHVNNATNKATYKPNTWCIRCLWSTKPVETSNSFDVLKSEDAQGMDNLACEDLKPVSEEVVENPTIQKDVLECNVKTTEVVGDIILKPANNSLKITEEVGHTDLMAAYVDNSSLTIKKPNELSRVLGLKTLATHGLAAVNSVPWDTIANYAKPFLNKVVSTTTNIVTRCLNRVCTNYMPYFFTLLLQLCTFTRSTNSRIKASMPTTIAKNTVKSVGKFCLEASFNYLKSPNFSKLINIIIWFLLLSVCLGSLIYSTAALGVLMSNLGMPSYCTGYREGYLNSTNVTIATYCTGSIPCSVCLSGLDSLDTYPSLETIQITISSFKWDLTAFGLVAEWFLAYILFTRFFYVLGLAAIMQLFFSYFAVHFISNSWLMWLIINLVQMAPISAMVRMYIFFASFYYVWKSYVHVVDGCNSSTCMMCYKRNRATRVECTTIVNGVRRSFYVYANGGKGFCKLHNWNCVNCDTFCAGSTFISDEVARDLSLQFKRPINPTDQSSYIVDSVTVKNGSIHLYFDKAGQKTYERHSLSHFVNLDNLRANNTKGSLPINVIVFDGKSKCEESSAKSASVYYSQLMCQPILLLDQALVSDVGDSAEVAVKMFDAYVNTFSSTFNVPMEKLKTLVATAEAELAKNVSLDNVLSTFISAARQGFVDSDVETKDVVECLKLSHQSDIEVTGDSCNNYMLTYNKVENMTPRDLGACIDCSARHINAQVAKSHNIALIWNVKDFMSLSEQLRKQIRSAAKKNNLPFKLTCATTRQVVNVVTTKIALKGG

SEQ ID NO: 15743 - protein, 1946 aa, Artificial Sequence
  SARS-CoV-2__MT919785.1__non-structural protein 3 (NSP3)
MAPTKVTFGDDTVIEVQGYKSVNITFELDERIDKVLNEKCSAYTVELGTEVNEFACVVADAVIKTLQPVSELLTPLGIDLDEWSMATYYLFDESGEFKLASHMYCSFYPPDEDEEEGDCEEEEFEPSTQYEYGTEDDYQGKPLEFGATSAALQPEEEQEEDWLDDDSQQTVGQQDGSEDNQTTTIQTIVEVQPQLEMELTPVVQTIEVNSFSGYLKLTDNVYIKNADIVEEAKKVKPTVVVNAANVYLKHGGGVAGALNKATNNAMQVESDDYIATNGPLKVGGSCVLSGHNLAKHCLHVVGPNVNKGEDIQLLKSAYENFNQHEVLLAPLLSAGIFGADPIHSLRVCVDTVRTNVYLAVFDKNLYDKLVSSFLEMKSEKQVEQKIAEIPKEEVKPFITESKPSVEQRKQDDKKIKACVEEVTTTLEETKFLTENLLLYIDINGNLHPDSATLVSDIDITFLKKDAPYIVGDVVQEGVLTAVVIPTKKAGGTTEMLAKALRKVPTDNYITTYPGQGLNGYTVEEAKTVLKKCKSAFYILPSIISNEKQEILGTVSWNLREMLAHAEETRKLMPVCVETKAIVSTIQRKYKGIKIQEGVVDYGARFYFYTSKTTVASLINTLNDLNETLVTMPLGYVTHGLNLEEAARYMRSLKVPATVSVSSPDAVTAYNGYLTSSSKTPEEHFIETISLAGSYKDWSYSGQSTQLGIEFLKRGDKSVYYTSNPTTFHLDGEVITFDNLKTLLSLREVRTIKVFTTVDNINLHTQVVDMSMTYGQQFGPTYLDGADVTKIKPHNSHEGKTFYVLPNDDTLRVEAFEYYHTTDPSFLGRYMSALNHTKKWKYPQVNGLTSIKWADNNCYLATALLTLQQIELKFNPPALQDAYYRARAGEAANFCALILAYCNKTVGELGDVRETMSYLFQHANLDSCKRVLNVVCKTCGQQQTTLKGVEAVMYMGTLSYEQFKKGVQIPCTCGKQATKYLVQQESPFVMMSAPPAQYELKHGTFTCASEYTGNYQCGHYKHITSKETLYCIDGALLTKSSEYKGPITDVFYKENSYTTTIKPVTYKLDGIVCTEIDPKLDNYYKKDNSYFTEQPIDLVPNQPYPNASFDNFKFVCDNIKFADDLNQLTGYKKPASRELKVTFFPDLNGDVVAIDYKHYTPSFKKGAKLLHKPIVWHVNNATNKATYKPNTWCIRCLWSTKPVETSNSFDVLKSEDAQGMDNLACEDLKPVSEEVVENPTIQKDVLECNVKTTEVVGDIILKPANNSLKIIEEVGHTDLMAAYVDNSSLTIKKPNELSRVLGLKTLATHGLAAVNSVPWDTIANYAKPFLNKVVSTTTNIVTRCLNRVCTNYMPYFFTLLLQLCTFTRSTNSRIKASMPTTIAKNTVKSVGKFCLEASFNYLKSPNFSKLINIIIWFLLLSVCLGSLIYSTAALGVLMSNLGMPSYCTGYREGYLNSTNVTIATYCTGSIPCSVCLSGLDSLDTYPSLETIQITISSFKWDLTAFGLVAEWFLAYILFTRFFYVLGLAAIMQLFFSYFAVHFISNSWLMWLIINLVQMAPISAMVRMYIFFASFYYVWKSYVHVVDGCNSSTCMMCYKRNRATRVECTTIVNGVRRSFYVYANGGKGFCKLHNWNCVNCDTFCAGSTFISDEVARDLSLQFKRPINPTDQSSYIVDSVTVKNGSIHLYFDKAGQKTYERHSLSHFVNLDNLRANNTKGSLPINVIVFDGKSKCEESSAKSASVYYSQLMCQPILLLDQALVSDVGDSAEVAVKMFDAYVNTFSSTFNVPMEKLKTLVATAEAELAKNVSLDNVLSTFISAARQGFVDSDVETKDVVECLKLSHQSDIEVTGDSCNNYMLTYNKVENMTPRDLGACIDCSARHINAQVAKSHNIALIWNVKDFMSLSEQLRKQIRSAAKKNNLPFKLTCATTRQVVNVVTTKIALKGG

SEQ ID NO: 15744 - protein, 1946 aa, Artificial Sequence
  SARS-CoV-2__MT919788.1__non-structural protein 3 (NSP3)
MAPTKVTFGDDTVIEVQGYKSVNITFELDERIDKVLNEKCSAYTVELGTEVNEFACVVADAVIKTLQPVSELLTPLGIDLDEWSMATYYLFDESGEFKLASHMYCSFYPPDEDEEEGDCEEEEFEPSTQYEYGTEDDYQGKPLEFGATSAALQPEEEQEEDWLDDDSQQTVGQQDGSEDNQTTTIQTIVEVQPQLEMELTPVVQTIEVNSFSGYLKLTDNVYIKNADIVEEAKKVKPTVVVNAANVYLKHGGGVAGALNKATNNAMQVESDDYIATNGPLKVGGSCVLSGHNLAKHCLHVVGPNVNKGEDIQLLKSAYENFNQHEVLLAPLLSAGIFGADPIHSLRVCVDTVRTNVYLAVFDKNLYDKLVSSFLEMKSEKQVEQKIAEIPKEEVKPFITESKPSVEQRKQDDKKIKACVEEVTTTLEETKFLTENLLLYIDINGNLHPDSATLVSDIDITFLKKDAPYIVGDVVQEGVLTAVVIPTKKAGGTTEMLAKALRKVPTDNYITTYPGQGLNGYTVEEAKTVLKKCKSAFYILPSIISNEKQEILGTVSWNLREMLAHAEETRKLMPVCVETKAIVSTIQRKYKGIKIQEGVVDYGARFYFYTSKTTVASLINTLNDLNETLVTMPLGYVTHGLNLEEAARYMRSLKVPATVSVSSPDAVTAYNGYLTSSSKTPEEHFIETISLAGSYKDWSYSGQSTQLGIEFLKRGDKSVYYTSNPTTFHLDGEVITFDNLKTLLSLREVRTIKVFTTVDNINLHTQVVDMSMTYGQQFGPTYLDGADVTKIKPHNSHEGKTFYVLPNDDTLRVEAFEYYHTTDPSFLGRYMSALNHTKKWKYPQVNGLTSIKWADNNCYLATALLTLQQIELKFNPPALQDAYYRARAGEAANFCALILAYCNKTVGELGDVRETMSYLFQHANLDSCKRVLNVVCKTCGQQQTTLKGVEAVMYMGTLSYEQFKKGVQIPCTCGKQATKYLVQQESPFVMMSAPPAQYELKHGTFTCASEYTGNYQCGHYKHITSKETLYCIDGALLTKSSEYKGPITDVFYKENSYTTTIKPVTYKLDGVVCTEIDPKLDNYYKKDNSYFTEQPIDLVPNQPYPNASFDNFKFVCDNIKFADDLNQLTGYKKPASRELKVTFFPDLNGDVVAIDYKHYTPSFKKGAKLLHKPIVWHVNNATNKATYKPNTWCIRCLWSTKPVETSNSFDVLKSEDAQGMDNLACEDLKPVSEEVVENPTIQKDVLECNVKTTEVVGDIILKPANNSLKITEEVGHTDLMAAYVDNSSLTIKKPNELSRVLGLKTLATHGLAAVNSVPWDTIANYAKPFLNKVVSTTTNIVTRCLNRVCTNYMPYFFTLLLQLCTFTRSTNSRIKASMPTTIAKNTVKSVGKFCLEASFNYLKSPNFSKLINIIIWFLLLSVCLGSLIYSTAALGVLMSNLGIPSYCTGYREGYLNSTNVTIATYCTGSIPCSVCLSGLDSLDTYPSLETIQITISSFKWDLTAFGLVAEWFLAYILFTRFFYVLGLAAIMQLFFSYFAVHFISNSWLMWLIINLVQMAPISAMVRMYIFFASFYYVWKSYVHVVDGCNSSTCMMCYKRNRATRVECTTIVNGVRRSFYVYANGGKGFCKLHNWNCVNCDTFCAGSTFISDEVARDLSLQFKRPINPTDQSSYIVDSVTVKNGSIHLYFDKAGQKTYERHSLSHFVNLDNLRANNTKGSLPINVIVFDGKSKCEESSAKSASVYYSQLMCQPILLLDQALVSDVGDSAEVAVKMFDAYVNTFSSTFNVPMEKLKTLVATAEAELAKNVSLDNVLSTFISAARQGFVDSDVETKDVVECLKLSHQSDIEVTGDSCNNYMLTYNKVENMTPRDLGACIDCSARHINAQVAKSHNIALIWNVKDFMSLSEQLRKQIRSAAKKNNLPFKLTCATTRQVVNVVTTKIALKGG

SEQ ID NO: 15745 - protein, 1946 aa, Artificial Sequence
  SARS-CoV-2__MT919996.1__non-structural protein 3 (NSP3)
MAPTKVTFGDDTVIEVQGYKSVNITFELDERIDKVLNEKCSAYTVELGTEVNEFACVVADAVIKTLQPVSELLTPLGIDLDEWSMATYYLFDESGEFKLASHMYCSFYPPDEDEEEGDCEEEEFEPSTQYEYGTEDDYQGKPLEFGATSAALQPEEEQEEDWLDDDSQQTVGQQDGSEDNQTTTIQTIVEVQPQLEMELTPVVQTIEVNSFSGYLKLTDNVYIKNADIVEEAKKVKPTVVVNAANVYLKHGGGVAGALNKATNNAMQVESDDYIATNGPLKVGGSCVLSGHNLAKHCLHVVGPNVNKGEDIQLLKSAYENFNQHEVLLAPLLSAGIFGADPIHSLRVCVDTVRTNVYLAVFDKNLYDKLVSSFLEMKSEKQVEQKIAEIPKEEVKPFITESKPSVEQRKQDDKKIKACVEEVTTTLEETKFLTENLLLYIDINGNLHPDSATLVSDIDITFLKKDAPYIVGDVVQEGVLTAVVIPTKKAGGTTEMLAKALRKVPTDNYITTYPGQGLNGYTVEEAKTVLKKCKSAFYILPSIISNEKQEILGTVSWNLREMLAHAEETRKLMPVCVETKAIVSTIQRKYKGIKIQEGVVDYGARFYFYTSKTTVASLINTLNDLNETLVTMPLGYVTHGLNLEEAARYMRSLKVPATVSVSSPDAVTAYNGYLTSSSKTPEEHFIETISLAGSYKDWSYSGQSTQLGIEFLKRGDKSVYYTSNPTTFHLDGEVITFDNLKTLLSLREVRTIKVFTTVDNINLHTQVVDMSMTYGQQFGPTYLDGADVTKIKPHNSHEGKTFYVLPNDDTLRVEAFEYYHTTDPSFLGRYMSALNHTKKWKYPQVNGLTSIKWADNNCYLATALLTLQQIELKFNPPALQDAYYRARAGEAANFCALILAYCNKTVGELGDVRETMSYLFQHANLDSCKRVLNVVCKTCGQQQTTLKGVEAVMYMGTLSYEQFKKGVQIPCTCGKQATKYLVQQESPFVMMSAPPAQYELKHGTFTCASEYTGNYQCGHYKHITSKETLYCIDGALLTKSSEYKGPITDVFYKENSYTTTIKPVTYKLDGVVCTEIDPKLDNYYKKDNSYFTEQPIDLVPNQPYPNASFDNFKFVCDNIKFADDLNQLTGYKKPASRELKVTFFPDLNGDVVAIDYKHYTPSFKKGAKLLHKPIVWHVNNATNKATYKPNTWCIRCLWSTKPVETSNSFDVLKSEDAQGMDNLACEDLKPVSEEVVENPTIQKDVLECNVKTTEVVGDIILKPANNSLKITEEVGHTDLMAAYVDNSSLTIKKPNELFRVLGLKTLATHGLAAVNSVPWDTIANYAKPFLNKVVSTTTNIVTRCLNRVCTNYMPYFFTLLLQLCTFTRSTNSRIKASMPTTIAKNTVKSVGKFCLEASFNYLKSPNFSKLINIIIWFLLLSVCLGSLIYSTAALGVLMSNLGMPSYCTGYREGYLNSTNVTIATYCTGSIPCSVCLSGLDSLDTYPSLETIQITISSFKWDLTAFGLVAEWFLAYILFTRFFYVLGLAAIMQLFFSYFAVHFISNSWLMWLIINLVQMAPISAMVRMYIFFASFYYVWKSYVHVVDGCNSSTCMMCYKRNRATRVECTTIVNGVRRSFYVYANGGKGFCKLHNWNCVNCDTFCAGSTFISDEVARDLSLQFKRPINPTDQSSYIVDSVTVKNGSIHLYFDKAGQKTYERHSLSHFVNLDNLRANNTKGSLPINVIVFDGKSKCEESSAKSASVYYSQLMCQPILLLDQALVSDVGDSAEVAVKMFDAYVNTFSSTFNVPMEKLKTLVATAEAELAKNVSLDNVLSTFISAARQGFVDSDVETKDVVECLKLSHQSDIEVTGDSCNNYMLTYNKVENMTPRDLGACIDCSARHINAQVAKSHNIALIWNVKDFMSLSEQLRKQIRSAAKKNNLPFKLTCATTRQVVNVVTTKIALKGG

SEQ ID NO: 15746 - protein, 1946 aa, Artificial Sequence
  SARS-CoV-2__MT919997.1__non-structural protein 3 (NSP3)
MAPTKVTFGDDTVIEVQGYKSVNITFELDERIDKVLNEKCSAYTVELGTEVNEFACVVADAVIKTLQPVSELLTPLGIDLDEWSMATYYLFDESGEFKLASHMYCSFYPSDEDEEEGDCEEEEFEPSTQYEYGTEDDYQGKPLEFGATSAALQPEEEQEEDWLDDDSQQTVGQQDGSEDNQTTTIQTIVEVQPQLEMELTPVVQTIEVNSFSGYLKLTDNVYIKNADIVEEAKKVKPTVVVNAANVYLKHGGGVAGALNKATNNAMQVESDDYIATNGPLKVGGSCVLSGHNLAKHCLHVVGPNVNKGEDIQLLKSAYENFNQHEVLLAPLLSAGIFGADPIHSLRVCVDTVRTNVYLAVFDKNLYDKLVSSFLEMKSEKQVEQKIAEIPKEEVKPFITESKPSVEQRKQDDKKIKACVEEVTTTLEETKFLTENLLLYIDINGNLHPDSATLVSDIDITFLKKDAPYIVGDVVQEGVLTAVVIPTKKAGGTTEMLAKALRKVPTDNYITTYPGQGLNGYTVEEAKTVLKKCKSAFYILPSIISNEKQEILGTVSWNLREMLAHAEETRKLMPVCVETKAIVSTIQRKYKGIKIQEGVVDYGARFYFYTSKTTVASLINTLNDLNETLVTMPLGYVTHGLNLEEAARYMRSLKVPATVSVSSPDAVTAYNGYLTSSSKTPEEHFIETISLAGSYKDWSYSGQSTQLGIEFLKRGDKSVYYTSNPTTFHLDGEVITFDNLKTLLSLREVRTIKVFTTVDNINLHTQVVDMSMTYGQQFGPTYLDGADVTKIKPHNSHEGKTFYVLPNDDTLRVEAFEYYHTTDPSFLGRYMSALNHTKKWKYPQVNGLTSIKWADNNCYLATALLTLQQIELKFNPPALQDAYYRARAGEAANFCALILAYCNKTVGELGDVRETMSYLFQHANLDSCKRVLNVVCKTCGQQQTTLKGVEAVMYMGTLSYEQFKKGVQIPCTCGKQATKYLVQQESPFVMMSAPPAQYELKHGTFTCASEYTGNYQCGHYKHITSKETLYCIDGALLTKSSEYKGPITDVFYKENSYTTTIKPVTYKLDGVVCTEIDPKLDNYYKKDNSYFTEQPIDLVPNQPYPNASFDNFKFVCDNIKFADDLNQLTGYKKPASRELKVTFFPDLNGDVVAIDYKHYTPSFKKGAKLLHKPIVWHVNNATNKATYKPNTWCIRCLWSTKPVETSNSFDVLKSEDAQGMDNLACEDLKPVSEEVVENPTIQKDVLECNVKTTEVVGDIILKPANNSLKITEEVGHTDLMAAYVDNSSLTIKKPNELSRVLGLKTLATHGLAAVNSVPWDTIANYAKPFLNKVVSTTTNIVTRCLNRVCTNYMPYFFTLLLQLCTFTRSTNSRIKASMPTTIAKNTVKSVGKFCLEASFNYLKSPNFSKLINIIIWFLLLSVCLGSLIYSTAALGVLMSNLGMPSYCTGYREGYLNSTNVTIATYCTGSIPCSVCLSGLDSLDTYPSLETIQITISSFKWDLTAFGLVAEWFLAYILFTRFFYVLGLAAIMQLFFSYFAVHFISNSWLMWLIINLVQMAPISAMVRMYIFFASFYYVWKSYVHVVDGCNSSTCMMCYKRNRATRVECTTIVNGVRRSFYVYANGGKGFCKLHNWNCVNCDTFCAGSTFISDEVARDLSLQFKRPINPTDQSSYIVDSVTVKNGSIHLYFDKAGQKTYERHSLSHFVNLDNLRANNTKGSLPINVIVFDGKSKCEESSAKSASVYYSQLMCQPILLLDQALVSDVGDSAEVAVKMFDAYVNTFSSTFNVPMEKLKTLVATAEAELAKNVSLDNVLSTFISAARQGFVDSDVETKDVVECLKLSHQSDIEVTGDSCNNYMLTYNKVENMTPRDLGACIDCSARHINAQVAKSHNIALIWNVKDFMSLSEQLRKQIRSAAKKNNLPFKLTCATTRQVVNVVTTKIALKGG

SEQ ID NO: 15747 - protein, 1946 aa, Artificial Sequence
  SARS-CoV-2__MT919999.1__non-structural protein 3 (NSP3)
MAPTKVTFGDDTVIEVQGYKSVNITFELDERIDKVLNEKCSAYTVELGTEVNEFACVVADAVIKTLQPVSELLTPLGIDLDEWSMATYYLFDESGEFKLASHMYCSFYPPDEDEEEGDCEEEEFEPSTQYEYGTEDDYQGKPLEFGATSAALQLEEEQEEDWLDDDSQQTVGQQDGSEDNQTTTIQTIVEVQPQLEMELTPVVQTIEVNSFSGYLKLTDNVYIKNADIVEEAKKVKPTVVVNAANVYLKHGGGVAGALNKATNNAMQVESDDYIATNGPLKVGGSCVLSGHNLAKHCLHVVGPNVNKGEDIQLLKSAYENFNQHEVLLAPLLSAGIFGADPIHSLRVCVDTVRTNVYLAVFDKNLYDKLVSSFLEMKSEKQVEQKIAEIPKEEVKPFITESKPSVEQRKQDDKKIKACVEEVTTTLEETKFLTENLLLYIDINGNLHPDSATLVSDIDITFLKKDAPYIVGDVVQEGVLTAVVIPTKKAGGTTEMLAKALRKVPTDNYITTYPGQGLNGYTVEEAKTVLKKCKSAFYILPSIISNEKQEILGTVSWNLREMLAHAEETRKLMPVCVETKAIVSTIQRKYKGIKIQEGVVDYGARFYFYTSKTTVASLINTLNDLNETLVTMPLGYVTHGLNLEEAARYMRSLKVPATVSVSSPDAVTAYNGYLTSSSKTPEEHFIETISLAGSYKDWSYSGQSTQLGIEFLKRGDKSVYYTSNPTTFHLDGEVITFDNLKTLLSLREVRTIKVFTTVDNINLHTQVVDMSMTYGQQFGPTYLDGADVTKIKPHNSHEGKTFYVLPNDDTLRVEAFEYYHTTDPSFLGRYMSALNHTKKWKYPQVNGLTSIKWADNNCYLATALLTLQQIELKFNPPALQDAYYRARAGEAANFCALILAYCNKTVGELGDVRETMSYLFQHANLDSCKRVLNVVCKTCGQQQTTLKGVEAVMYMGTLSYEQFKKGVQIPCTCGKQATKYLVQQESPFVMMSAPPAQYELKHGTFTCASEYTGNYQCGHYKHITSKETLYCIDGALLTKSSEYKGPITDVFYKENSYTTTIKPVTYKLDGVVCTEIDPKLDNYYKKDNSYFTEQPIDLVPNQPYPNASFDNFKFVCDNIKFADDLNQLTGYKKPASRELKVTFFPDLNGDVVAIDYKHYTPSFKKGAKLLHKPIVWHVNNATNKATYKPNTWCIRCLWSTKPVETSNSFDVLKSEDAQGMDNLACEDLKPVSEEVVENPTIQKDVLECNVKTTEVVGDIILKPANNSLKITEEVGHTDLMAAYVDNSSLTIKKPNELSRVLGLKTLATHGLAAVNSVPWDTIANYAKPFLNKVVSTTTNIVTRCLNRVCTNYMPYFFTLLLQLCTFTRSTNSRIKASMPTTIAKNTVKSVGKFCLEASFNYLKSPNFSKLINIIIWFLLLSVCLGSLIYSTAALGVLMSNLGMPSYCTGYREGYLNSTNVTIATYCTGSIPCSVCLSGLDSLDTYPSLETIQITISSFKWDLTAFGLVAEWFLAYILFTRFFYVLGLAAIMQLFFSYFAVHFISNSWLMWLIINLVQMAPISAMVRMYIFFASFYYVWKSYVHVVDGCNSSTCMMCYKRNRATRVECTTIVNGVRRSFYVYANGGKGFCKLHNWNCVNCDTFCAGSTFISDEVARDLSLQFKRPINPTDQSSYIVDSVTVKNGSIHLYFDKAGQKTYERHSLSHFVNLDNLRANNTKGSLPINVIVFDGKSKCEESSAKSASVYYSQLMCQPILLLDQALVSDVGDSAEVAVKMFDAYVNTFSSTFNVPMEKLKTLVATAEAELAKNVSLDNVLSTFISAARQGFVDSDVETKDVVECLKLSHQSDIEVTGDSCNNYMLTYNKVENMTPRDLGACIDCSARHINAQVAKSHNIALIWNVKDFMSLSEQLRKQIRSAAKKNNLPFKLTCATTRQVVNVVTTKIALKGG

SEQ ID NO: 15748 - protein, 1946 aa, Artificial Sequence
  SARS-CoV-2__MT920003.1__non-structural protein 3 (NSP3)
MAPTKVTFGDDTVIEVQGYKSVNITFELDERIDKVLNEKCSAYTVELGTEVNEFACVVADAVIKTLQPVSELLTPLGIDLDEWSMATYYLFDESGEFKLASHMYCSFYPPDEDEEEGDCEEEEFEPSTQYEYGTEDDYQGKPLEFGATSAALQPEEEQEEDWLDDDSQQTVGQQDGSEDNQTTTIQTIVEVQPQLEMELTPVVQTIEVNSFSGYLKLTDNVYIKNADIVEEAKKVKPTVVVNAANVYLKHGGGVAGALNKATNNAMQVESDDYIATNGPLKVGGSCVLSGHNLAKHCLHVVGPNVNKGEDIQLLKSAYENFNQHEVLLAPLLSAGIFGADPIHSLRVCVDTVRTNVYLAVFDKNLYDKLVSSFLEMKSEKQVEQKIAEIPKEEVKPFITESKPSVEQRKQDDKKIKACVEEVTTTLEETKFLTENLLLYIDINGNLHPDSATLVSDIDITFLKKDAPYIVGDVVQEGVLTAVVIPTKKAGGTTEMLAKALRKVPTDNYITTYPGQGLNGYTVEEAKTVLKKCKSAFYILPSIISNEKQEILGTVSWNLREMLAHAEETRKLMPVCVETKAIVSTIQRKYKGIKIQEGVVDYGARFYFYTSKTTVASLINTLNDLNETLVTMPLGYVTHGLNLEEAARYMRSLKVPATVSVSSPDAVTAYNGYLTSSSKTPEEHFIETISLAGSYKDWSYSGQSTQLGIEFLKRGDKSVYYTSNPTTFHLDGEVITFDNLKTLLSLREVRTIKVFTTVDNINLHTQVVDMSMTYGQQFGPTYLDGADVTKIKPHNSHEGKTFYVLPNDDTLRVEAFEYYHTTDPSFLGRYMSALNHTKKWKYPQVNGLTSIKWADNNCYLATALLTLQQIELKFNPPALQDAYYRARAGEAANFCALILAYCNKTVGELGDVRETMSYLFQHANLDSCKRVLNVVCKTCGQQQTTLKGVEAVMYMGTLSYEQFKKGVQIPCTCGKQATKYLVQQESPFVMMSAPPAQYELKHGTFTCASEYTGNYQCGHYKHITSKETLYCIDGTLLTKSSEYKGPITDVFYKENSYTTTIKPVTYKLDGVVCTEIDPKLDNYYKKDNSYFTEQPIDLVPNQPYPNASFDNFKFVCDNIKFADDLNQLTGYKKPASRELKVTFFPDLNGDVVAIDYKHYTPSFKKGAKLLHKPIVWHVNNATNKATYKPNTWCIRCLWSTKPVETSNSFDVLKSEDAQGMDNLACEDLKPVSEEVVENPTIQKDVLECNVKTTEVVGDIILKPANNSLKITEEVGHTDLMAAYVDNSSLTIKKPNELSRVLGLKTLATHGLAAVNSVPWDTIANYAKPFLNKVVSTTTNIVTRCLNRVCTNYMPYFFTLLLQLCTFTRSTNSRIKASMPTTIAKNTVKSVGKFCLEASFNYLKSPNFSKLINIIIWFLLLSVCLGSLIYSTAALGVLMSNLGMPSYCTGYREGYLNSTNVTIATYCTGSIPCSVCLSGLDSLDTYPSLETIQITISSFKWDLTAFGLVAEWFLAYILFTRFFYVLGLAAIMQLFFSYFAVHFISNSWLMWLIINLVQMAPISAMVRMYIFFASFYYVWKSYVHVVDGCNSSTCMMCYKRNRATRVECTTIVNGVRRSFYVYANGGKGFCKLHNWNCVNCDTFCAGSTFISDEVARDLSLQFKRPINPTDQSSYIVDSVTVKNGSIHLYFDKAGQKTYERHSLSHFVNLDNLRANNTKGSLPINVIVFDGKSKCEESSAKSASVYYSQLMCQPILLLDQALVSDVGDSAEVAVKMFDAYVNTFSSTFNVPMEKLKTLVATAEAELAKNVSLDNVLSTFISAARQGFVDSDVETKDVVECLKLSHQSDIEVTGDSCNNYMLTYNKVENMTPRDLGACIDCSARHINAQVAKSHNIALIWNVKDFMSLSEQLRKQIRSAAKKNNLPFKLTCATTRQVVNVVTTKIALKGG

SEQ ID NO: 15749 - protein, 1946 aa, Artificial Sequence
  SARS-CoV-2__MT920013.1__non-structural protein 3 (NSP3)
MAPTKVTFGDDTVIEVQGYKSVNITFELDERIDKVLNEKCSAYTVELGTEVNEFACVVADAVIKTLQPVSELLTPLGIDLDEWSMATYYLFDESGEFKLASHMYCSFYPPDEDEEEGDCEEEEFEPSTQYEYGTEDDYQGKPLEFGATSAALQPEEEQEEDWLDDDSQQTVGQQDGSEDNQTTTIQTIVEVQPQLEMELTPVVQTIEVNSFSGYLKLTDNVYIKNADIVEEAKKVKPTVVVNAANVYLKHGGGVAGALNKATNNAMQVESDDYIATNGPLKVGGSCVLSGHNLAKHCLHVVGPNVNKGEDIQLLKSAYENFNQHEVLLAPLLSAGIFGADPIHSLRVCVDTVRTNVYLAVFDKNLYDKLVSSFLEMKSEKQVEQKIAEIPKEEVKPFITESKPSVEQRKQDDKKIKACVEEVTTTLEETKFLTENLLLYIDINGNLHPDSATLVSDIDITFLKKDAPYIVGDVVQEGVLTAVVIPTKKAGGTTEMLAKALRKVPTDNYITTYPGQGLNGYTVEEAKTVLKKCKSAFYILPSIISNEKQEILGTVSWNLREMLAHAEETRKLMPVCVETKAIVSTIQRKYKGIKIQEGVVDYGARFYFYTSKTTVASLINTLNDLNETLVTMPLGYVTHGLNLEEAARYMRSLKVPATVSVSSPDAVTAYNGYLTSSSKTPEEHFIETISLAGSYKDWSYSGQSTQLGIEFLKRGDKSVYYTSNPTTFHLDGEVITFDNLKTLLSLREVRTIKVFTTVDNINLHTQVVDMSMTYGQQFGPTYLDGADVTKIKPHNSHEGKTFYVLPNDDTLRVEAFEYYHTTDSSFLGRYMSALNHTKKWKYPQVNGLTSIKWADNNCYLATALLTLQQIELKFNPPALQDAYYRARAGEAANFCALILAYCNKTVGELGDVRETMSYLFQHANLDSCKRVLNVVCKTCGQQQTTLKGVEAVMYMGTLSYEQFKKGVQIPCTCGKQATKYLVQQESPFVMMSAPPAQYELKHGTFTCASEYTGNYQCGHYKHITSKETLYCIDGALLTKSSEYKGPITDVFYKENSYTTTIKPVTYKLDGVVCTEIDPKLDNYYKKDNSYFTEQPIDLVPNQPYPNASFDNFKFVCDNIKFADDLNQLTGYKKPASRELKVTFFPDLNGDVVAIDYKHYTPSFKKGAKLLHKPIVWHVNNATNKATYKPNTWCIRCLWSTKPVETSNSFDVLKSEDAQGMDNLACEDLKPVSEEVVENPTIQKDVLECNVKTTEVVGDIILKPANNSLKITEEVGHTDLMAAYVDNSSLTIKKPNELSRVLGLKTLATHGLAAVNSVPWDTIANYAKPFLNKVVSTTTNIVTRCLNRVCTNYMPYFFTLLLQLCTFTRSTNSRIKASMPTTIAKNTVKSVGKFCLEASFNYLKSPNFSKLINIIIWFLLLSVCLGSLIYSTAALGVLMSNLGMPSYCTGYREGYLNSTNVTIATYCTGSIPCSVCLSGLDSLDTYPSLETIQITISSFKWDLTAFGLVAEWFLAYILFTRFFYVLGLAAIMQLFFSYFAVHFISNSWLMWLIINLVQMAPISAMVRMYIFFASFYYVWKSYVHVVDGCNSSTCMMCYKRNRATRVECTTIVNGVRRSFYVYANGGKGFCKLHNWNCVNCDTFCAGSTFISDEVARDLSLQFKRPINPTDQSSYIVDSVTVKNGSIHLYFDKAGQKTYERHSLSHFVNLDNLRANNTKGSLPINVIVFDGKSKCEESSAKSASVYYSQLMCQPILLLDQALVSDVGDSAEVAVKMFDAYVNTFSSTFNVPMEKLKTLVATAEAELAKNVSLDNVLSTFISAARQGFVDSDVETKDVVECLKLSHQSDIEVTGDSCNNYMLTYNKVENMTPRDLGACIDCSARHINAQVAKSHNIALIWNVKDFMSLSEQLRKQIRSAAKKNNLPFKLTCATTRQVVNVVTTKIALKGG

SEQ ID NO: 15750 - protein, 1946 aa, Artificial Sequence
  SARS-CoV-2__MT920018.1__non-structural protein 3 (NSP3)
MAPTKVTFGDDTVIEVQGYKSVNITFELDERIDKVLNEKCSAYTVELGTEVNEFACVVADAVIKTLQPVSELLTPLGIDLDEWSMATYYLFDESGEFKLASHMYCSFYPPDEDEEEGDCEEEEFEPSTQYEYGTEDDYQGKPLEFGATSAALQPEEEQEEDWLDDDSQQTVGQQDGSEDNQTTTIQTIVEVQPQLEMELTPVVQTIEVNSFSGYLKLTDNVYIKNADIVEEAKKVKPTVVVNAANVYLKNGGGVAGALNKATNNAMQVESDDYIATNGPLKVGGSCVLSGHNLAKHCLHVVGPNVNKGEDIQLLKSAYENFNQHEVLLAPLLSAGIFGADPIHSLRVCVDTVRTNVYLAVFDKNLYDKLVSSFLEMKSEKQVEQKIAEIPKEEVKPFITESKPSVEQRKQDDKKIKACVEEVTTTLEETKFLTENLLLYIDINGNLHPDSATLVSDIDITFLKKDAPYIVGDVVQEGVLTAVVIPTKKAGGTTEMLAKALRKVPTDNYITTYPGQGLNGYTVEEAKTVLKKCKSAFYILPSIISNEKQEILGTVSWNLREMLAHAEETRKLMPVCVETKAIVSTIQRKYKGIKIQEGVVDYGARFYFYTSKTTVASLINTLNDLNETLVTMPLGYVTHGLNLEEAARYMRSLKVPATVSVSSPDAVTAYNGYLTSSSKTPEEHFIETISLAGSYKDWSYSGQSTQLGIEFLKRGDKSVYYTSNPTTFHLDGEVITFDNLKTLLSLREVRTIKVFTTVDNINLHTQVVDMSMTYGQQFGPTYLDGADVTKIKPHNSHEGKTFYVLPNDDTLRVEAFEYYHTTDPSFLGRYMSALNHTKKWKYPQVNGLTSIKWADNNCYLATALLTLQQIELKFNPPALQDAYYRARAGEAANFCALILAYCNKTVGELGDVRETMSYLFQHANLDSCKRVLNVVCKTCGQQQTTLKGVEAVMYMGTLSYEQFKKGVQIPCTCGKQATKYLVQQESPFVMMSAPPAQYELKHGTFTCASEYTGNYQCGHYKHITSKETLYCIDGALLTKSSEYKGPITDVFYKENSYTTTIKPVTYKLDGVVCTEIDPKLDNYYKKDNSYFTEQPIDLVPNQPYPNASFDNFKFVCDNIKFADDLNQLTGYKKPASRELKVTFFPDLNGDVVAIDYKHYTPSFKKGAKLLHKPIVWHVNNATNKATYKPNTWCIRCLWSTKPVETSNSFDVLKSEDAQGMDNLACEDLKPVSEEVVENPTIQKDVLECNVKTTEVVGDIILKPANNSLKITEEVGHTDLMAAYVDNSSLTIKKPNELSRVLGLKTLATHGLAAVNSVPWDTIANYAKPFLNKVVSTTTNIVTRCLNRVCTNYMPYFFTLLLQLCTFTRSTNSRIKASMPTTIAKNTVKSVGKFCLEASFNYLKSPNFSKLINIIIWFLLLSVCLGSLIYSTAALGVLMSNLGMPSYCTGYREGYLNSTNVTIATYCTGSIPCSVCLSGLDSLDTYPSLETIQITISSFKWDLTAFGLVAEWFLAYILFTRFFYVLGLAAIMQLFFSYFAVHFISNSWLMWLIINLVQMAPISAMVRMYIFFASFYYVWKSYVHVVDGCNSSTCMMCYKRNRATRVECTTIVNGVRRSFYVYANGGKGFCKLHNWNCVNCDTFCAGSTFISDEVARDLSLQFKRPINPTDQSSYIVDSVTVKNGSIHLYFDKAGQKTYERHSLSHFVNLDNLRANNTKGSLPINVIVFDGKSKCEESSAKSASVYYSQLMCQPILLLDQALVSDVGDSAEVAVKMFDAYVNTFSSTFNVPMEKLKTLVATAEAELAKNVSLDNVLSTFISAARQGFVDSDVETKDVVECLKLSHQSDIEVTGDSCNNYMLTYNKVENMTPRDLGACIDCSARHINAQVAKSHNIALIWNVKDFMSLSEQLRKQIRSAAKKNNLPFKLTCATTRQVVNVVTTKIALKGG

SEQ ID NO: 15751 - protein, 1946 aa, Artificial Sequence
  SARS-CoV-2__MT920036.1__non-structural protein 3 (NSP3)
MAPTKVTFGDDTVIEVQGYKSVNITFELDERIDKVLNEKCSAYTVELGTEVNEFACVVADAVIKTLQPVSELLTPLGIDLDEWSMATYYLFDESGEFKLASHMYCSFYPPDEDEEEGDCEEEEFEPSTQYEYGTEDDYQGKPLEFGATSAALQPEEEQEEDWLDDDSQQTVGQQDGSEDNQTTTIQTIVEVQPQLEMELTPVVQTIEVNSFSGYLKLTDNVYIKNADIVEEAKKVKPTVVVNAANVYLKHGGGVAGALNKATNNAMQVESDDYIATNGPLKVGGSCVLSGHNLAKHCLHVVGPNVNKGEDIQLLKSAYENFNQHEVLLAPLLSAGIFGADPIHSLRVCVDTVRTNVYLAVFDKNLYDKLVSSFLEMKSEKQVEQKIAEIPKEEVKPFITESKPSVEQRKQDDKKIKACVEEVTTTLEETKFLTENLLLYIDINGNLHPDSATLVSDIDITFLKKDAPYIVGDVVQEGVLTAVVIPTKKAGGTTEMLAKALRKVPTDNYITTYPGQGLNGYTVEEAKTVLKKCKSAFYILPSIISNEKQEILGTVSWNLREMLAHAEETRKLMPVCVETKAIVSTIQRKYKGIKIQEGVVDYGARFYFYTSKTTVASLINTLNDLNETLVTMPLGYVTHGLNLEEAARYMRSLKVPATVSVSSPDAVTAYNGYLTSSSKTPEEHFIETISLAGSYKDWSYSGQSTQLGIEFLKRGDKSVYYTSNPTTFHLDGEVITFDNLKTLLSLREVRTIKVFTTVDNINLHTQVVDMSMTYGQQFGPTYLDGADVTKIKPHNSHEGKTFYVLPNDDTLRVEAFEYYHTTDPSFLGRYMSALNHTKKWKYPQVNGLTSIKWADNNCYLATALLTLQQIELKFNPPALQDAYYRARAGEAANFCALILAYCNKTVGELGDVRETMSYLFQHANLDSCKRVLNVVCKTCGQQQTTLKGVEAVMYMGTLSYEQFKKGVQIPCTCGKQATKYLVQQESPFVMMSAPPAQYELKHGTFTCASEYTGNYQCGHYKHITSKETLYCIDGALLTKSSEYKGPITDVFYKENSYTTTIKPVTYKLDGVVCTEIDPKLDNYYKKDNSYFTEQPIDLVPNQPYPNASFDNFKFVCDNIKFADDLNQLTGYKKPALRELKVTFFPDLNGDVVAIDYKHYTPSFKKGAKLLHKPIVWHVNNATNKATYKPNTWCIRCLWSTKPVETSNSFDVLKSEDAQGMDNLACEDLKPVSEEVVENPTIQKDVLECNVKTTEVVGDIILKPANNSLKITEEVGHTDLMAAYVDNSSLTIKKPNELSRVLGLKTLATHGLAAVNSVPWDTIANYAKPFLNKVVSTTTNIVTRCLNRVCTNYMPYFFTLLLQLCTFTRSTNSRIKASMPTTIAKNTVKSVGKFCLEASFNYLKSPNFSKLINIIIWFLLLSVCLGSLIYSTAALGVLMSNLGMPSYCTGYREGYLNSTNVTIATYCTGSIPCSVCLSGLDSLDTYPSLETIQITISSFKWDLTAFGLVAEWFLAYILFTRFFYVLGLAAIMQLFFSYFAVHFISNSWLMWLIINLVQMAPISAMVRMYIFFASFYYVWKSYVHVVDGCNSSTCMMCYKRNRATRVECTTIVNGVRRSFYVYANGGKGFCKLHNWNCVNCDTFCAGSTFISDEVARDLSLQFKRPINPTDQSSYIVDSVTVKNGSIHLYFDKAGQKTYERHSLSHFVNLDNLRANNTKGSLPINVIVFDGKSKCEESSAKSASVYYSQLMCQPILLLDQALVSDVGDSAEVAVKMFDAYVNTFSSTFNVPMEKLKTLVATAEAELAKNVSLDNVLSTFISAARQGFVDSDVETKDVVECLKLSHQSDIEVTGDSCNNYMLTYNKVENMTPRDLGACIDCSARHINAQVAKSHNIALIWNVKDFMSLSEQLRKQIRSAAKKNNLPFKLTCATTRQVVNVVTTKIALKGG

SEQ ID NO: 15752 - protein, 1946 aa, Artificial Sequence
  SARS-CoV-2__MT921159.1__non-structural protein 3 (NSP3)
MAPTKVTFGDDTVIEVQGYKSVNITFELDERIDKVLNEKCSAYTVELGTEVNEFACVVADAVIKTLQPVSELLTPLGIDLDEWSMATYYLFDESGEFKLASHMYCSFYPPDEDEEEGDCEEEEFEPSTQYEYGTEDDYQGKPLEFGATSAALQPEEEQEEDWLDDDSQQTVGQQDGSEDNQTTTIQTIVEVQPQLEMELTPVVQTIEVNSFSGYLKLTDNVYIKNADIVEEAKKVKPTVVVNAANVYLKHGGGVAGALNKATNNAMQVESDDYIATNGPLKVGGSCVLSGHNLAKHCLHVVGPNVNKGEDIQLLKSAYENFNQHEVLLAPLLSAGIFGADPIHSLRVCVDTVRTNVYLAVFDKNLYDKLVSSFLETKSEKQVEQKIAEIPKEEVKPFITESKPSVEQRKQDDKKIKACVEEVTTTLEETKFLTENLLLYIDINGNLHPDSATLVSDIDITFLKKDAPYIVGDVVQEGVLTAVVIPTKKAGGTTEMLAKALRKVPTDNYITTYPGQGLNGYTVEEAKTVLKKCKSAFYILPSIISNEKQEILGTVSWNLREMLAHAEETRKLMPVCVETKAIVSTIQRKYKGIKIQEGVVDYGARFYFYTSKTTVASLINTLNDLNETLVTMPLGYVTHGLNLEEAARYMRSLKVPATVSVSSPDAVTAYNGYLTSSSKTPEEHFIETISLAGSYKDWSYSGQSTQLGIEFLKRGDKSVYYTSNPTTFHLDGEVITFDNLKTLLSLREVRTIKVFTTVDNINLHTQVVDMSMTYGQQFGPTYLDGADVTKIKPHNSHEGKTFYVLPNDDTLRVEAFEYYHTTDPSFLGRYMSALNHTKKWKYPQVNGLTSIKWADNNCYLATALLTLQQIELKFNPPALQDAYYRARAGEAANFCALILAYCNKTVGELGDVRETMSYLFQHANLDSCKRVLNVVCKTCGQQQTTLKGVEAVMYMGTLSYEQFKKGVQIPCTCGKQATKYLVQQESPFVMMSAPPAQYELKHGTFTCASEYTGNYQCGHYKHITSKETLYCIDGALLTKSSEYKGPITDVFYKENSYTTTIKPVTYKLDGVVCTEIDPKLDNYYKKDNSYFTEQPIDLVPNQPYPNASFDNFKFVCDNIKFADDLNQLTGYKKPASRELKVTFFPDLNGDVVAIDYKHYTPSFKKGAKLLHKPIVWHVNNATNKATYKPNTWCIRCLWSTKPVETSNSFDVLKSEDAQGMDNLACEDLKPVSEEVVENPTIQKDVLECNVKTTEVVGDIILKPANNSLKITEEVGHTDLMAAYVDNSSLTIKKPNELSRVLGLKTLATHGLAAVNSVPWDTIANYAKPFLNKVVSTTTNIVTRCLNRVCTNYMPYFFTLLLQLCTFTRSTNSRIKASMPTTIAKNTVKSVGKFCLEASFNYLKSPNFSKLINIIIWFLLLSVCLGSLIYSTAALGVLMSNLGMPSYCTGYREGYLNSTNVTIATYCTGSIPCSVCLSGLDSLDTYPSLETIQITISSFKWDLTAFGLVAEWFLAYILFTRFFYVLGLAAIMQLFFSYFAVHFISNSWLMWLIINLVQMAPISAMVRMYIFFASFYYVWKSYVHVVDGCNSSTCMMCYKRNRATRVECTTIVNGVRRSFYVYANGGKGFCKLHNWNCVNCDTFCAGSTFISDEVARDLSLQFKRPINPTDQSSYIVDSVTVKNGSIHLYFDKAGQKTYERHSLSHFVNLDNLRANNTKGSLPINVIVFDGKSKCEESSAKSASVYYSQLMCQPILLLDQALVSDVGDSAEVAVKMFDAYVNTFSSTFNVPMEKLKTLVATAEAELAKNVSLDNVLSTFISAARQGFVDSDVETKDVVECLKLSHQSDIEVTGDSCNNYMLTYNKVENMTPRDLGACIDCSARHINAQVAKSHNIALIWNVKDFMSLSEQLRKQIRSAAKKNNLPFKLTCATTRQVVNVVTTKIALKGG

SEQ ID NO: 15753 - protein, 1946 aa, Artificial Sequence
  SARS-CoV-2__MT913053.1__non-structural protein 3 (NSP3)
MAPTKVTFGDDTVIEVQGYKSVNITFELDERIDKVLNEKCSAYTVELGTEVNEFACVVADAVIKTLQPVSELLTPLGIDLDEWSMATYYLFDESGEFKLASHMYCSFYPPDEDEEEGDCEEEEFEPSTQYEYGTEDDYQGKPLEFGATSAALQPEEEQEEDWLDDDSQQTVGQQDGSEDNQTTTIQTIVEVQPQLEMELTPVVQTIEVNSFSGYLKLTDNVYIKNADIVEEAKKVKPTVVVNAANVYLKHGGGVAGALNKATNNAMQVESDDYIATNGPLKVGGSCVLSGHNLAKHCLHVVGPNVNKGEDIQLLKSAYENFNQHEVLLAPLLSAGIFGADPIHSLRVCVDTVRTNVYLAVFDKNLYDKLVSSFLEMKSEKQVEQKIAEIPKEEVKPFITESKPSVEQRKQDDKKIKACVEEVTTTLEETKFLTENLLLYIDINGNLHPDSATLVSDIDITFLKKDAPYIVGDVVQEGVLTAVVIPTKKAGGTTEMLAKALRKVPTDNYITTYPGQGLNGYTVEEAKTVLKKCKSAFYILPSIISNEKQEILGTVSWNLREMLAHAEETRKLMPVCVETKAIVSTIQRKYKGIKIQEGVVDYGTRFYFYTSKTTVASLINTLNDLNETLVTMPLGYVTHGLNLEEAARYMRSLKVPATVSVSSPDAVTAYNGYLTSSSKTPEEHFIETISLAGSYKDWSYSGQSTQLGIEFLKRGDKSVYYTSNPTTFHLDGEVITFDNLKTLLSLREVRTIKVFTTVDNINLHTQVVDMSMTYGQQFGPTYLDGADVTKIKPHNSHEGKTFYVLPNDDTLRVEAFEYYHTTDPSFLGRYMSALNHTKKWKYPQVNGLTSIKWADNNCYLATALLTLQQIELKFNPPALQDAYYRARAGEAANFCALILAYCNKTVGELGDVRETMSYLFQHANLDSCKRVLNVVCKTCGQQQTTLKGVEAVMYMGTLSYEQFKKGVQIPCTCGKQATKYLVQQESPFVMMSAPPAQYELKHGTFTCASEYTGNYQCGHYKHITSKETLYCIDGALLTKSSEYKGPITDVFYKENSYTTTIKPVTYKLDGVVCTEIDPKLDNYYKKDNSYFTEQPIDLVPNQPYPNASFDNFKFVCDNIKFADDLNQLTGYKKPASRELKVTFFPDLNGDVVAIDYKHYTPSFKKGAKLLHKPIVWHVNNATNKATYKPNTWCIRCLWSTKPVETSNSFDVLKSEDAQGMDNLACEDLKPVSEEVVENPTIQKDVLECNVKTTEVVGDIILKPANNSLKITEEVGHTDLMAAYVDNSSLTIKKPNELSRVLGLKTLATHGLAAVNSVPWDTIANYAKPFLNKVVSTTTNIVTRCLNRVCTNYMPYFFTLLLQLCTFTRSTNSRIKASMPTTIAKNTVKSVGKFCLEASFNYLKSPNFSKLINIIIWFLLLSVCLGSLIYSTAALGVLMSNLGMPSYCTGYREGYLNSTNVTIATYCTGSIPCSVCLSGLDSLDTYPSLETIQITISSFKWDLTAFGLVAEWFLAYILFTRFFYVLGLAAIMQLFFSYFAVHFISNSWLMWLIINLVQMAPISAMVRMYIFFASFYYVWKSYVHVVDGCNSSTCMMCYKRNRATRVECTTIVNGVRRSFYVYANGGKGFCKLHNWNCVNCDTFCAGSTFISDEVARDLSLQFKRPINPTDQSSYIVDSVTVKNGSIHLYFDKAGQKTYERHSLSHFVNLDNLRANNTKGSLPINVIVFDGKSKCEESSAKSASVYYSQLMCQPILLLDQALVSDVGDSAEVAVKMFDAYVNTFSSTFNVPMEKLKTLVATAEAELAKNVSLDNVLSTFISAARQGFVDSDVETKDVVECLKLSHQSDIEVTGDSCNNYMLTYNKVENMTPRDLGACIDCSARHINAQVAKSHNIALIWNVKDFMSLSEQLRKQIRSAAKKNNLPFKLTCATTRQVVNVVTTKIALKGG

SEQ ID NO: 15754 - protein, 1946 aa, Artificial Sequence
  SARS-CoV-2__MT913074.1__non-structural protein 3 (NSP3)
MAPTKVTFGDDTVIEVQGYKSVNITFELDERIDKVLNEKCSAYTVELGTEVNEFACVVADAVIKTLQPVSELLTPLGIDLDEWSMATYYLFDESGEFKLASHMYCSFYPPDEDEEEGDCEEEEFEPSTQYEYGTEDDYQGKPLEFGATSAALQPEEEQEEDWLDDDSQQTVGQQDGSEDNQTTTIQTIVEVQPQLEMELTPVVQTIEVNSFSGYLKLTDNVYIKNADIVEEAKKVKPTVVVNAANVYLKHGGGVAGALNKATNNAMQVESDDYIATNGPLKVGGSCVLSGHNLAKHCLHVVGPNVNKGEDIQLLKSAYENFNQHEVLLAPLLSAGIFGADPIHSLRVCVDTVRTNVYLAVFDKNLYDKLVSSFLEMKSEKQVEQKIAEIPKEEVKPFITESKPSVEQRKQDDKKIKACVEEVTTTLEETKFLTENLLLYIDINGNLHPDSATLVSDIDITFLKKDAPYIVGDVVQEGVLTAVVIPTKKAGGTTEMLAKALRKVPTDNYITTYPGQGLNGYTVEEAKTVLKKCKSAFYILPSIISNEKQEILGTVSWNLREMLAHAEETRKLMPVCVETKAIVSTIQRKYKGIKIQEGVVDYGARFYFYTSKTTVASLINTLNDLNETLVTMPLGYVTHGLNLEEAARYMRSLKVPATVSVSSPDAVTAYNGYLTSSSKTPEEHFIETISLAGSYKDWSYSGQSTQLGIEFLKRGDKSVYYTSNPTTFHLDGEVITFDNLKTLLSLREVRTIKVFTTVDNINLHTQVVDMSMTYGQQFGPTYLDGADVTKIKPHNSHEGKTFYVLPNDDTLRVEAFEYYHTTDPSFLGRYMSALNHTKKWKYPQVNGLTSIKWADNNCYLATALLTLQQIELKFNPPALQDAYYRARAGEAANFCALILAYCNKTVGELGDVRETMSYLFQHANLDSCKRVLNVVCKTCGQQQTTLKGVEAVMYMGTLSYEQFKKGVQIPCTCGKQATKYLVQQESPFVMMSAPPAQYELKHGTFTCASEYTGNYQCGHYKHITSKETLYCIDGALLTKSSEYKGPITDVFYKENSYTTTIKPVTYKLDGVVCTEIDPKLDNYYKKDNSYFTEQPIDLVPNQPYLNASFDNFKFVCDNIKFADDLNQLTGYKKPASRELKVTFFPDLNGDVVAIDYKHYTPSFKKGAKLLHKPIVWHVNNATNKATYKPNTWCIRCLWSTKPVETSNSFDVLKSEDAQGMDNLACEDLKPVSEEVVENPTIQKDVLECNVKTTEVVGDIILKPANNSLKITEEVGHTDLMAAYVDNSSLTIKKPNELSRVLGLKTLATHGLAAVNSVPWDTIANYAKPFLNKVVSTTTNIVTRCLNRVCTNYMPYFFTLLLQLCTFTRSTNSRIKASMPTTIAKNTVKSVGKFCLEASFNYLKSPNFSKLINIIIWFLLLSVCLGSLIYSTAALGVLMSNLGMPSYCTGYREGYLNSTNVTIATYCTGSIPCSVCLSGLDSLDTYPSLETIQITISSFKWDLTAFGLVAEWFLAYILFTRFFYVLGLAAIMQLFFSYFAVHFISNSWLMWLIINLVQMAPISAMVRMYIFFASFYYVWKSYVHVVDGCNSSTCMMCYKRNRATRVECTTIVNGVRRSFYVYANGGKGFCKLHNWNCVNCDTFCAGSTFISDEVARDLSLQFKRPINPTDQSSYIVDSVTVKNGSIHLYFDKAGQKTYERHSLSHFVNLDNLRANNTKGSLPINVIVFDGKSKCEESSAKSASVYYSQLMCQPILLLDQALVSDVGDSAEVAVKMFDAYVNTFSSTFNVPMEKLKTLVATAEAELAKNVSLDNVLSTFISAARQGFVDSDVETKDVVECLKLSHQSDIEVTGDSCNNYMLTYNKVENMTPRDLGACIDCSARHINAQVAKSHNIALIWNVKDFMSLSEQLRKQIRSAAKKNNLPFKLTCATTRQVVNVVTTKIALKGG

SEQ ID NO: 15755 - protein, 1946 aa, Artificial Sequence
  SARS-CoV-2__MT913076.1__non-structural protein 3 (NSP3)
MAPTKVTFGDDTVIEVQGYKSVNITFELDERIDKVLNEKCSAYTVELGTEVNEFACVVADAVIKTLQPVSELLTPLGIDLDEWSMATYYLFDESGEFKLASHMYCSFYPPDEDEEEGDCEEEEFEPSTQYEYGTEDDYQGKPLEFGATSAALQPEEEQEEDWLDDDSQQTVGQQDGSEDNQTTTIQTIVEVQPQLEMELTPVVQTIEVNSFSGYLKLTENVYIKNADIVEEAKKVKPTVVVNAANVYLKHGGGVAGALNKATNNAMQVESDDYIATNGPLKVGGSCVLSGHNLAKHCLHVVGPNVNKGEDIQLLKSAYENFNQHEVLLAPLLSAGIFGADPIHSLRVCVDTVRTNVYLAVFDKNLYDKLVSSFLEMKSEKQVEQKIAEIPKEEVKPFITESKPSVEQRKQDDKKIKACVEEVTTTLEETKFLTENLLLYIDINGNLHPDSATLVSDIDITFLKKDAPYIVGDVVQEGVLTAVVIPTKKAGGTTEMLAKALRKVPTDNYITTYPGQGLNGYTVEEAKTVLKKCKSAFYILPSIISNEKQEILGTVSWNLREMLAHAEETRKLMPVCVETKAIVSTIQRKYKGIKIQEGVVDYGARFYFYTSKTTVASLINTLNDLNETLVTMPLGYVTHGLNLEEAARYMRSLKVPATVSVSSPDAVTAYNGYLTSSSKTPEEHFIETISLAGSYKDWSYSGQSTQLGIEFLKRGDKSVYYTSNPTTFHLDGEVITFDNLKTLLSLREVRTIKVFTTVDNINLHTQVVDMSMTYGQQFGPTYLDGADVTKIKPHNSHEGKTFYVLPNDDTLRVEAFEYYHTTDPSFLGRYMSALNHTKKWKYPQVNGLTSIKWADNNCYLATALLTLQQIELKFNPPALQDAYYRARAGEAANFCALILAYCNKTVGELGDVRETMSYLFQHANLDSCKRVLNVVCKTCGQQQTTLKGVEAVMYMGTLSYEQFKKGVQIPCTCGKQATKYLVQQESPFVMMSAPPAQYELKHGTFTCASEYTGNYQCGHYKHITSKETLYCIDGALLTKSSEYKGPITDVFYKENSYTTTIKPVTYKLDGVVCTEIDPKLDNYYKKDNSYFTEQPIDLVPNQPYPNASFDNFKFVCDNIKFADDLNQLTGYKKPASRELKVTFFPDLNGDVVAIDYKHYTPSFKKGAKLLHKPIVWHVNNATNKATYKPNTWCIRCLWSTKPVETSNSFDVLKSEDAQGMDNLACEDLKPVSEEVVENPTIQKDVLECNVKTTEVVGDIILKPANNSLKITEEVGHTDLMAAYVDNSSLTIKKPNELSRVLGLKTLATHGLAAVNSVPWDTIANYAKPFLNKVVSTTTNIVTRCLNRVCTNYMPYFFTLLLQLCTFTRSTNSRIKASMPTTIAKNTVKSVGKFCLEASFNYLKSPNFSKLINIIIWFLLLSVCLGSLIYSTAALGVLMSNLGMPSYCTGYREGYLNSTNVTIATYCTGSIPCSVCLSGLDSLDTYPSLETIQITISSFKWDLTAFGLVAEWFLAYILFTRFFYVLGLAAIMQLFFSYFAVHFISNSWLMWLIINLVQMAPISAMVRMYIFFASFYYVWKSYVHVVDGCNSSTCMMCYKRNRATRVECTTIVNGIRRSFYVYANGGKGFCKLHNWNCVNCDTFCAGSTFISDEVARDLSLQFKRPINPTDQSSYIVDSVTVKNGSIHLYFDKAGQKTYERHSLSHFVNLDNLRANNTKGSLPINVIVFDGKSKCEESSAKSASVYYSQLMCQPILLLDQALVSDVGDSAEVAVKMFDAYVNTFSSTFNVPMEKLKTLVATAEAELAKNVSLDNVLSTFISAARQGFVDSDVETKDVVECLKLSHQSDIEVTGDSCNNYMLTYNKVENMTPRDLGACIDCSARHINAQVAKSHNIALIWNVKDFMSLSEQLRKQIRSAAKKNNLPFKLTCATTRQVVNVVTTKIALKGG

SEQ ID NO: 15756 - protein, 1946 aa, Artificial Sequence
  SARS-CoV-2__MT913119.1__non-structural protein 3 (NSP3)
MAPTKVTFGDDTVIEVQGYKSVNITFELDERIDKVLNEKCSAYTVELGTEVNEFACVVADAVIKTLQPVSELLTPLGIDLDEWSMATYYLFDESGEFKLASHMYCSFYPPDEDEEEGDCEEEEFEPSTQYEYGTEDDYQGKPLEFGATSAALQPEEEQEEDWLDDDSQQTVGQQDGSEDNQTTTIQTIVEVQPQLEMELTPVVQTIEVNSFSGYLKLTENVYIKNADIVEEAKKVKPTVVVNAANVYLKHGGGVAGALNKATNNAMQVESDDYIATNGPLKVGGSCVLSGHNLAKHCLHVVGPNVNKGEDIQLLKSAYENFNQHEVLLAPLLSAGIFGADPIHSLRVCVDTVRTNVYLAVFDKNLYDKLVSSFLEMKSEKQVEQKIAEIPKEEVKPFITESKPSVEQRKQDDKKIKACVEEVTTTLEETKFLTENLLLYIDINGNLHPDSATLVSDIDITFLKKDAPYIVGDVVQEGVLTAVVIPTKKAGGTTEMLAKALRKVPTDNYITTYPGQGLNGYTVEEAKTVLKKCKSAFYILPSIISNEKQEILGTVSWNLREMLAHAEETRKLMPVCVETKAIVSTIQRKYKGIKIQEGVVDYGARFYFYTSKTTVASLINTLNDLNETLVTMPLGYVTHGLNLEEAARYMRSLKVPATVSVSSPDAVTAYNGYLTSSSKTPEEHFIETISLAGSYKDWSYSGQSTQLGIEFLKRGDKSVYYTSNPTTFHLDGEVITFDNLKTLLSLREVRTIKVFTTVDNINLHTQVVDMSMTYGQQFGPTYLDGADVTKIKPHNSHEGKTFYVLPNDDTLRVEAFEYYHTTDPSFLGRYMSALNHTKKWKYPQVNGLTSIKWADNNCYLATALLTLQQIELKFNPPALQDAYYRARAGEAANFCALILAYCNKTVGELGDVRETMSYLFQHANLDSCKRVLNVVCKTCGQQQTTLKGVEAVMYMGTLSYEQFKKGVQIPCTCGKQATKYLVQQESPFVMMSAPPAQYELKHGTFTCASEYTGNYQCGHYKHITSKETLYCIDGALLTKSSEYKGPITDVFYKENSYTTTIKPVTYKLDGVVCTEIDPKLDNYYKKDNSYFTEQPIDLVPNQPYPNASFDNFKFVCDNIKFADDLNQLTGYKKPASRELKVTFFPDLNGDVVAIDYKHYTPSFKKGAKLLHKPIVWHVNNATNKATYKPNTWCIRCLWSTKPVETSNSFDVLKSEDAQGMDNLACEDLKPVSEEVVENPTIQKDVLECNVKTTEVVGDIILKPANNSLKITEEVGHTDLMAAYVDNSSLTIKKPNELSRVLGLKTLATHGLAAVNSVPWDTIANYAKPFLNKVVSTTTNIVTRCLNRVCTNYMPYFFTLLLQLCTFTRSTNSRIKASMPTTIAKNTVKSVGKFCLEASFNYLKSPNFSKLINIIIWFLLLSVCLGSLIYSTAALGVLMSNLGMPSYCTGYREGYLNSTNVTIATYCTGSIPCSVCLSGLDSLDTYPSLETIQITISSFKWDLTAFGLVAEWFLAYILFTRFFYVLGLAAIMQLFFSYFAVHFISNSWLMWLIINLVQMAPISAMVRMYIFFASFYYVWKSYVHVVDGCNSSTCMMCYKRNRATRVECTTIVNGVRRSFYVYANGGKGFCKLHNWNCVNCDTFCAGSTFISDEVARDLSLQFKRPINPTDQSSYIVDSVTVKNGSIHLYFDKAGQKTYERHSLSHFVNLDNLRANNTKGSLPINVIVFDGKSKCEESSAKSASVYYSQLMCQPILLLDQALVSDVGDSAEVAVKMFDAYVNTFSSTFNVPMEKLKTLVATAEAELAKNVSLDNVLSTFISAARQGFVDSDVETKDVVECLKLSHQSDIEVTGDSCNNYMLTYNKVENMTPRDLGACIDCSARHINAQVAKSHNIALIWNVKDFMSLSEQLRKQIRSAAKKNNLPFKLTCATTRQVVNVVTTKIALKGG

SEQ ID NO: 15757 - protein, 1946 aa, Artificial Sequence
  SARS-CoV-2__MT913129.1__non-structural protein 3 (NSP3)
MAPTKVTFGDDTVIEVQGYKSVNITFELDERIDKVLNEKCSAYTVELGTEVNEFACVVADAVIKTLQPVSELLTPLGIDLDEWSMATYYLFDESGEFKLASHMYCSFYPPDEDEEEGDCEEEEFEPSTQYEYGTEDDYQGKPLEFGATSAALQPEEEQEEDWLDDDSQQTVGQQDGSEDNQTTTIQTIVEVQPQLEMELTPVVQTIEVNSFSGYLKLTDNVYIKNADIVEEAKKVKPTVVVNAANVYLKHGGGVAGALNKATNNAMQVESDDYIATNGPLKVGGSCVLSGHNLAKHCLHVVGPNVNKGENIQLLKSAYENFNQHEVLLAPLLSAGIFGADPIHSLRVCVDTVRTNVYLAVFDKNLYDKLVSSFLEMKSEKQVEQKIAEIPKEEVKPFITESKPSVEQRKQDDKKIKACVEEVTTTLEETKFLTENLLLYIDINGNLHPDSATLVSDIDITFLKKDAPYIVGDVVQEGVLTAVVIPTKKAGGTTEMLAKALRKVPTDNYITTYPGQGLNGYTVEEAKTVLKKCKSAFYILPSIISNEKQEILGTVSWNLREMLAHAEETRKLMPVCVETKAIVSTIQRKYKGIKIQEGVVDYGARFYFYTSKTTVASLINTLNDLNETLVTMPLGYVTHGLNLEEAARYMRSLKVPATVSVSSPDAVTAYNGYLTSSSKTPEEHFIETISLAGSYKDWSYSGQSTQLGIEFLKRGDKSVYYTSNPTTFHLDGEVITFDNLKTLLSLREVRTIKVFTTVDNINLHTQVVDMSMTYGQQFGPTYLDGADVTKIKPHNSHEGKTFYVLPNDDTLRVEAFEYYHTTDPSFLGRYMSALNHTKKWKYPQVNGLTSIKWADNNCYLATALLTLQQIELKFNPPALQDAYYRARAGEAANFCALILAYCNKTVGELGDVRETMSYLFQHANLDSCKRVLNVVCKTCGQQQTTLKGVEAVMYMGTLSYEQFKKGVQIPCTCGKQATKYLVQQESPFVMMSAPPAQYELKHGTFTCASEYTGNYQCGHYKHITSKETLYCIDGALLTKSSEYKGPITDVFYKENSYTTTIKPVTYKLDGVVCTEIDPKLDNYYKKDNSYFTEQPIDLVPNQPYPNASFDNFKFVCDNIKFADDLNQLTGYKKPASRELKVTFFPDLNGDVVAIDYKHYTPSFKKGAKLLHKPIVWHVNNATNKATYKPNTWCIRCLWSTKPVETSNSFDVLKSEDAQGMDNLACEDLKPVSEEVVENPTIQKDVLECNVKTTEVVGDIILKPANNSLKITEEVGHTDLMAAYVDNSSLTIKKPNELSRVLGLKTLATHGLAAVNSVPWDTIANYAKPFLNKVVSTTTNIVTRCLNRVCTNYMPYFFTLLLQLCTFTRSTNSRIKASMPTTIAKNTVKSVGKFCLEASFNYLKSPNFSKLINIIIWFLLLSVCLGSLIYSTAALGVLMSNLGMPSYCTGYREGYLNSTNVTIATYCTGSIPCSVCLSGLDSLDTYPSLETIQITISSFKWDLTAFGLVAEWFLAYILFTRFFYVLGLAAIMQLFFSYFAVHFISNSWLMWLIINLVQMAPISAMVRMYIFFASFYYVWKSYVHVVDGCNSSTCMMCYKRNRATRVECTTIVNGVRRSFYVYANGGKGFCKLHNWNCVNCDTFCAGSTFISDEVARDLSLQFKRPINPTDQSSYIVDSVTVKNGSIHLYFDKAGQKTYERHSLSHFVNLDNLRANNTKGSLPINVIVFDGKSKCEESSAKSASVYYSQLMCQPILLLDQALVSDVGDSAEVAVKMFDAYVNTFSSTFNVPMEKLKTLVATAEAELAKNVSLDNVLSTFISAARQGFVDSDVETKDVVECLKLSHQSDIEVTGDSCNNYMLTYNKVENMTPRDLGACIDCSARHINAQVAKSHNIALIWNVKDFMSLSEQLRKQIRSAAKKNNLPFKLTCATTRQVVNVVTTKIALKGG

SEQ ID NO: 15758 - protein, 1946 aa, Artificial Sequence
  SARS-CoV-2__MT913130.1__non-structural protein 3 (NSP3)
MAPTKVTFGDDTVIEVQGYKSVNITFELDERIDKVLNEKCSAYTVELGTEVNEFACVVADAVIKTLQPVSELLTPLGIDLDEWSMATYYLFDESGEFKLASHMYCSFYPPDEDEEEGDCEEEEFEPSTQYEYGTEDDYQGKPLEFGATSAALQPEEEQEEDWLDDDSQQTVGQQDGSEDNQTTTIQTIVEVQPQLEMELTPVVQTIEVNSFSGYLKLTDNVYIKNADIVEEAKKVKPTVVVNAANVYLKHGGGVAGALNKATNNAMQVESDDYIATNGPLKVGGSCVLSGHNLAKHCLHVVGPNVNKGEDIQLLKSAYENFNQHEVLLAPLLSAGIFGADPIHSLRVCVDTVRTNVYLAVFDKNLYDKLVSSFLEMKSEKQVEQKIAEIPKEEVKPFITESKPSVEQRKQDDKKIKACVEEVTTTLEETKFLTENLLLYIDINGNLHPDSATLVSDIDITFLNKDAPYIVGDVVQEGVLTAVVIPTKKAGGTTEMLAKALRKVPTDNYITTYPGQGLNGYTVEEAKTVLKKCKSAFYILPSIISNEKQEILGTVSWNLREMLAHAEETRKLMPVCVETKAIVSTIQRKYKGIKIQEGVVDYGARFYFYTSKTTVASLINTLNDLNETLVTMPLGYVTHGLNLEEAARYMRSLKVPATVSVSSPDAVTAYNGYLTSSSKTPEEHFIETISLAGSYKDWSYSGQSTQLGIEFLKRGDKSVYYTSNPTTFHLDGEVITFDNLKTLLSLREVRTIKVFTTVDNINLHTQVVDMSMTYGQQFGPTYLDGADVTKIKPHNSHEGKTFYVLPNDDTLRVEAFEYYHTTDPSFLGRYMSALNHTKKWKYPQVNGLTSIKWADNNCYLATALLTLQQIELKFNPPALQDAYYRARAGEAANFCALILAYCNKTVGELGDVRETMSYLFQHANLDSCKRVLNVVCKTCGQQQTTLKGVEAVMYMGTLSYEQFKKGVQIPCTCGKQATKYLVQQESPFVMMSAPPAQYELKHGTFTCASEYTGNYQCGHYKHITSKETLYCIDGALLTKSSEYKGPITDVFYKENSYTTTIKPVTYKLDGVVCTEIDPKLDNYYKKDNSYFTEQPIDLVPNQPYPNASFDNFKFVCDNIKFADDLNQLTGYKKPASRELKVTFFPDLNGDVVAIDYKHYTPSFKKGAKLLHKPIVWHVNNATNKATYKPNTWCIRCLWSTKPVETSNSFDVLKSEDAQGMDNLACEDLKPVSEEVVENPTIQKDVLECNVKTTEVVGDIILKPANNSLKITEEVGHTDLMAAYVDNSSLTIKKPNELSRVLGLKTLATHGLAAVNSVPWDTIANYAKPFLNKVVSTTTNIVTRCLNRVCTNYMPYFFTLLLQLCTFTRSTNSRIKASMPTTIAKNTVKSVGKFCLEASFNYLKSPNFSKLINIIIWFLLLSVCLGSLIYSTAALGVLMSNLGMPSYCTGYREGYLNSTNVTIATYCTGSIPCSVCLSGLDSLDTYPSLETIQITISSFKWDLTAFGLVAEWFLAYILFTRFFYVLGLAAIMQLFFSYFAVHFISNSWLMWLIINLVQMAPISAMVRMYIFFASFYYVWKSYVHVVDGCNSSTCMMCYKRNRATRVECTTIVNGVRRSFYVYANGGKGFCKLHNWNCVNCDTFCAGSTFISDEVARDLSLQFKRPINPTDQSSYIVDSVTVKNGSIHLYFDKAGQKTYERHSLSHFVNLDNLRANNTKGSLPINVIVFDGKSKCEESSAKSASVYYSQLMCQPILLLDQALVSDVGDSAEVAVKMFDAYVNTFSSTFNVPMEKLKTLVATAEAELAKNVSLDNVLSTFISAARQGFVDSDVETKDVVECLKLSHQSDIEVTGDSCNNYMLTYNKVENMTPRDLGACIDCSARHINAQVAKSHNIALIWNVKDFMSLSEQLRKQIRSAAKKNNLPFKLTCATTRQVVNVVTTKIALKGG

SEQ ID NO: 15759 - protein, 1946 aa, Artificial Sequence
  SARS-CoV-2__MT913139.1__non-structural protein 3 (NSP3)
MAPTKVTFGDDTVIEVQGYKSVNITFELDERIDKVLNEKCSAYTVELGTEVNEFACVVADAVIKTLQPVSELLTPLGIDLDEWSMATYYLFDESGEFKLASHMYCSFYPPDEDEEEGDCEEEEFEPSTQYEYGTEDDYQGKPLEFGATSAALQPEEEQEEDWLDDDSQQIVGQQDGSEDNQTTTIQTIVEVQPQLEMELTPVVQTIEVNSFSGYLKLTDNVYIKNADIVEEAKKVKPTVVVNAANVYLKHGGGVAGALNKATNNAMQVESDDYIATNGPLKVGGSCVLSGHNLAKHCLHVVGPNVNKGEDIQLLKSAYENFNQHEVLLAPLLSAGIFGADPIHSLRVCVDTVRTNVYLAVFDKNLYDKLVSSFLEMKSEKQVEQKIAEIPKEEVKPFITESKPSVEQRKQDDKKIKACVEEVTTTLEETKFLTENLLLYIDINGNLHPDSATLVSDIDITFLKKDAPYIVGDVVQEGVLTAVVIPTKKAGGTTEMLAKALRKVPTDNYITTYPGQGLNGYTVEEAKTVLKKCKSAFYILPSIISNEKQEILGTVSWNLREMLAHAEETRKLMPVCVETKAIVSTIQRKYKGIKIQEGVVDYGARFYFYTSKTTVASLINTLNDLNETLVTMPLGYVTHGLNLEEAARYMRSLKVPATVSVSSPDAVTAYNGYLTSSSKTPEEHFIETISLAGSYKDWSYSGQSTQLGIEFLKRGDKSVYYTSNPTTFHLDGEVITFDNLKTLLSLREVRTIKVFTTVDNINLHTQVVDMSMTYGQQFGPTYLDGADVTKIKPHNSHEGKTFYVLPNDDTLRVEAFEYYHTTDPSFLGRYMSALNHTKKWKYPQVNGLTSIKWADNNCYLATALLTLQQIELKFNPPALQDAYYRARAGEAANFCALILAYCNKTVGELGDVRETMSYLFQHANLDSCKRVLNVVCKTCGQQQTTLKGVEAVMYMGTLSYEQFKKGVQIPCTCGKQATKYLVQQESPFVMMSAPPAQYELKHGTFTCASEYTGNYQCGHYKHITSKETLYCIDGALLTKSSEYKGPITDVFYKENSYTTTIKPVTYKLDGVVCTEIDPKLDNYYKKDNSYFTEQPIDLVPNQPYPNASFDNFKFVCDNIKFADDLNQLTGYKKPASRELKVTFFPDLNGDVVAIDYKHYTPSFKKGAKLLHKPIVWHVNNATNKATYKPNTWCIRCLWSTKPVETSNSFDVLKSEDAQGMDNLACEDLKPVSEEVVENPTIQKDVLECNVKTTEVVGDIILKPANNSLKITEEVGHTDLMAAYVDNSSLTIKKPNELSRVLGLKTLATHGLAAVNSVPWDTIANYAKPFLNKVVSTTTNIVTRCLNRVCTNYMPYFFTLLLQLCTFTRSTNSRIKASMPTTIAKNTVKSVGKFCLEASFNYLKSPNFSKLINIIIWFLLLSVCLGSLIYSTAALGVLMSNLGMPSYCTGYREGYLNSTNVTIATYCTGSIPCSVCLSGLDSLDTYPSLETIQITISSFKWDLTAFGLVAEWFLAYILFTRFFYVLGLAAIMQLFFSYFAVHFISNSWLMWLIINLVQMAPISAMVRMYIFFASFYYVWKSYVHVVDGCNSSTCMMCYKRNRATRVECTTIVNGVRRSFYVYANGGKGFCKLHNWNCVNCDTFCAGSTFISDEVARDLSLQFKRPINPTDQSSYIVDSVTVKNGSIHLYFDKAGQKTYERHSLSHFVNLDNLRANNTKGSLPINVIVFDGKSKCEESSAKSASVYYSQLMCQPILLLDQALVSDVGDSAEVAVKMFDAYVNTFSSTFNVPMEKLKTLVATAEAELAKNVSLDNVLSTFISAARQGFVDSDVETKDVVECLKLSHQSDIEVTGDSCNNYMLTYNKVENMTPRDLGACIDCSARHINAQVAKSHNIALIWNVKDFMSLSEQLRKQIRSAAKKNNLPFKLTCATTRQVVNVVTTKIALKGG

SEQ ID NO: 15760 - protein, 1946 aa, Artificial Sequence
  SARS-CoV-2__MT913142.1__non-structural protein 3 (NSP3)
MAPTKVTFGDDTVIEVQGYKSVNITFELDERIDKVLNEKCSAYTVELGTEVNEFACVVADAVIKTLQPVSELLTPLGIDLDEWSMATYYLFDESGEFKLASHMYCSFYPPDEDEEEGDCEEEEFEPSTQYEYGTEDDYQGKPLEFGANSAALQPEEEQEEDWLDDDSQQTVGQQDGSEDNQTTTIQTIVEVQPQLEMELTPVVQTIEVNSFSGYLKLTDNVYIKNADIVEEAKKVKPTVVVNAANVYLKHGGGVAGALNKATNNAMQVESDDYIATNGPLKVGGSCVLSGHNLAKHCLHVVGPNVNKGEDIQLLKSAYENFNQHEVLLAPLLSAGIFGADPIHSLRVCVDTVRTNVYLAVFDKNLYDKLVSSFLEMKSEKQVEQKIAEIPKEEVKPFITESKPSVEQRKQDDKKIKACVEEVTTTLEETKFLTENLLLYIDINGNLHPDSATLVSDIDITFLKKDAPYIVGDVVQEGVLTAVVIPTKKAGGTTEMLAKALRKVPTDNYITTYPGQGLNGYTVEEAKTVLKKCKSAFYILPSIISNEKQEILGTVSWNLREMLAHAEETRKLMPVCVETKAIVSTIQRKYKGIKIQEGVVDYGARFYFYTSKTTVASLINTLNDLNETLVTMPLGYVTHGLNLEEAARYMRSLKVPATVSVSSPDAVTAYNGYLTSSSKTPEEHFIETISLAGSYKDWSYSGQSTQLGIEFLKRGDKSVYYTSNPTTFHLDGEVITFDNLKTLLSLREVRTIKVFTTVDNINLHTQVVDMSMTYGQQFGPTYLDGADVTKIKPHNSHEGKTFYVLPNDDTLRVEAFEYYHTTDSSFLGRYMSALNHTKKWKYPQVNGLTSIKWADNNCYLATALLTLQQIELKFNPPALQDAYYRARAGEAANFCALILAYCNKTVGELGDVRETMSYLFQHANLDSCKRVLNVVCKTCGQQQTTLKGVEAVMYMGTLSYEQFKKGVQIPCTCGKQATKYLVQQESPFVMMSAPPAQYELKHGTFTCASEYTGNYQCGHYKHITSKETLYCIDGALLTKSSEYKGPITDVFYKENSYTTTIKPVTYKLDGVVCTEIDPKLDNYYKKDNSYFTEQPIDLVPNQPYPNASFDNFKFVCDNIKFADDLNQLTGYKKPASRELKVTFFPDLNGDVVAIDYKHYTPSFKKGAKLLHKPIVWHVNNATNKATYKPNTWCIRCLWSTKPVETSNSFDVLKSEDAQGMDNLACEDLKPVSEEVVENPTIQKDVLECNVKTTEVVGDIILKPANNSLKITEEVGHTDLMAAYVDNSSLTIKKPNELSRVLGLKTLATHGLAAVNSVPWDTIANYAKPFLNKVVSTTTNIVTRCLNRVCTNYMPYFFTLLLQLCTFTRSTNSRIKASMPTTIAKNTVKSVGKFCLEASFNYLKSPNFSKLINIIIWFLLLSVCLGSLIYSTAALGVLMSNLGMPSYCTGYREGYLNSTNVTIATYCTGSIPCSVCLSGLDSLDTYPSLETIQITISSFKWDLTAFGLVAEWFLAYILFTRFFYVLGLAAIMQLFFSYFAVHFISNSWLMWLIINLVQMAPISAMVRMYIFFASFYYVWKSYVHVVDGCNSSTCMMCYKRNRATRVECTTIVNGVRRSFYVYANGGKGFCKLHNWNCVNCDTFCAGSTFISDEVARDLSLQFKRPINPTDQSSYIVDSVTVKNGSIHLYFDKAGQKTYERHSLSHFVNLDNLRANNTKGSLPINVIVFDGKSKCEESSAKSASVYYSQLMCQPILLLDQALVSDVGDSAEVAVKMFDAYVNTFSSTFNVPMEKLKTLVATAEAELAKNVSLDNVLSTFISAARQGFVDSDVETKDVVECLKLSHQSDIEVTGDSCNNYMLTYNKVENMTPRDLGACIDCSARHINAQVAKSHNIALIWNVKDFMSLSEQLRKQIRSAAKKNNLPFKLTCATTRQVVNVVTTKIALKGG

SEQ ID NO: 15761 - protein, 1946 aa, Artificial Sequence
  SARS-CoV-2__MT913146.1__non-structural protein 3 (NSP3)
MAPTKVTFGDDTVIEVQGYKSVNITFELDERIDKVLNEKCSAYTVELGTEVNEFACVVADAVIKTLQPVSELLIPLGIDLDEWSMATYYLFDESGEFKLASHMYCSFYPPDEDEEEGDCEEEEFEPSTQYEYGTEDDYQGKPLEFGATSAALQPEEEQEEDWLDDDSQQTVGQQDGSEDNQTTTIQTIVEVQPQLEMELTPVVQTIEVNSFSGYLKLTDNVYIKNADIVEEAKKVKPTVVVNAANVYLKHGGGVAGALNKATNNAMQVESDDYIATNGPLKVGGSCVLSGHNLAKHCLHVVGPNVNKGEDIQLLKSAYENFNQHEVLLAPLLSAGIFGADPIHSLRVCVDTVRTNVYLAVFDKNLYDKLVSSFLEMKSEKQVEQKIAEIPKEEVKPFITESKPSVEQRKQDDKKIKACVEEVTTTLEETKFLTENLLLYIDINGNLHPDSATLVSDIDITFLKKDAPYIVGDVVQEGVLTAVVIPTKKAGGTTEMLAKALRKVPTDNYITTYPGQGLNGYTVEEAKTVLKKCKSAFYILPSIISNEKQEILGTVSWNLREMLAHAEETRKLMPVCVETKAIVSTIQRKYKGIKIQEGVVDYGARFYFYTSKTTVASLINTLNDLNETLVTMPLGYVTHGLNLEEAARYMRSLKVPATVSVSSPDAVTAYNGYLTSSSKTPEEHFIETISLAGSYKDWSYSGQSTQLGIEFLKRGDKSVYYTSNPTTFHLDGEVITFDNLKTLLSLREVRTIKVFTTVDNINLHTQVVDMSMTYGQQFGPTYLDGADVTKIKPHNSHEGKTFYVLPNDDTLRVEAFEYYHTTDPSFLGRYMSALNHTKKWKYPQVNGLTSIKWADNNCYLATALLTLQQIELKFNPPALQDAYYRARAGEAANFCALILAYCNKTVGELGDVRETMSYLFQHANLDSCKRVLNVVCKTCGQQQTTLKGVEAVMYMGTLSYEQFKKGVQIPCTCGKQATKYLVQQESPFVMMSAPPAQYELKHGTFTCASEYTGNYQCGHYKHITSKETLYCIDGALLTKSSEYKGPITDVFYKENSYTTTIKPVTYKLDGVVCTEIDPKLDNYYKKDNSYFTEQPIDLVPNQPYPNASFDNFKFVCDNIKFADDLNQLTGYKKPASRELKVTFFPDLNGDVVAIDYKHYTPSFKKGAKLLHKPIVWHVNNATNKATYKPNTWCIRCLWSTKPVETSNSFDVLKSEDAQGMDNLACEDLKPVSEEVVENPTIQKDVLECNVKTTEVVGDIILKPANNSLKITEEVGHTDLMAAYVDNSSLTIKKPNELSRVLGLKTLATHGLAAVNSVPWDTIANYAKPFLNKVVSTTTNIVTRCLNRVCTNYMPYFFTLLLQLCTFTRSTNSRIKASMPTTIAKNTVKSVGKFCLEASFNYLKSPNFSKLINIIIWFLLLSVCLGSLIYSTAALGVLMSNLGMPSYCTGYREGYLNSTNVTIATYCTGSIPCSVCLSGLDSLDTYPSLETIQITISSFKWDLTAFGLVAEWFLAYILFTRFFYVLGLAAIMQLFFSYFAVHFISNSWLMWLIINLVQMAPISAMVRMYIFFASFYYVWKSYVHVVDGCNSSTCMMCYKRNRATRVECTTIVNGVRRSFYVYANGGKGFCKLHNWNCVNCDTFCAGSTFISDEVARDLSLQFKRPINPTDQSSYIVDSVTVKNGSIHLYFDKAGQKTYERHSLSHFVNLDNLRANNTKGSLPINVIVFDGKSKCEESSAKSASVYYSQLMCQPILLLDQALVSDVGDSAEVAVKMFDAYVNTFSSTFNVPMEKLKTLVATAEAELAKNVSLDNVLSTFISAARQGFVDSDVETKDVVECLKLSHQSDIEVTGDSCNNYMLTYNKVENMTPRDLGACIDCSARHINAQVAKSHNIALIWNVKDFMSLSEQLRKQIRSAAKKNNLPFKLTCATTRQVVNVVTTKIALKGG

SEQ ID NO: 15762 - protein, 1946 aa, Artificial Sequence
  SARS-CoV-2__MT913147.1__non-structural protein 3 (NSP3)
MAPTKVTFGDDTVIEVQGYKSVNITFELDERIDKVLNEKCSAYTVELGTEVNEFACVVADAVIKTLQPVSELLTPLGIDLDEWSMATYYLFDESGEFKLASHMYCSFYPPDEDEEEGDCEEEEFEPSTQYEYGTEDDYQGKPLEFGATSAALQPEEEQEEDWLDDDSQQTVGQQDGSEDNQTTTIQTIVEVQPQLEMELTPVVQTIEVNSFSGYLKLTDNVYIKNADIVEEAKKVKPTVVVNAANVYLKHGGGVAGALNKATNNAMQVESDDYIATNGPLKVGGSCVLSGHNLAKHCLHVVGPNVNKGEDIQLLKSAYENFNQHEVLLAPLLSAGIFGADPIHSLRVCVDTVRTNVYLAVFDKNLYDKLVSSFLEMKSEKQVEQKIAEIPKEEVKPFITESKPSVEQRKQDDKKIKACVEEVTTILEETKFLTENLLLYIDINGNLHPDSATLVSDIDITFLKKDAPYIVGDVVQEGVLTAVVIPTKKAGGTTEMLAKALRKVPTDNYITTYPGQGLNGYTVEEAKTVLKKCKSAFYILPSIISNEKQEILGTVSWNLREMLAHAEETRKLMPVCVETKAIVSTIQRKYKGIKIQEGVVDYGARFYFYTSKTTVASLINTLNDLNETLVTMPLGYVTHGLNLEEAARYMRSLKVPATVSVSSPDAVTAYNGYLTSSSKTPEEHFIETISLAGSYKDWSYSGQSTQLGIEFLKRGDKSVYYTSNPTTFHLDGEVITFDNLKTLLSLREVRTIKVFTTVDNINLHTQVVDMSMTYGQQFGPTYLDGADVTKIKPHNSHEGKTFYVLPNDDTLRVEAFEYYHTTDPSFLGRYMSALNHTKKWKYPQVNGLTSIKWADNNCYLATALLTLQQIELKFNPPALQDAYYRARAGEAANFCALILAYCNKTVGELGDVRETMSYLFQHANLDSCKRVLNVVCKTCGQQQTTLKGVEAVMYMGTLSYEQFKKGVQIPCTCGKQATKYLVQQESPFVMMSAPPAQYELKHGTFTCASEYTGNYQCGHYKHITSKETLYCIDGALLTKSSEYKGPITDVFYKENSYTTTIKPVTYKLDGVVCTEIDPKLDNYYKKDNSYFTEQPIDLVPNQPYPNASFDNFKFVCDNIKFADDLNQLTGYKKPASRELKVTFFPDLNGDVVAIDYKHYTPSFKKGAKLLHKPIVWHVNNATNKATYKPNTWCIRCLWSTKPVETSNSFDVLKSEDAQGMDNLACEDLKPVSEEVVENPTIQKDVLECNVKTTEVVGDIILKPANNSLKITEEVGHTDLMAAYVDNSSLTIKKPNELSRVLGLKTLATHGLAAVNSVPWDTIANYAKPFLNKVVSTTTNIVTRCLNRVCTNYMPYFFTLLLQLCTFTRSTNSRIKASMPTTIAKNTVKSVGKFCLEASFNYLKSPNFSKLINIIIWFLLLSVCLGSLIYSTAALGVLMSNLGMPSYCTGYREGYLNSTNVTIATYCTGSIPCSVCLSGLDSLDTYPSLETIQITISSFKWDLTAFGLVAEWFLAYILFTRFFYVLGLAAIMQLFFSYFAVHFISNSWLMWLIINLVQMAPISAMVRMYIFFASFYYVWKSYVHVVDGCNSSTCMMCYKRNRATRVECTTIVNGVRRSFYVYANGGKGFCKLHNWNCVNCDTFCAGSTFISDEVARDLSLQFKRPINPTDQSSYIVDSVTVKNGSIHLYFDKAGQKTYERHSLSHFVNLDNLRANNTKGSLPINVIVFDGKSKCEESSAKSASVYYSQLMCQPILLLDQALVSDVGDSAEVAVKMFDAYVNTFSSTFNVPMEKLKTLVATAEAELAKNVSLDNVLSTFISAARQGFVDSDVETKDVVECLKLSHQSDIEVTGDSCNNYMLTYNKVENMTPRDLGACIDCSARHINAQVAKSHNIALIWNVKDFMSLSEQLRKQIRSAAKKNNLPFKLTCATTRQVVNVVTTKIALKGG

SEQ ID NO: 15763 - protein, 1946 aa, Artificial Sequence
  SARS-CoV-2__MT913148.1__non-structural protein 3 (NSP3)
MAPTKVTFGDDTVIEVQGYKSVNITFELDERIDKVLNEKCSAYTVELGTEVNEFACVVADAVIKTLQPVSELLTPLGIDLDEWSMATYYLFDESGEFKLASHMYCSFYPPDEDEEEGDCEEEEFEPSTQYEYGTEDDYQGKPLEFGATSAALQPEEEQEEDWLDDDSQQTVGQQDGSEDNQTTTIQTIVEVQPQLEMELTPVVQTIEVNSFSGYLKLTDNVYIKNADIVEEAKKVKPTVVVNAANVYLKHGGGVAGALNKATNNAMQVESDDYIATNGPLKVGGSCVLSGHNLAKHCLHVVGPNVNKGEDIQLLKSAYENFNQHEVLLAPLLSAGIFGADPIHSLRVCVDTVRTNVYLAVFDKNLYDKLVSSFLEMKSEKQVEQKIAEIPKEEVKPFITESKPSVEQRKQDDKKIKACVEEVTTTLEETKFLTENLLLYIDINGNLHPDSATLVSDIDITFLKKDAPYIVGDVVQEGVLTAVVIPTKKAGGTTEMLAKALRKVPTDNYITTYPGQGLNGYTVEEAKTVLKKCKSAFYILPSIISNEKQEILGTVSWNLREMLAHAEETRKLMPVCVETKAIVSTIQRKYKGIKIQEGVVDYGARFYFYTSKTTVASLINTLNDLNETLVTMPLGYVTHGLNLEEAARYMRSLKVPATVSVSSPDAVTAYNGYLTSSSKTPEEHFIETISLAGSYKDWSYSGQSTQLGIEFLKRGDKSVYYTSNPTTFHLDGEVITFDNLKTLLSLREVRTIKVFTTVDNINLHTQVVDMSMTYGQQFGPTYLDGADVTKIKPHNSHEGKTFYVLPNDDTLRVEAFEYYHITDPSFLGRYMSALNHTKKWKYPQVNGLTSIKWADNNCYLATALLTLQQIELKFNPPALQDAYYRARAGEAANFCALILAYCNKTVGELGDVRETMSYLFQHANLDSCKRVLNVVCKTCGQQQTTLKGVEAVMYMGTLSYEQFKKGVQIPCTCGKQATKYLVQQESPFVMMSAPPAQYELKHGTFTCASEYTGNYQCGHYKHITSKETLYCIDGALLTKSSEYKGPITDVFYKENSYTTTIKPVTYKLDGVVCTEIDPKLNNYYKKDNSYFTEQPIDLVPNQPYPNASFDNFKFVCDNIKFADDLNQLTGYKKPASRELKVTFFPDLNGDVVAIDYKHYTPSFKKGAKLLHKPIVWHVNNATNKATYKPNTWCIRCLWSTKPVETSNSFDVLKSEDAQGMDNLACEDLKPVSEEVVENPTIQKDVLECNVKTTEVVGDIILKPANNSLKITEEVGHTDLMAAYVDNSSLTIKKPNELSRVLGLKTLATHGLAAVNSVPWDTIANYAKPFLNKVVSTTTNIVTRCLNRVCTNYMPYFFTLLLQLCTFTRSTNSRIKASMPTTIAKNTVKSVGKFCLEASFNYLKSPNFSKLINIIIWFLLLSVCLGSLIYSTAALGVLMSNLGMPSYCTGYREGYLNSTNVTIATYCTGSIPCSVCLSGLDSLDTYPSLETIQITISSFKWDLTAFGLVAEWFLAYILFTRFFYVLGLAAIMQLFFSYFAVHFISNSWLMWLIINLVQMAPISAMVRMYIFFASFYYVWKSYVHVVDGCNSSTCMMCYKRNRATRVECTTIVNGVRRSFYVYANGGKGFCKLHNWNCVNCDTFCAGSTFISDEVARDLSLQFKRPINPTDQSSYIVDSVTVKNGSIHLYFDKAGQKTYERHSLSHFVNLDNLRANNTKGSLPINVIVFDGKSKCEESSAKSASVYYSQLMCQPILLLDQALVSDVGDSAEVAVKMFDAYVNTFSSTFNVPMEKLKTLVATAEAELAKNVSLDNVLSTFISAARQGFVDSDVETKDVVECLKLSHQSDIEVTGDSCNNYMLTYNKVENMTPRDLGACIDCSARHINAQVAKSHNIALIWNVKDFMSLSEQLRKQIRSAAKKNNLPFKLTCATTRQVVNVVTTKIALKGG

SEQ ID NO: 15764 - protein, 1946 aa, Artificial Sequence
  SARS-CoV-2__MT913149.1__non-structural protein 3 (NSP3)
MAPTKVTFGDDTVIEVQGYKSVNITFELDERIDKVLNEKCSAYTVELGTEVNEFACVVADAVIKTLQPVSELLTPLGIDLDEWSMATYYLFDESGEFKLASHMYCSFYPPDEDEEEGDCEEEEFEPSTQYEYGTEADYQGKPLEFGATSAALQPEEEQEEDWLDDDSQQTVGQQDGSEDNQTTTIQTIVEVQPQLEMELTPVVQTIEVNSFSGYLKLTDNVYIKNADIVEEAKKVKPTVVVNAANVYLKHGGGVAGALNKATNNAMQVESDDYIATNGPLKVGGSCVLSGHNLAKHCLHVVGPNVNKGEDIQLLKSAYENFNQHEVLLAPLLSAGIFGADPIHSLRVCVDTVRTNVYLAVFDKNLYDKLVSSFLEMKSEKQVEQKIAEIPKEEVKPFITESKPSVEQRKQDDKKIKACVEEVTTTLEETKFLTENLLLYIDINGNLHPDSATLVSDIDITFLKKDAPYIVGDVVQEGVLTAVVIPTKKAGGTTEMLAKALRKVPTDNYITTYPGQGLNGYTVEEAKTVLKKCKSAFYILPSIISNEKQEILGTVSWNLREMLAHAEETRKLMPVCVETKAIVSTIQRKYKGIKIQEGVVDYGARFYFYTSKTTVASLINTLNDLNETLVTMPLGYVTHGLNLEEAARYMRSLKVPATVSVSSPDAVTAYNGYLTSSSKTPEEHFIETISLAGSYKDWSYSGQSTQLGIEFLKRGDKSVYYTSNPTTFHLDGEVITFDNLKTLLSLREVRTIKVFTTVDNINLHTQVVDMSMTYGQQFGPTYLDGADVTKIKPHNSHEGKTFYVLPNDDTLRVEAFEYYHTTDPSFLGRYMSALNHTKKWKYPQVNGLTSIKWADNNCYLATALLTLQQIELKFNPPALQDAYYRARAGEAANFCALILAYCNKTVGELGDVRETMSYLFQHANLDSCKRVLNVVCKTCGQQQTTLKGVEAVMYMGTLSYEQFKKGVQIPCTCGKQATKYLVQQESPFVMMSAPPAQYELKHGTFTCASEYTGNYQCGHYKHITSKETLYCIDGALLTKSSEYKGPITDVFYKENSYTTTIKPVTYKLDGVVCTEIDPKLDNYYKKDNSYFTEQPIDLVPNQPYPNASFDNFKFVCDNIKFADDLNQLTGYKKPASRELKVTFFPDLNGDVVAIDYKHYTPSFKKGAKLLHKPIVWHVNNATNKATYKPNTWCIRCLWSTKPVETSNSFDVLKSEDAQGMDNLACEDLKPVSEEVVENPTIQKDVLECNVKTTEVVGDIILKPANNSLKITEEVGHTDLMAAYVDNSSLTIKKPNELSRVLGLKTLATHGLAAVNSVPWDTIANYAKPFLNKVVSTTTNIVTRCLNRVCTNYMPYFFTLLLQLCTFTRSTNSRIKASMPTTIAKNTVKSVGKFCLEASFNYLKSPNFSKLINIIIWFLLLSVCLGSLIYSTAALGVLMSNLGMPSYCTGYREGYLNSTNVTIATYCTGSIPCSVCLSGLDSLDTYPSLETIQITISSFKWDLTAFGLVAEWFLAYILFTRFFYVLGLAAIMQLFFSYFAVHFISNSWLMWLIINLVQMAPISAMVRMYIFFASFYYVWKSYVHVVDGCNSSTCMMCYKRNRATRVECTTIVNGVRRSFYVYANGGKGFCKLHNWNCVNCDTFCAGSTFISDEVARDLSLQFKRPINPTDQSSYIVDSVTVKNGSIHLYFDKAGQKTYERHSLSHFVNLDNLRANNTKGSLPINVIVFDGKSKCEESSAKSASVYYSQLMCQPILLLDQALVSDVGDSAEVAVKMFDAYVNTFSSTFNVPMEKLKTLVATAEAELAKNVSLDNVLSTFISAARQGFVDSDVETKDVVECLKLSHQSDIEVTGDSCNNYMLTYNKVENMTPRDLGACIDCSARHINAQVAKSHNIALIWNVKDFMSLSEQLRKQIRSAAKKNNLPFKLTCATTRQVVNVVTTKIALKGG

SEQ ID NO: 15765 - protein, 1946 aa, Artificial Sequence
  SARS-CoV-2__MT913150.1__non-structural protein 3 (NSP3)
MAPTKVTFGDDTVIEVQGYKSVNITFELDERIDKVLNEKCSAYTVELGTEVNEFACVVADAVIKTLQPVSELLTPLGIDLDEWSMATYYLFDESGEFKLASHMYCSFYPPDEDEEEGDCEEEEFEPSTQYEYGTEDDYQGKPLEFGATSAALQPEEEQEEDWLDDDSQQTVGQQDGSEDNQTTTIQTIVEVQPQLEMELTPVVQTIEVNSFSGYLKLTDNVYIKNADIVEEAKKVKPTVVVNAANVYLKHGGGVAGALNKATNNAMQVESDDYIATNGPLKVGGSCVLSGHNLAKHCLHVVGPNVNKGEDIQLLKSAYENFNQHEVLLAPLLSAGIFGADPIHSLRVCVDTVRTNVYLAVFDKNLYDKLVSSFLEMKSEKQVEQKIAEIPKEEVKPFITESKPSVEQRKQDDKKIKACVEEVTTTLEETKFLTENLLLYIDINGNLHPDSATLVSDIDITFLKKDAPYIVGDVVQEGVLTAVVIPTKKAGGTTEMLAKALRKVPTDNYITTYPGQGLNGYTVEEAKTVLKKCKSAFYILPSIISNEKQEILGTVSWNLREMLAHAEETRKLMPVCVETKAIVSTIQRKYKGIKIQEGVVDYGARFYFYTSKTTVASLINTLNDLNETLVTMPLGYVTHGLNLEEAARYMRSLKVPATVSVSSPDAVTAYNGYLTSSSKTPEEHFIETISLAGSYKDWSYSGQSTQLGIEFLKRGDKSVYYTSNPTTFHLDGEVITFDNLKTLLSLREVRTIKVFTTVDNINLHTQVVDMSMTYGQQFGPTYLDGADVTKIKPHNSHEGKTFYVLPNDDTLRVEAFEYYHTTDPSFLGRYMSALNHTKKWKYPQVNGLTSIKWADNNCYLATALLTLQQIELKFNPPALQDAYYRARAGEAANFCALILAYCNKTVGELGDVRETMSYLFQHANLDSCKRVLNVVCKTCGQQQTTLKGVEAVMYMGTLSYEQFKKGVQIPCTCGKQATKYLVQQESPFVMMSAPPAQYELKHGTFTCASEYTGNYQCGHYKHITSKETLYCIDGALLTKSSEYKGPITDVFYKENSYTTTIKPVTYKLDGVVCTEIDPKLDNYYKKDNSYFTEQPIDLVPNQPYPNASFDNFKFVCDNIKFADDLNQLTGYKKPASRELKVTFFPDLNGDVVAIDYKHYTPSFKKGAKLLHKPIVWHVNNATNKATYKPNTWCIRCLWSTKPVETSNSFDVLKSEDAQGMDNLACEDLKPVSEEVVENPTIQKDVLECNVKTTEVVGDIILKPANNSLKITEEVGHTDLMAAYVDNSSLTIKKPNELSRVLGLKTLATHGLAAVNSVPWDTIANAKPFLNKVVSTTTNIVTRCLNRVCTNYMPYFFTLLLQLCTFTRSTNSRIKASMPTTIAKNTVKSVGKFCLEASFNYLKSPNFSKLINIIIWFLLLSVCLGSLIYSTAALGVLMSNLGMPSYCTGYREGYLNSTNVTIATYCTGSIPCSVCLSGLDSLDTYPSLETIQITISSFKWDLTAFGLVAEWFLAYILFTRFFYVLGLAAIMQLFFSYFAVHFISNSWLMWLIINLVQMAPISAMVRMYIFFASFYYVWKSYVHVVDGCNSSTCMMCYKRNRATRVECTTIVNGVRRSFYVYANGGKGFCKLHNWNCVNCDTFCAGSTFISDEVARDLSLQFKRPINPTDQSSYIVDSVTVKNGSIHLYFDKAGQKTYERHSLSHFVNLDNLRANNTKGSLPINVIVFDGKSKCEESSAKSASVYYSQLMCQPILLLDQALVSDVGDSAEVAVKMFDAYVNTFSSTFNVPMEKLKTLVATAEAELAKNVSLDNVLSTFISAARQGFVDSDVETKDVVECLKLSHQSDIEVTGDSCNNYMLTYNKVENMTPRDLGACIDCSARHINAQVAKSHNIALIWNVKDFMSLSEQLRKQIRSAAKKNNLPFKLTCATTRQVVNVVTTKIALKGGK

SEQ ID NO: 15766 - protein, 1946 aa, Artificial Sequence
  SARS-CoV-2__MT913152.1__non-structural protein 3 (NSP3)
MAPTKVTFGDDTVIEVQGYKSVNITFELDERIDKVLNEKCSAYTVELGTEVNEFACVVADAVIKTLQPVSELLTPLGIDLDEWSMATYYLFDESGEFKLASHMYCSFYPPDEDEEEGDCEEEEFEPSTQYEYGTEDDYQGKPLEFGATSAALQPEEEQEEDWLDDDSQQTVGQQDGSEDNQTTTIQTIVEVQPQLEMELTPVVQTIEVNSFSGYLKLTDNVYIKNADIVEEAKKVKPTVVVNAANVYLKHGGGVAGALNKATNNAMQVESDDYIATNGPLKVGGSCVLSGHNLAKHCLHVVGPNVNKGEDIQLLKSAYENFNQHEVLLAPLLSAGIFGADPIHSLRVCVDTVRTNVYLAVFDKNLYDKLVSSFLEMKSEKQVEQKIAEIPKEEVKPFITESKPSVEQRKQDDKKIKACVEEVTTTLEETKFLTENLLLYIDINGNLHPDSATLVSDIDITFLKKDAPYIVGDVVQEGVLTAVVIPTKKAGGTTEMLAKALRKVPTDNYITTYPGQGLNGYTVEEAKTVLKKCKSAFYILPSIISNEKQEILGTVSWNLREMLAHAEETRKLMPVCVETKAIVSTIQRKYKGIKIQEGVVDYGARFYFYTSKTTVASLINTLNDLNETLVTMPLGYVTHGLNLEEAARYMRSLKVPATVSVSSPDAVTAYNGYLTSSSKTPEEHFIETISLAGSYKDWSYSGQSTQLGIEFLKRGDKSVYYTSNPTTFHLDGEVITFDNLKTLLSLREVRTIKVFTTVDNINLHTQVVDMSMTYGQQFGPTYLDGADVTKIKPHNSHEGKTFYVLPNDDTLRVEAFEYYHTTDPSFLGRYMSALNHTKKWKYPQVNGLTSIKWADNNCYLATALLTLQQIELKFNPPALQDAYYRARAGEAANFCALILAYCNKTVGELGDVRETMSYLFQHANLDSCKRVLNVVCKTCGQQQTTLKGVEAVMYMGTLSYEQFKKGVQIPCTCGKQATKYLVQQESPFVMMSAPPAQYELKHGTFTCASEYTGNYQCGHYKHITSKETLYCIDGALLTKSSEYKGPITDVFYKENSYTTTIKPVTYKLDGVVCTEIDPKLDNYYKKDNSYFTEQPIDLVPNQPYPNASFDNFKFVCDNIKFADDLNQLTGYKKPASRELKVTFFPDLNGDVVAIDYKHYTPSFKKGAKLLHKPIVWHVNNATNKATYKPNTWCIRCLWSTKPVETSNSFDVLKSEDAQGMDNLACEDLKPVSEEVVENPTIQKDVLECNVKTTEVVGDIILKPANNSLKITEEVGHIDLMAAYVDNSSLTIKKPNELSRVLGLKTLATHGLAAVNSVPWDTIANYAKPFLNKVVSTTTNIVTRCLNRVCTNYMPYFFTLLLQLCTFTRSTNSRIKASMPTTIAKNTVKSVGKFCLEASFNYLKSPNFSKLINIIIWFLLLSVCLGSLIYSTAALGVLMSNLGMPSYCTGYREGYLNSTNVTIATYCTGSIPCSVCLSGLDSLDTYPSLETIQITISSFKWDLTAFGLVAEWFLAYILFTRFFYVLGLAAIMQLFFSYFAVHFISNSWLMWLIINLVQMAPISAMVRMYIFFASFYYVWKSYVHVVDGCNSSTCMMCCKRNRATRVECTTIVNGVRRSFYVYANGGKGFCKLHNWNCVNCDTFCAGSTFISDEVARDLSLQFKRPINPTDQSSYIVDSVTVKNGSIHLYFDKAGQKTYERHSLSHFVNLDNLRANNTKGSLPINVIVFDGKSKCEESSAKSASVYYSQLMCQPILLLDQALVSDVGDSAEVAVKMFDAYVNTFSSTFNVPMEKLKTLVATAEAELAKNVSLDNVLSTFISAARQGFVDSDVETKDVVECLKLSHQSDIEVTGDSCNNYMLTYNKVENMTPRDLGACIDCSARHINAQVAKSHNIALIWNVKDFMSLSEQLRKQIRSAAKKNNLPFKLTCATTRQVVNVVTTKIALKGG

SEQ ID NO: 15767 - protein, 1946 aa, Artificial Sequence
  SARS-CoV-2__MT907517.1__non-structural protein 3 (NSP3)
MAPTKVTFGDDTVIEVQGYKSVNITFELDERIDKVLNEKCSAYTVELGTEVNEFACVVADAVIKTLQPVSELLTPLGIDLDEWSMATYYLFDESGEFKLASHMYCSFYPPDEDEEEGDCEEEEFEPSTQYEYGTEDDYQGKPLEFGATSAALQPEEEQEEDWLDDDSQQTVGQQDGSEDNQTTTIQTIVEVQPQLEMELTPVVQTIEVNSFSGYLKLTDNVYIKNADIVEEAKKVKPTVVVNAANVYLKHGGGVAGALNKATNNAMQVESDDYIATNGPLKVGGSCVLSGHNLAKHCLHVVGPNVNKGEDIQLLKSAYENFNQHEVLLAPLLSAGIFGADPIHSLRVCVDTVRTNVYLAVFDKNLYDKLVSSFLEMKSEKQVEQKIAEIPKEEVKPFITESKPSVEQRKQDDKKIKACVEEVTTTLEETKFLTENLLLYIDINGNLHPDSATLVSDIDITFLKKDAPYIVGDVVQEGVLTAVVIPTKKAGGTTEMLAKALRKVPTDNYITTYPGQGLNGYTVEEAKTVLKKCKSAFYILPSIISNEKQEILGTVSWNLREMLAHAEETRKLMPVCVETKAIVSTIQRKYKGIKIQEGVVDYGARFYFYTSKTTVASLINTLNDLNETLVTMPLGYVTHGLNLEEAARYMRSLKVPATVSVSSPDAVTAYNGYLTSSSKTPEEHFIETISLAGSYKDWSYSGQSTQLGIEFLKRGDKSVYYTSNPTTFHLDGEVITFDNLKTLLSLREVRTIKVFTTVDNINLHTQVVDMSMTYGQQFGPTYLDGADVTKIKPHNSHEGKTFYVLPNDDTLRVEAFEYYHTTDPSFLGRYMSALNHTKKWKYPQVNGLTSIKWADNNCYLATALLTLQQIELKFNPPALQDAYYRARAGEAANFCALILAYCNKTVGELGDVRETMSYLFQHANLDSCKRVLNVVCKTCGQQQTTLKGVEAVMYMGTLSYEQFKKGVQIPCTCGKQATKYLVQQESPFVMMSAPPAQYELKHGTFTCASEYTGNYQCGHYKHITSKETLYCIDGALLTKSSEYKGPITDVFYKENSYTTTIKPVTYKLDGVVCTEIDPKLDNYYKKDNSYFTEQPIDLVPNQPYPNASFDNFKFVCDNIKFADDLNQLTGYKKPASRELKVTFFPDLNGDVVAIDYKHYTPSFKKGAKLLHKPIVWHVNNATNKATYKPNTWCIRCLWSTKPVETSNSFDVLKSEDAQGMDNLACEDLKPVSEEVVENPTIQKDVLECNVKTTEVVGDIILKPANNSLKITEEVGHTDLMAAYVDNSSLTIKKPNELSRVLGLKTLATHGLAAVNSVPWDTIANYAKPFLNKVVSTTTNIVTRCLNRVCTNYMPYFFTLLLQLCTFTRSTNSRIKASMPTTIAKNTVKSVGKFCLEASFNYLKSPNFSKLINIIIWFLLLSVCLGSLIYSTAALGVLMSNLGMPSYCTGYREGYLNSTNVTIATYCTGSIPCSVCLSGLDSLDTYPSLETIQITISSFKWDLTAFGLVAEWFLAYILFTRFFYVLGLAAIMQLFFSYFAVHFISNSWLMWLIINLVQMAPISAMVRMYIFFASFYYVWKSYVHVVDGCNSSTCMMCYKRNRATRVECTTIVNGVRRSFYVYANGGKGFCKLHNWNCVNCDTFCAGSTFISDEVARDLSLQFKRPINPTDQSSYIVDSVTVKNGSIHLYFDKAGQKTYERHSLSHFVNLDNLRANNTKGSLPINVIVFDGKSKCEESSAKSASVYYSQLMCQPILLLDQALVSDVGDSAEVAVKMFDAYVNTFSSTFNVPMEKLKTLVATAEAELAKNVSLDNVLSTFISAARQGFVDSDVETKDVVECLKLSHQSDIEVTGDSCNNYMLTYNKVENMTPRDLGARIDCSARHINAQVAKSHNIALIWNVKDFMSLSEQLRKQIRSAAKKNNLPFKLTCATTRQVVNVVTTKIALKGG

SEQ ID NO: 15768 - protein, 1946 aa, Artificial Sequence
  SARS-CoV-2__MT911561.1__non-structural protein 3 (NSP3)
MAPTKVTFGDDTVIEVQGYKSVNITFELDERIDKVLNEKCSAYTVELGTEVNEFACVVADAVIKTLQPVSELLTPLGIDLDEWSMATYYLFDESGEFKLASHMYCSFYPPDEDEEEGDCEEEEFEPSTQYEYGTEDDYQGKPLEFGATSAALQPEEEQEEDWLDDDSQQTVGQQDGSEDNQTTTIQTIVEVQPQLEMELTPVVQTIEVNSFSGYLKLTDNVYIKNADIVEEAKKVKPTVVVNAANVYLKHGGGVAGALNKATNNAMQVESDDYIATNGPLKVGGSCVLSGHNLAKHCLHVVGPNVNKGEDIQLLKSAYENFNQHEVLLAPLLSAGIFGADPIHSLRVCVDTVRTNVYLAVFDKNLYDKLVSSFLEMKSEKQVEQKIAEIPKEEVKPFITESKPSVEQRKQDDKKIKACVEEVTTTLEETKFLTENLLLYIDINGNLHPDSATLVSDIDITFLKKDAPYIVGDVVQEGVLTAVVIPTKKAGGTTEMLAKALRKVPTDNYITTYPGQGLNGYTVEEAKTVLKKCKSAFYILPSIISNEKQEILGTVSWNLREMLAHAEETRKLMPVCVETKAIVSTIQRKYKGIKIQEGVVDYGARFYFYTSKTTVASLINTLNDLNETLVTMPLGYVTHGLNLEEAARYMRSLKVPATVSVSSPDAVTAYNGYLTSSSKTPEEHFIETISLAGSYKDWSYSGQSTQLGIEFLKRGDKSVYYTSNPTTFHLDGEVITFDNLKTLLSLREVRTIKVFTTVDNINLHTQVVDMSMTYGQQFGPTYLDGADVTKIKPHNSHEGKTFYVLPNDDTLRVEAFEYYHTTDPSFLGRYMSALNHTKKWKYPQVNGLTSIKWADNNCYLATALLTLQQIELKFNPPALQDAYYRARAGEAANFCALILAYCNKTVGELGDVRETMSYLFQHANLDSCKRVLNVVCKTCGQQQTTLKGVEAVMYMGTLSYEQFKKGVQIPCTCGKQATKYLVQQESPFVMMSAPPAQYELKHGTFTCASEYTGNYQCGHYKHITSKETLYCIDGALLTKSSEYKGPITDVFYKENSYTTTIKPVTYKLDGVVCTEIDPKLDNYYKKDNSYFTEQPIDLVPNQPYPNASFDNFTFVCDNIKFADDLNQLTGYKKPASRELKVTFFPDLNGDVVAIDYKHYTPSFKKGAKLLHKPIVWHVNNATNKATYKPNTWCIRCLWSTKPVETSNSFDVLKSEDAQGMDNLACEDLKPVSEEVVENPTIQKDVLECNVKTTEVVGDIILKPANNSLKITEEVGHTDLMAAYVDNSSLTIKKPNELSRVLGLKTLATHGLAAVNSVPWDTIANYAKPFLNKVVSTTTNIVTRCLNRVCTNYMPYFFTLLLQLCTFTRSTNSRIKASMPTTIAKNTVKSVGKFCLEASFNYLKSPNFSKLINIIIWFLLLSVCLGSLIYSTAALGVLMSNLGMPSYCTGYREGYLNSTNVTIATYCTGSIPCSVCLSGLDSLDTYPSLETIQITISSFKWDLTAFGLVAEWFLAYILFTRFFYVLGLAAIMQLFFSYFAVHFISNSWLMWLIINLVQMAPISAMVRMYIFFASFYYVWKSYVHVVDGCNSSTCMMCYKRNRATRVECTTIVNGVRRSFYVYANGGKGFCKLHNWNCVNCDTFCAGSTFISDEVARDLSLQFKRPINPTDQSSYIVDSVTVKNGSIHLYFDKAGQKTYERHSLSHFVNLDNLRANNTKGSLPINVIVFDGKSKCEESSAKSASVYYSQLMCQPILLLDQALVSDVGDSAEVAVKMFDAYVNTFSSTFNVPMEKLKTLVATAEAELAKNVSLDNVLSTFISAARQGFVDSDVETKDVVECLKLSHQSDIEVTGDSCNNYMLTYNKVENMTPRDLGACIDCSARHINAQVAKSHNIALIWNVKDFMSLSEQLRKQIRSAAKKNNLPFKLTCATTRQVVNVVTTKIALKGG

SEQ ID NO: 15769 - protein, 1946 aa, Artificial Sequence
  SARS-CoV-2__MT911803.1__non-structural protein 3 (NSP3)
MAPTKVTFGDDTVIEVQGYKSVNITFELDERIDKVLNEKCSAYTVELGTEVNEFACVVADAVIKTLQPVSELLTPLGIDLDEWSMATYYLFDESGEFKLASHMYCSFYPPDEDEEEGDCEEEEFEPSTQYEYGTEDDYQGKPLEFGATSAALQPEEEQEEDWLDDDSQQTVGQQDGSEDNQTTTIQTIVEVQPQLEMELTPVVQTIEVNSFSGYLKLTDNVYIKNADIVEEAKKVKPTVVVNAANVYLKHGGGVAGALNKATNNAMQVESDDYIATNGPLKVGGSCVLSGHNLAKHCLHVVGPNVNKGEDIQLLKSAYENFNQHEVLLAPLLSAGIFGADPIHSLRVCVDTVRTNVYLAVFDKNLYDKLVSSFLEMKSEKQVEQKIAEIPKEEVKPFITESKPSVEQRKQDDKKIKACVEEVTTTLEETKFLTENLLLYIDINGNLHPDSATLVSDIDITFLKKDAPYIVGDVVQEGVLTAVVIPTKKAGGTTEMLAKALRKVPTDNYITTYPGQGLNGYTVEEAKTVLKKCKSAFYILPSIISNEKQEILGTVSWNLREMLAHAEETRKLMPVCVETKAIVSTIQRKYKGIKIQEGVVDYGARFYFYTSKTTVASLINTLNDLNETLVTMPLGYVTHGLNLEEAARYMRSLKVPATVSVSSPDAVTAYNGYLTSSSKTPEEHFIETISLAGSYKDWSYSGQSTQLGIEFLKRGDKSVYYTSNPTTFHLDGEVITFDNLKTLLSLREVRTIKVFTTVDNINLHTQVVDMSMTYGQQFGPTYLDGADVTKIKPHNSHEGKTFYVLPNDDTLRVEAFEYYHTTDPSFLGRYMSALNHTKKWKYPQVNGLTSIKWADNNCYLATALLTLQQIELKFNPPALQDAYYRARAGEAANFCALILAYCNKTVGELGDVRETMSYLFQHANLDSCKRVLNVVCKTCGQQRTTLKGVEAVMYMGTLSYEQFKKGVQIPCTCGKQATKYLVQQESPFVMMSAPPAQYELKHGTFTCASEYTGNYQCGHYKHITSKETLYCIDGALLTKSSEYKGPITDVFYKENSYTTTIKPVTYKLDGVVCTEIDPKLDNYYKKDNSYFTEQPIDLVPNQPYPNASFDNFKFVCDNIKFADDLNQLTGYKKPASRELKVTFFPDLNGDVVAIDYKHYTPSFKKGAKLLHKPIVWHVNNATNKATYKPNTWCIRCLWSTKPVETSNSFDVLKSEDAQGMDNLACEDLKPVSEEVVENPTIQKDVLECNVKTTEVVGDIILKPANNSLKITEEVGHTDLMAAYVDNSSLTIKKPNELSRVLGLKTLATHGLAAVNSVPWDTIANYAKPFLNKVVSTTTNIVTRCLNRVCTNYMPYFFTLLLQLCTFTRSTNSRIKASMPTTIAKNTVKSVGKFCLEASFNYLKSPNFSKLINIIIWFLLLSVCLGSLIYSTAALGVLMSNLGMPSYCTGYREGYLNSTNVTIATYCTGSIPCSVCLSGLDSLDTYPSLETIQITISSFKWDLTAFGLVAEWFLAYILFTRFFYVLGLAAIMQLFFSYFAVHFISNSWLMWLIINLVQMAPISAMVRMYIFFASFYYVWKSYVHVVDGCNSSTCMMCYKRNRATRVECTTIVNGVRRSFYVYANGGKGFCKLHNWNCVNCDTFCAGSTFISDEVARDLSLQFKRPINPTDQSSYIVDSVTVKNGSIHLYFDKAGQKTYERHSLSHFVNLDNLRANNTKGSLPINVIVFDGKSKCEESSAKSASVYYSQLMCQPILLLDQALVSDVGDSAEVAVKMFDAYVNTFSSTFNVPMEKLKTLVATAEAELAKNVSLDNVLSTFISAARQGFVDSDVETKDVVECLKLSHQSDIEVTGDSCNNYMLTYNKVENMTPRDLGACIDCSARHINAQVAKSHNIALIWNVKDFMSLSEQLRKQIRSAAKKNNLPFKLTCATTRQVVNVVTTKIALKGG

SEQ ID NO: 15770 - protein, 1946 aa, Artificial Sequence
  SARS-CoV-2__MT911815.1__non-structural protein 3 (NSP3)
MAPTKVTFGDDTVIEVQGYKSVNITFELDERIDKVLNEKCSAYTVELGTEVNEFACVVADAVIKTLQPVSELLTPLGIDLDEWSMATYYLFDESGEFKLASHMYCSFYPPDEDEEEGDCEEEEFEPSTQYEYGTEDDYQGKPLEFGATSVALQPEEEQEEDWLDDDSQQTVGQQDGSEDNQTTTIQTIVEVQPQLEMELTPVVQTIEVNSFSGYLKLTDNVYIKNADIVEEAKKVKPTVVVNAANVYLKHGGGVAGALNKATNNAMQVESDDYIATNGPLKVGGSCVLSGHNLAKHCLHVVGPNVNKGEDIQLLKSAYENFNQHEVLLAPLLSAGIFGADPIHSLRVCVDTVRTNVYLAVFDKNLYDKLVSSFLEMKSEKQVEQKIAEIPKEEVKPFITESKPSVEQRKQDDKKIKACVEEVTTTLEETKFLTENLLLYIDINGNLHPDSATLVSDIDITFLKKDAPYIVGDVVQEGVLTAVVIPTKKAGGTTEMLAKALRKVPTDNYITTYPGQGLNGYTVEEAKTVLKKCKSAFYILPSIISNEKQEILGTVSWNLREMLAHAEETRKLMPVCVETKAIVSTIQRKYKGIKIQEGVVDYGARFYFYTSKTTVASLINTLNDLNETLVTMPLGYVTHGLNLEEAARYMRSLKVPATVSVSSPDAVTAYNGYLTSSSKTPEEHFIETISLAGSYKDWSYSGQSTQLGIEFLKRGDKSVYYTSNPTTFHLDGEVITFDNLKTLLSLREVRTIKVFTTVDNINLHTQVVDMSMTYGQQFGPTYLDGADVTKIKPHNSHEGKTFYVLPNDDTLRVEAFEYYHTTDPSFLGRYMSALNHTKKWKYPQVNGLTSIKWADNNCYLATALLTLQQIELKFNPPALQDAYYRARAGEAANFCALILAYCNKTVGELGDVRETMSYLFQHANLDSCKRVLNVVCKTCGQQQTTLKGVEAVMYMGTLSYEQFKKGVQIPCTCGKQATKYLVQQESPFVMMSAPPAQYELKHGTFTCASEYTGNYQCGHYKHITSKETLYCIDGALLTKSSEYKGPITDVFYKENSYTTTIKPVTYKLDGVVCTEIDPKLDNYYKKDNSYFTEQPIDLVPNQPYPNASFDNFKFVCDNIKFADDLNQLTGYKKPASRELKVTFFPDLNGDVVAIDYKHYTPSFKKGAKLLHKPIVWHVNNATNKATYKPNTWCIRCLWSTKPVETSNSFDVLKSEDAQGMDNLACEDLKPVSEEVVENPTIQKDVLECNVKTTEVVGDIILKPANNSLKITEEVGHTDLMAAYVDNSSLTIKKPNELSRVLGLKTLATHGLAAVNSVPWDTIANYAKPFLNKVVSTTTNIVTRCLNRVCTNYMPYFFTLLLQLCTFTRSTNSRIKASMPTTIAKNTVKSVGKFCLEASFNYLKSPNFSKLINIIIWFLLLSVCLGSLIYSTAALGVLMSNLGMPSYCTGYREGYLNSTNVTIATYCTGSIPCSVCLSGLDSLDTYPSLETIQITISSFKWDLTAFGLVAEWFLAYILFTRFFYVLGLAAIMQLFFSYFAVHFISNSWLMWLIINLVQMAPISAMVRMYIFFASFYYVWKSYVHVVDGCNSSTCMMCYKRNRATRVECTTIVNGVRRSFYVYANGGKGFCKLHNWNCVNCDTFCAGSTFISDEVARDLSLQFKRPINPTDQSSYIVDSVTVKNGSIHLYFDKAGQKTYERHSLSHFVNLDNLRANNTKGSLPINVIVFDGKSKCEESSAKSASVYYSQLMCQPILLLDQALVSDVGDSAEVAVKMFDAYVNTFSSTFNVPMEKLKTLVATAEAELAKNVSLDNVLSTFISAARQGFVDSDVETKDVVECLKLSHQSDIEVTGDSCNNYMLTYNKVENMTPRDLGACIDCSARHINAQVAKSHNIALIWNVKDFMSLSEQLRKQIRSAAKKNNLPFKLTCATTRQVVNVVTTKIALKGG

SEQ ID NO: 15771 - protein, 1946 aa, Artificial Sequence
  SARS-CoV-2__MT911818.1__non-structural protein 3 (NSP3)
MAPTKVTFGDDTVIEVQGYKSVNITFELDERIDKVLNEKCSAYTVELGTEVNEFACVVADAVIKTLQPVSELLTPLGIDLDEWSMATYYLFDESGEFKLASHMYCSFYPPDEDEEEGDCEEEEFEPSTQYEYGTEDDYQGKPLEFGATSAALQPEEEQEEDWLDDDSQQTVGQQDGSEDNQTTTIQTIVEVQPQLEMELTPVVQTIEVNSFSGYLKLTDNVYIKNADIVEEAKKVKPTVVVNAANVYLKHGGGVAGALNKATNNAMQVESDDYIATNGPLKVGGSCVLSGHNLAKHCLHVVGPNVNKGEDIQLLKSAYENFNQHEVLLAPLLSAGIFGADPIHSLRVCVDTVRTNVYLAVFDKNLYDKLVSSFLEMKSEKQVEQKIAEIPKEEVKPFITESKPSVEQRKQDDKKIKACVEEVTTTLEETKFLTENLLLYIDINGNLHPDSATLVSDIDITFLKKDAPYIVGDVVQEGVLTAVVIPTKKAGGTTEMLAKALRKVPTDNYITTYPGQGLNGYTVEEAKTVLKKCKSAFYILPSIISNEKQEILGTVSWNLREMLAHAEETRKLMPVCVETKAIVSTIQRKYKGIKIQEGVVDYGARFYFYTSKTTVASLINTLNDLNETLVTMPLGYVTHGLNLEEAARYMRSLKVPATVSVSSPDAVTAYNGYLTSSSKTPEEHFIETISLAGSYKDWSYSGQSTQLGIEFLKRGDKSVYYTSNPTTFHLDGEVITFDNLKTLLSLREVRTIKVFTTVDNINLHTQVVDMSMTYGQQFGPTYLDGADVTKIKPHNSHEGKTFYVLPNDDTLRVEAFEYYHTTDPSFLGRYMSALNHTKKWKYPQVNGLTSIKWADNNCYLATALLTLQQIELKFNPPALQDAYYRARAGEAANFCALILAYCNKTVGELGDVRETMSYLFQHANLDSCKRVLNVVCKTCGQQQTTLKSVEAVMYMGTLSYEQFKKGVQIPCTCGKQATKYLVQQESPFVMMSAPPAQYELKHGTFTCASEYTGNYQCGHYKHITSKETLYCIDGALLTKSSEYKGPITDVFYKENSYTTTIKPVTYKLDGVVCTEIDPKLDNYYKKDNSYFTEQPIDLVPNQPYPNASFDNFKFVCDNIKFADDLNQLTGYKKPASRELKVTFFPDLNGDVVAIDYKHYTPSFKKGAKLLHKPIVWHVNNATNKATYKPNTWCIRCLWSTKPVETSNSFDVLKSEDAQGMDNLACEDLKPVSEEVVENPTIQKDVLECNVKTTEVVGDIILKPANNSLKITEEVGHTDLMAAYVDNSSLTIKKPNELSRVLGLKTLATHGLAAVNSVPWDTIANYAKPFLNKVVSTTTNIVTRCLNRVCTNYMPYFFTLLLQLCTFTRSTNSRIKASMPTTIAKNTVKSVGKFCLEASFNYLKSPNFSKLINIIIWFLLLSVCLGSLIYSTAALGVLMSNLGMPSYCTGYREGYLNSTNVTIATYCTGSIPCSVCLSGLDSLDTYPSLETIQITISSFKWDLTAFGLVAEWFLAYILFTRFFYVLGLAAIMQLFFSYFAVHFISNSWLMWLIINLVQMAPISAMVRMYIFFASFYYVWKSYVHVVDGCNSSTCMMCYKRNRATRVECTTIVNGVRRSFYVYANGGKGFCKLHNWNCVNCDTFCAGSTFISDEVARDLSLQFKRPINPTDQSSYIVDSVTVKNGSIHLYFDKAGQKTYERHSLSHFVNLDNLRANNTKGSLPINVIVFDGKSKCEESSAKSASVYYSQLMCQPILLLDQALVSDVGDSAEVAVKMFDAYVNTFSSTFNVPMEKLKTLVATAEAELAKNVSLDNVLSTFISAARQGFVDSDVETKDVVECLKLSHQSDIEVTGDSCNNYMLTYNKVENMTPRDLGACIDCSARHINAQVAKSHNIALIWNVKDFMSLSEQLRKQIRSAAKKNNLPFKLTCATTRQVVNVVTTKIALKGG

SEQ ID NO: 15772 - protein, 1946 aa, Artificial Sequence
  SARS-CoV-2__MT911819.1__non-structural protein 3 (NSP3)
MAPTKVTFGDDTVIEVQGYKSVNITFELDERIDKVLNEKCSAYTVELGTEVNEFACVVADAVIKTLQPVSELLTPLGIDLDEWSMATYYLFDESGEFKLASHMYCSFYPPDEDEEEGDCEEEEFEPSTQYEYGTEDDYQGKPLEFGATSAALQPEEEQEEDWLDDDSQQTVGQQDGSEDNQTTTIQTIVEVQPQLEMELTPVVQTIEVNSFSGYLKLTDNVYIKNADIVEEAKKVKPTVVVNAANVYLKHGGGVAGALNKATNNAMQVESDDYIATNGPLKVGGSCVLSGHNLAKHCLHVVGPNVNKGEDIQLLKSAYENFNQHEVLLAPLLSAGIFGADPIHSLRVCVDTVRTNVYLAVFDKNLYDKLVSSFLEMKSEKQVEQKIAEIPKEEVKPFITESKPSVEQRKQDDKKIKACVEEVTTTLEETKFLTENLLLYIDINGNLHPDSATLVSDIDITFLKKDAPYIVGDVVQEGVLTAVVIPTKKAGGTTEMLAKALRKVPTDNYITTYPGQGLNGYTVEEAKTVLKKCKSAFYILPSIISNEKQEILGTVSWNLREMLAHAEETRKLMPVCVETKAIVSTIQRKYKGIKIQEGVVDYGARFYFYTSKTTVASLINTLNDLNETLVTMPLGYVTHGLNLEEAARYMRSLKVPATVSVSSPDAVTAYNGYLTSSSKTPEEHFIETISLAGSYKDWSYSGQSTQLGIEFLKRGDKSVYYTSNPTTFHLDGEVITFDNLKTLLSLREVRTIKVFTTVDNINLHTQVVDMSMTYGQQFGPTYLDGADVTKIKPHNSHEGKTFYVLPNDDTLRVEAFEYYHTTDPSFLGRYMSALNHTKKWKYPQVNGLTSIKWADNNCYLATALLTLQQIELKFNPPALQDAYYRARAGEAANFCALILAYCNKTVGELGDVRETMSYLFQHANLDSCKRVLNVVCKTCGQQQTTLKGVEAVMYMGTLSYEQFKKGVQIPCTCGKQATKYLVQQESPFVMMSAPPAQYELKHGTFTCASEYTGNYQCGHYKHITSKETLYCIDGALLTKSSEYKGPITDVFYKENSYTTTIKPVTYKLDGVVCTEIDPKLDNYYKKDNSYFTEQPIDLVPNQPYPNASFDNFKFVCDNIKFADDLNQLTGYKKPASRELKVTFFPDLNGDVVAIDYKHYTPSFKKGAKLLHKPIVWHVNNATNKATYKPNTWCIRCLWSTKPVETSNSFDVLKSEDAQGMDNLACEDLKPVSEEVVENPTIQKDVLECNVKTTEVVGDIILKPANNSLKITEEVGHTDLMAAYVDNSSLTIKKPNELSRVLGLKTLATHGLAAVNSVPWDTIANYAKPFLNKVVSTTTNIVTRCLNRVCTNYMPYFFTLLLQLCTFTRSTNSRIKASMPTTIAKNTVKSVGKFCLEASFNYLKSPNFSKLINIIIWFLLLSVCLGSLIYSTAALGVLMSNLGMPSYCTGYREGYLNSTNVTIATYCTGSIPCSVCLSGLDSLDTYPSLETIQITISSFKWDLTAFGLVAEWFLAYILFTRFFYVLGLAAIMQLFFSYFAVHFISNSWLMWLIINLVQMAPISAMVRMYIFFASFYYVWKSYVHVVDGCNLSTCMMCYKRNRATRVECTTIVNGVRRSFYVYANGGKGFCKLHNWNCVNCDTFCAGSTFISDEVARDLSLQFKRPINPTDQSSYIVDSVTVKNGSIHLYFDKAGQKTYERHSLSHFVNLDNLRANNTKGSLPINVIVFDGKSKCEESSAKSASVYYSQLMCQPILLLDQALVSDVGDSAEVAVKMFDAYVNTFSSTFNVPMEKLKTLVATAEAELAKNVSLDNVLSTFISAARQGFVDSDVETKDVVECLKLSHQSDIEVTGDSCNNYMLTYNKVENMTPRDLGACIDCSARHINAQVAKSHNIALIWNVKDFMSLSEQLRKQIRSAAKKNNLPFKLTCATTRQVVNVVTTKIALKGG

SEQ ID NO: 15773 - protein, 1946 aa, Artificial Sequence
  SARS-CoV-2__MT911823.1__non-structural protein 3 (NSP3)
MAPTKVTFGDDTVIEVQGYKSVNITFELDERIDKVLNEKCSAYTVELGTEVNEFACVVADAVIKTLQPVSELLTPLGIDLDEWSMATYYLFDEFGEFKLASHMYCSFYPPDEDEEEGDCEEEEFEPSTQYEYGTEDDYQGKPLEFGATSAALQPEEEQEEDWLDDDSQQTVGQQDGSEDNQTTTIQTIVEVQPQLEMELTPVVQTIEVNSFSGYLKLTDNVYIKNADIVEEAKKVKPTVVVNAANVYLKHGGGVAGALNKATNNAMQVESDDYIATNGPLKVGGSCVLSGHNLAKHCLHVVGPNVNKGEDIQLLKSAYENFNQHEVLLAPLLSAGIFGADPIHSLRVCVDTVRTNVYLAVFDKNLYDKLVSSFLEMKSEKQVEQKIAEIPKEEVKPFITESKPSVEQRKQDDKKIKACVEEVTTTLEETKFLTENLLLYIDINGNLHPDSATLVSDIDITFLKKDAPYIVGDVVQEGVLTAVVIPTKKAGGTTEMLAKALRKVPTDNYITTYPGQGLNGYTVEEAKTVLKKCKSAFYILPSIISNEKQEILGTVSWNLREMLAHAEETRKLMPVCVETKAIVSTIQRKYKGIKIQEGVVDYGARFYFYTSKTTVASLINTLNDLNETLVTMPLGYVTHGLNLEEAARYMRSLKVPATVSVSSPDAVTAYNGYLTSSSKTPEEHFIETISLAGSYKDWSYSGQSTQLGIEFLKRGDKSVYYTSNPTTFHLDGEVITFDNLKTLLSLREVRTIKVFTTVDNINLHTQVVDMSMTYGQQFGPTYLDGADVTKIKPHNSHEGKTFYVLPNDDTLRVEAFEYYHTTDPSFLGRYMSALNHTKKWKYPQVNGLTSIKWADNNCYLATALLTLQQIELKFNPPALQDAYYRARAGEAANFCALILAYCNKTVGELGDVRETMSYLFQHANLDSCKRVLNVVCKTCGQQQTTLKGVEAVMYMGTLSYEQFKKGVQIPCTCGKQATKYLVQQESPFVMMSAPPAQYELKHGTFTCASEYTGNYQCGHYKHITSKETLYCIDGALLTKSSEYKGPITDVFYKENSYTTTIKPVTYKLDGVVCTEIDPKLDNYYKKDNSYFTEQPIDLVPNQPYPNASFDNFKFVCDNIKFADDLNQLTGYKKPASRELKVTFFPDLNGDVVAIDYKHYTPSFKKGAKLLHKPIVWHVNNATNKATYKPNTWCIRCLWSTKPVETSNSFDVLKSEDAQGMDNLACEDLKPVSEEVVENPTIQKDVLECNVKTTEVVGDIILKPANNSLKITEEVGHTDLMAAYVDNSSLTIKKPNELSRVLGLKTLATHGLAAVNSVPWDTIANYAKPFLNKVVSTTTNIVTRCLNRVCTNYMPYFFTLLLQLCTFTRSTNSRIKASMPTTIAKNTVKSVGKFCLEASFNYLKSPNFSKLINIIIWFLLLSVCLGSLIYSTAALGVLMSNLGMPSYCTGYREGYLNSTNVTIATYCTGSIPCSVCLSGLDSLDTYPSLETIQITISSFKWDLTAFGLVAEWFLAYILFTRFFYVLGLAAIMQLFFSYFAVHFISNSWLMWLIINLVQMAPISAMVRMYIFFASFYYVWKSYVHVVDGCNSSTCMMCYKRNRATRVECTTIVNGVRRSFYVYANGGKGFCKLHNWNCVNCDTFCAGSTFISDEVARDLSLQFKRPINPTDQSSYIVDSVTVKNGSIHLYFDKAGQKTYERHSLSHFVNLDNLRANNTKGSLPINVIVFDGKSKCEESSAKSASVYYSQLMCQPILLLDQALVSDVGDSAEVAVKMFDAYVNTFSSTFNVPMEKLKTLVATAEAELAKNVSLDNVLSTFISAARQGFVDSDVETKDVVECLKLSHQSDIEVTGDSCNNYMLTYNKVENMTPRDLGACIDCSARHINAQVAKSHNIALIWNVKDFMSLSEQLRKQIRSAAKKNNLPFKLTCATTRQVVNVVTTKIALKGG

SEQ ID NO: 15774 - protein, 1946 aa, Artificial Sequence
  SARS-CoV-2__MT911825.1__non-structural protein 3 (NSP3)
MAPTKVTFGDDTVIEVQGYKSVNITFELDERIDKVLNEKCSAYTVELGTEVNEFACVVADAVIKTLQPVSELLTPLGIDLDEWSMATYYLFDESGEFKLASHMYCSFYPPDEDEEEGDCEEEEFEPSTQYEYGTEDDYQGKPLEFGATSAALQPEEEQEEDWLDDDSQQTVGQQDGSEDNQTTTIQTIVEVQPQLEMELTPVVQTIEVNSFSGYLKLTDNVYIKNADIVEEAKKVKPTVVVNAANVYLKHGGGVAGALNKATNNAMQVESDDYIATNGPLKVGGSCVLSGHNLAKHCLHVVGPNVNKGEDIQLLKSAYENFNQHEVLLAPLLSAGIFGADPIHSLRVCVDTVRTNVYLAVFDKNLYDKLVSSFLEMKSEKQVEQKIAEIPKEEVKPFITESKPSVEQRKQDDKKIKACVEEVTTTLEETKFLTENLLLYIDIKGNLHPDSATLVSDIDITFLKKDAPYIVGDVVQEGVLTAVVIPTKKAGGTTEMLAKALRKVPTDNYITTYPGQGLNGYTVEEAKTVLKKCKSAFYILPSIISNEKQEILGTVSWNLREMLAHAEETRKLMPVCVETKAIVSTIQRKYKGIKIQEGVVDYGARFYFYTSKTTVASLINTLNDLNETLVTMPLGYVTHGLNLEEAARYMRSLKVPATVSVSSPDAVTAYNGYLTSSSKTPEEHFIETISLAGSYKDWSYSGQSTQLGIEFLKRGDKSVYYTSNPTTFHLDGEVITFDNLKTLLSLREVRTIKVFTTVDNINLHTQVVDMSMTYGQQFGPTYLDGADVTKIKPHNSHEGKTFYVLPNDDTLRVEAFEYYHTTDPSFLGRYMSALNHTKKWKYPQVNGLTSIKWADNNCYLATALLTLQQIELKFNPPALQDAYYRARAGEAANFCALILAYCNKTVGELGDVRETMSYLFQHANLDSCKRVLNVVCKTCGQQQTTLKGVEAVMYMGTLSYEQFKKGVQIPCTCGKQATKYLVQQESPFVMMSAPPAQYELKHGTFTCASEYTGNYQCGHYKHITSKETLYCIDGALLTKSSEYKGPITDVFYKENSYTTTIKPVTYKLDGVVCTEIDPKLDNYYKKDNSYFTEQPIDLVPNQPYPNASFDNFKFVCDNIKFADDLNQLTGYKKPASRELKVTFFPDLNGDVVAIDYKHYTPSFKKGAKLLHKPIVWHVNNATNKATYKPNTWCIRCLWSTKPVETSNSFDVLKSEDAQGMDNLACEDLKPVSEEVVENPTIQKDVLECNVKTTEVVGDIILKPANNSLKITEEVGHTDLMAAYVDNSSLTIKKPNELSRVLGLKTLATHGLAAVNSVPWDTIANYAKPFLNKVVSTTTNIVTRCLNRVCTNYMPYFFTLLLQLCTFTRSTNSRIKASMPTTIAKNTVKSVGKFCLEASFNYLKSPNFSKLINIIIWFLLLSVCLGSLIYSTAALGVLMSNLGMPSYCTGYREGYLNSTNVTIATYCTGSIPCSVCLSGLDSLDTYPSLETIQITISSFKWDLTAFGLVAEWFLAYILFTRFFYVLGLAAIMQLFFSYFAVHFISNSWLMWLIINLVQMAPISAMVRMYIFFASFYYVWKSYVHVVDGCNSSTCMMCYKRNRATRVECTTIVNGVRRSFYVYANGGKGFCKLHNWNCVNCDTFCAGSTFISDEVARDLSLQFKRPINPTDQSSYIVDSVTVKNGSIHLYFDKAGQKTYERHSLSHFVNLDNLRANNTKGSLPINVIVFDGKSKCEESSAKSASVYYSQLMCQPILLLDQALVSDVGDSAEVAVKMFDAYVNTFSSTFNVPMEKLKTLVATAEAELAKNVSLDNVLSTFISAARQGFVDSDVETKDVVECLKLSHQSDIEVTGDSCNNYMLTYNKVENMTPRDLGACIDCSARHINAQVAKSHNIALIWNVKDFMSLSEQLRKQIRSAAKKNNLPFKLTCATTRQVVNVVTTKIALKGG

SEQ ID NO: 15775 - protein, 1946 aa, Artificial Sequence
  SARS-CoV-2__MT483878.1__non-structural protein 3 (NSP3)
MAPTKVTFGDDTVIEVQGYKSVNITFELDERIDKVLNEKCSAYTVELGTEVNEFACVVADAVIKTLQPVSELLTPLGIDLDEWSMATYYLFDESGEFKLASHMYCSFYPPDEDEEEGDCEEEEFEPSTQYEYGTEDDYQGKPLEFGATSAALQPEEEQEEDWLDDDSRQTVGQQDGSEDNQTTTIQTIVEVQPQLEMELTPVVQTIEVNSFSGYLKLTDNVYIKNADIVEEAKKVKPTVVVNAANVYLKHGGGVAGALNKATNNAMQVESDDYIATNGPLKVGGSCVLSGHNLAKHCLHVVGPNVNKGEDIQLLKSAYENFNQHEVLLAPLLSAGIFGADPIHSLRVCVDTVRTNVYLAVFDKNLYDKLVSSFLEMKSEKQVEQKIAEIPKEEVKPFITESKPSVEQRKQDDKKIKACVEEVTTTLEETKFLTENLLLYIDINGNLHPDSATLVSDIDITFLKKDAPYIVGDVVQEGVLTAVVIPTKKAGGTTEMLAKALRKVPTDNYITTYPGQGLNGYTVEEAKTVLKKCKSAFYILPSIISNEKQEILGTVSWNLREMLAHAEETRKLMPVCVETKAIVSTIQRKYKGIKIQEGVVDYGARFYFYTSKTTVASLINTLNDLNETLVTMPLGYVTHGLNLEEAARYMRSLKVPATVSVSSPDAVTAYNGYLTSSSKTPEEHFIETISLAGSYKDWSYSGQSTQLGIEFLKRGDKSVYYTSNPTTFHLDGEVITFDNLKTLLSLREVRTIKVFTTVDNINLHTQVVDMSMTYGQQFGPTYLDGADVTKIKPHNSHEGKTFYVLPNDDTLRVEAFEYYHTTDPSFLGRYMSALNHTKKWKYPQVNGLTSIKWADNNCYLATALLTLQQIELKFNPPALQDAYYRARAGEAANFCALILAYCNKTVGELGDVRETMSYLFQHANLDSCKRVLNVVCKTCGQQQTTLKGVEAVMYMGTLSYEQFKKGVQIPCTCGKQATKYLVQQESPFVMMSAPPAQYELKHGTFTCASEYTGNYQCGHYKHITSKETLYCIDGALLTKSSEYKGPITDVFYKENSYTTTIKPVTYKLDGVVCTEIDPKLDNYYKKDNSYFTEQPIDLVPNQPYPNASFDNFKFVCDNIKFADDLNQLTGYKKPASRELKVTFFPDLNGDVVAIDYKHYTPSFKKGAKLLHKPIVWHVNNATNKATYKPNTWCIRCLWSTKPVETSNSFDVLKSEDAQGMDNLACEDLKPVSEEVVENPTIQKDVLECNVKTTEVVGDIILKPANNSLKITEEVGHTDLMAAYVDNSSLTIKKPNELSRVLGLKTLATHGLAAVNSVPWDTIANYAKPFLNKVVSTTTNIVTRCLNRVCTNYMPYFFTLLLQLCTFTRSTNSRIKASMPTTIAKNTVKSVGKFCLEASFNYLKSPNFSKLINIIIWFLLLSVCLGSLIYSTAALGVLMSNLGMPSYCTGYREGYLNSTNVTIATYCTGSIPCSVCLSGLDSLDTYPSLETIQITISSFKWDLTAFGLVAEWFLAYILFTRFFYVLGLAAIMQLFFSYFAVHFISNSWLMWLIINLVQMAPISAMVRMYIFFASFYYVWKSYVHVVDGCNSSTCMMCYKRNRATRVECTTIVNGVRRSFYVYANGGKGFCKLHNWNCVNCDTFCAGSTFISDEVARDLSLQFKRPINPTDQSSYIVDSVTVKNGSIHLYFDKAGQKTYERHSLSHFVNLDNLRANNTKGSLPINVIVFDGKSKCEESSAKSASVYYSQLMCQPILLLDQALVSDVGDSAEVAVKMFDAYVNTFSSTFNVPMEKLKTLVATAEAELAKNVSLDNVLSTFISAARQGFVDSDVETKDVVECLKLSHQSDIEVTGDSCNNYMLTYNKVENMTPRDLGACIDCSARHINAQVAKSHNIALIWNVKDFMSLSEQLRKQIRSAAKKNNLPFKLTCATTRQVVNVVTTKIALKGG

SEQ ID NO: 15776 - protein, 1946 aa, Artificial Sequence
  SARS-CoV-2__MT483879.1__non-structural protein 3 (NSP3)
MAPTKVTFGDDTVIEVQGYKSVNITFELDERIDKVLNEKCSAYTVELGTEVNEFACVVADAVIKTLQPVSELLTPLGIDLDEWSMATYYLFDESGEFKLASHMYCSFYPPDEDEEEGDCEEEEFEPSTQYEYGTEDDYQGKPLEFGATSAALQPEEEQEEDWLDDDSQQTVGQQDGSEDNQTTTIQTIVEVQPQLEMELTPVVQTIEVNSFSGYLKLTDNVYIKNADIVEEAKKVKPTVVVNAANVYLKHGGGVAGALNKATNNAMQVESDDYIATNGPLKVGGSCVLSGHNLAKHCLHVVGPNVNKGEDIQLLKSAYENFNQHEVLLAPLLSAGIFGADPIHSLRVCVDTVRTNVYLAVFDKNLYDKLVSSFLEMKSEKQVEQKIAEIPKEEVKPFITESKPSVEQRKQDDKKIKACVEEVTTTLEETKFLTENLLLYIDINGNLHPDSATLVSDIDITFLKKDAPYIVGDVVQEGVLTAVVIPTKKAGGTTEMLAKALRKVPTDNYITTYPGQGLNGYTVEEAKTVLKKCKSAFYILPSIISNEKQEILGTVSWNLREMLAHAEETRKLMPVCVETKAIVSTIQRKYKGIKIQEGVVDYGARFYFYTSKTTVASLINTLNDLNETLVTMPLGYVTHGLNLEEAARYMRSLKVPATVSVSSPDAVTAYNGYLTSSSKTPEEHFIETISLAGSYKDWSYSGQSTQLGIEFLKRGDKSVYYTSNPTTFHLDGEVITFDNLKTLLSLREVRTIKVFTTVDNINLHTQVVDMSMTYGQQFGPTYLDGADVTKIKPHNSHEGKTFYVLPNDDTLRVEAFEYYHTTDPSFLGRYMSALNHTKKWKYPQVNGLTSIKWADNNCYLATALLTLQQIELKFNPPALQDAYYRARAGEAANFCALILAYCNKTVGELGDVRETMSYLFQHANLDSCKRVLNVVCKTCGQQQTTLKGVEAVMYMGTLSYEQFKKGVQIPCTCGKQATKYLVQQESPFVMMSAPPAQYELKHGTFTCASEYTGNYQCGHYKHITSKETLYCIDGALLTKSSEYKGPITDVFYKENSYTTTIKPVTYKLDGVVCTEIDPKLDNYYKKDNSYFTEQPIDLVPNQPYPNASFDNFKFVCDNIKFADDLNQLTGYKKPASRELKVTFFPDLNGDVVAIDYKHYTPSFKKGAKLLHKPIVWHVNNATNKATYKPNTWCIRCLWSTKPVETSNSFDVLKSEDAQGMDNLACEDLKPVSEEVVENPTIQKDVLECNVKTTEVVGDIILKPANNSLKITEEVGHTDLMAAYVDNSSLTIKKPNELSRVLGLKTLATHGLAAVNSVPWDTIASYAKPFLNKVVSTTTNIVTRCLNRVCTNYMPYFFTLLLQLCTFTRSTNSRIKASMPTTIAKNTVKSVGKFCLEASFNYLKSPNFSKLINIIIWFLLLSVCLGSLIYSTAALGVLMSNLGMPSYCTGYREGYLNSTNVTIATYCTGSIPCSVCLSGLDSLDTYPSLETIQITISSFKWDLTAFGLVAEWFLAYILFTRFFYVLGLAAIMQLFFSYFAVHFISNSWLMWLIINLVQMAPISAMVRMYIFFASFYYVWKSYVHVVDGCNSSTCMMCYKRNRATRVECTTIVNGVRRSFYVYANGGKGFCKLHNWNCVNCDTFCAGSTFISDEVARDLSLQFKRPINPTDQSSYIVDSVTVKNGSIHLYFDKAGQKTYERHSLSHFVNLDNLRANNTKGSLPINVIVFDGKSKCEESSAKSASVYYSQLMCQPILLLDQALVSDVGDSAEVAVKMFDAYVNTFSSTFNVPMEKLKTLVATAEAELAKNVSLDNVLSTFISAARQGFVDSDVETKDVVECLKLSHQSDIEVTGDSCNNYMLTYNKVENMTPRDLGACIDCSARHINAQVAKSHNIALIWNVKDFMSLSEQLRKQIRSAAKKNNLPFKLTCATTRQVVNVVTTKIALKGG

SEQ ID NO: 15777 - protein, 1946 aa, Artificial Sequence
  SARS-CoV-2__MT893659.1__non-structural protein 3 (NSP3)
MAPTKVTFGDDTVIEVQGYKSVNITFELDERIDKVLNEKCSAYTVELGTEVNEFACVVADAVIKTLQPVSELLTPLGIDLDEWSMATYYLFDESGEFKLASHMYCSFYPPDEDEEEGDCEEEEFEPSTQYEYGTEDDYQGKPLEFGATSAALQPEEEQEEDWLDDDSQQTVGQQDSSEDNQTTTIQTIVEVQPQLEMELTPVVQTIEVNSFSGYLKLTDNVYIKNADIVEEAKKVKPTVVVNAANVYLKHGGGVAGALNKATNNAMQVESDDYIATNGPLKVGGSCVLSGHNLAKHCLHVVGPNVNKGEDIQLLKSAYENFNQHEVLLAPLLSAGIFGADPIHSLRVCVDTVRTNVYLAVFDKNLYDKLVSSFLEMKSEKQVEQKIAEIPKEEVKPFITESKPSVEQRKQDDKKIKACVEEVTTTLEETKFLTENLLLYIDINGNLHPDSATLVSDIDITFLKKDAPYIVGDVVQEGVLTAVVIPTKKAGGTTEMLAKALRKVPTDNYITTYPGQGLNGYTVEEAKTVLKKCKSAFYILPSIISNEKQEILGTVSWNLREMLAHAEETRKLMPVCVETKAIVSTIQRKYKGIKIQEGVVDYGARFYFYTSKTTVASLINTLNDLNETLVTMPLGYVTHGLNLEEAARYMRSLKVPATVSVSSPDAVTAYNGYLTSSSKTPEEHFIETISLAGSYKDWSYSGQSTQLGIEFLKRGDKSVYYTSNPTTFHLDGEVITFDNLKTLLSLREVRTIKVFTTVDNINLHTQVVDMSMTYGQQFGPTYLDGADVTKIKPHNSHEGKTFYVLPNDDTLRVEAFEYYHTTDPSFLGRYMSALNHTKKWKYPQVNGLTSIKWADNNCYLATALLTLQQIELKFNPPALQDAYYRARAGEAANFCALILAYCNKTVGELGDVRETMSYLFQHANLDSCKRVLNVVCKTCGQQQTTLKGVEAVMYMGTLSYEQFKKGVQIPCTCGKQATKYLVQQESPFVMMSAPPAQYELKHGTFTCASEYTGNYQCGHYKHITSKETLYCIDGALLTKSSEYKGPITDVFYKENSYTTTIKPVTYKLDGVVCTEIDPKLDNYYKKDNSYFTEQPIDLVPNQPYPNASFDNFKFVCDNIKFADDLNQLTGYKKPASRELKVTFFPDLNGDVVAIDYKHYTPSFKKGAKLLHKPIVWHVNNATNKATYKPNTWCIRCLWSTKPVETSNSFDVLKSEDAQGMDNLACEDLKPVSEEVVENPTIQKDVLECNVKTTEVVGDIILKPANNSLKITEEVGHTDLMAAYVDNSSLTIKKPNELSRVLGLKTLATHGLAAVNSVPWDTIANYAKPFLNKVVSTTTNIVTRCLNRVCTNYMPYFFTLLLQLCTFTRSTNSRIKASMPTTIAKNTVKSVGKFCLEASFNYLKSPNFSKLINIIIWFLLLSVCLGSLIYSTAALGVLMSNLGMPSYCTGYREGYLNSTNVTIATYCTGSIPCSVCLSGLDSLDTYPSLETIQITISSFKWDLTAFGLVAEWFLAYILFTRFFYVLGLAAIMQLFFSYFAVHFISNSWLMWLIINLVQMAPISAMVRMYIFFASFYYVWKSYVHVVDGCNSSTCMMCYKRNRATRVECTTIVNGVRRSFYVYANGGKGFCKLHNWNCVNCDTFCAGSTFISDEVARDLSLQFKRPINPTDQSSYIVDSVTVKNGSIHLYFDKAGQKTYERHSLSHFVNLDNLRANNTKGSLPINVIVFDGKSKCEESSAKSASVYYSQLMCQPILLLDQALVSDVGDSAEVAVKMFDAYVNTFSSTFNVPMEKLKTLVATAEAELAKNVSLDNVLSTFISAARQGFVDSDVETKDVVECLKLSHQSDIEVTGDSCNNYMLTYNKVENMTPRDLGACIDCSARHINAQVAKSHNIALIWNVKDFMSLSEQLRKQIRSAAKKNNLPFKLTCATTRQVVNVVTTKIALKGG

SEQ ID NO: 15778 - protein, 1946 aa, Artificial Sequence
  SARS-CoV-2__MT893667.1__non-structural protein 3 (NSP3)
MAPTKVTFGDDTVIEVQGYKSVNITFELDERIDKVLNEKCSAYTVELGTEVNEFACVVADAVIKTLQPVSELLTPLGIDLDEWSMATYYLFDESGEFKLASHMYCSFYPPDEDEEEGDCEEEEFEPSTQYEYGTEDDYQGKPLEFGATSAALQPEEEQEEDWLDDDSQQTVGQQDGSEDNQTTTIQTIVEVQPQLEMELTPVVQTIEVNSFSGYLKLTDNVYIKNADIVEEVKKVKPTVVVNAANVYLKHGGGVAGALNKATNNAMQVESDDYIATNGPLKVGGSCVLSGHNLAKHCLHVVGPNVNKGEDIQLLKSAYENFNQHEVLLAPLLSAGIFGADPIHSLRVCVDTVRTNVYLAVFDKNLYDKLVSSFLEMKSEKQVEQKIAEIPKEEVKPFITESKPSVEQRKQDDKKIKACVEEVTTTLEETKFLTENLLLYIDINGNLHPDSATLVSDIDITFLKKDAPYIVGDVVQEGVLTAVVIPTKKAGGTTEMLAKALRKVPTDNYITTYPGQGLNGYTVEEAKTVLKKCKSAFYILPSIISNEKQEILGTVSWNLREMLAHAEETRKLMPVCVETKAIVSTIQRKYKGIKIQEGVVDYGARFYFYTSKTTVASLINTLNDLNETLVTMPLGYVTHGLNLEEAARYMRSLKVPATVSVSSPDAVTAYNGYLTSSSKTPEEHFIETISLAGSYKDWSYSGQSTQLGIEFLKRGDKSVYYTSNPTTFHLDGEVITFDNLKTLLSLREVRTIKVFTTVDNINLHTQVVDMSMTYGQQFGPTYLDGADVTKIKPHNSHEGKTFYVLPNDDTLRVEAFEYYHTTDPSFLGRYMSALNHTKKWKYPQVNGLTSIKWADNNCYLATALLTLQQIELKFNPPALQDAYYRARAGEAANFCALILAYCNKTVGELGDVRETMSYLFQHANLDSCKRVLNVVCKTCGQQQTTLKGVEAVMYMGTLSYEQFKKGVQIPCTCGKQATKYLVQQESPFVMMSAPPAQYELKHGTFTCASEYTGNYQCGHYKHITSKETLYCIDGALLTKSSEYKGPITDVFYKENSYTTTIKPVTYKLDGVVCTEIDPKLDNYYKKDNSYFTEQPIDLVPNQPYPNASFDNFKFVCDNIKFADDLNQLTGYKKPASRELKVTFFPDLNGDVVAIDYKHYTPSFKKGAKLLHKPIVWHVNNATNKATYKPNTWCIRCLWSTKPVETSNSFDVLKSEDAQGMDNLACEDLKPVSEEVVENPTIQKDVLECNVKTTEVVGDIILKPANNSLKITEEVGHTDLMAAYVDNSSLTIKKPNELSRVLGLKTLATHGLAAVNSVPWDTIANYAKPFLNKVVSTTTNIVTRCLNRVCTNYMPYFFTLLLQLCTFTRSTNSRIKASMPTTIAKNTVKSVGKFCLEASFNYLKSPNFSKLINIIIWFLLLSVCLGSLIYSTAALGVLMSNLGMPSYCTGYREGYLNSTNVTIATYCTGSIPCSVCLSGLDSLDTYPSLETIQITISSFKWDLTAFGLVAEWFLAYILFTRFFYVLGLAAIMQLFFSYFAVHFISNSWLMWLIINLVQMAPISAMVRMYIFFASFYYVWKSYVHVVDGCNSSTCMMCYKRNRATRVECTTIVNGVRRSFYVYANGGKGFCKLHNWNCVNCDTFCAGSTFISDEVARDLSLQFKRPINPTDQSSYIVDSVTVKNGSIHLYFDKAGQKTYERHSLSHFVNLDNLRANNTKGSLPINVIVFDGKSKCEESSAKSASVYYSQLMCQPILLLDQALVSDVGDSAEVAVKMFDAYVNTFSSTFNVPMEKLKTLVATAEAELAKNVSLDNVLSTFISAARQGFVDSDVETKDVVECLKLSHQSDIEVTGDSCNNYMLTYNKVENMTPRDLGACIDCSARHINAQVAKSHNIALIWNVKDFMSLSEQLRKQIRSAAKKNNLPFKLTCATTRQVVNVVTTKIALKGG

SEQ ID NO: 15779 - protein, 1946 aa, Artificial Sequence
  SARS-CoV-2__MT893675.1__non-structural protein 3 (NSP3)
MAPTKVTFGDDTVIEVQGYKSVNITFELDERIDKVLNEKCSAYTVELGTEVNEFACVVADAVIKTLQPVSELLTPLGIDLDEWSMATYYLFDESGEFKLASHMYCSFYPPDEDEEEGDCEEEEFEPSTQYEYGTEDDYQGKPLEFGATSAALQPEEEQEEDWLDDDSQQTVGQQDGSEDNQTTTIQTIVEVQPQLEMELTPVVQTIEVNSFSGYLKLTDNVYIKNADIVEEAKKVKPTVVVNAANVYLKHGGGVAGALNKATNNAMQVESDDYIATNGPLKVGGSCVLSGHNLAKHCLHVVGPNVNKGEDIQLLKSAYENFNQHEVLLAPLLSAGIFGADPIHSLRVCVDTVRTNVYLAVFDKNLYDKLVLSFLEMKSEKQVEQKIAEIPKEEVKPFITESKPSVEQRKQDDKKIKACVEEVTTTLEETKFLTENLLLYIDINGNLHPDSATLVSDIDITFLKKDAPYIVGDVVQEGVLTAVVIPTKKAGGTTEMLAKALRKVPTDNYITTYPGQGLNGYTVEEAKTVLKKCKSAFYILPSIISNEKQEILGTVSWNLREMLAHAEETRKLMPVCVETKAIVSTIQRKYKGIKIQEGVVDYGARFYFYTSKTTVASLINTLNDLNETLVTMPLGYVTHGLNLEEAARYMRSLKVPATVSVSSPDAVTAYNGYLTSSSKTPEEHFIETISLAGSYKDWSYSGQSTQLGIEFLKRGDKSVYYTSNPTTFHLDGEVITFDNLKTLLSLREVRTIKVFTTVDNINLHTQVVDMSMTYGQQFGPTYLDGADVTKIKPHNSHEGKTFYVLPNDDTLRVEAFEYYHTTDPSFLGRYMSALNHTKKWKYPQVNGLTSIKWADNNCYLATALLTLQQIELKFNPPALQDAYYRARAGEAANFCALILAYCNKTVGELGDVRETMSYLFQHANLDSCKRVLNVVCKTCGQQQTTLKGVEAVMYMGTLSYEQFKKGVQIPCTCGKQATKYLVQQESPFVMMSAPPAQYELKHGTFTCASEYTGNYQCGHYKHITSKETLYCIDGALLTKSSEYKGPITDVFYKENSYTTTIKPVTYKLDGVVCTEIDPKLDNYYKKDNSYFTEQPIDLVPNQPYPNASFDNFKFVCDNIKFADDLNQLTGYKKPASRELKVTFFPDLNGDVVAIDYKHYTPSFKKGAKLLHKPIVWHVNNATNKATYKPNTWCIRCLWSTKPVETSNSFDVLKSEDAQGMDNLACEDLKPVSEEVVENPTIQKDVLECNVKTTEVVGDIILKPANNSLKITEEVGHTDLMAAYVDNSSLTIKKPNELSRVLGLKTLATHGLAAVNSVPWDTIANYAKPFLNKVVSTTTNIVTRCLNRVCTNYMPYFFTLLLQLCTFTRSTNSRIKASMPTTIAKNTVKSVGKFCLEASFNYLKSPNFSKLINIIIWFLLLSVCLGSLIYSTAALGVLMSNLGMPSYCTGYREGYLNSTNVTIATYCTGSIPCSVCLSGLDSLDTYPSLETIQITISSFKWDLTAFGLVAEWFLAYILFTRFFYVLGLAAIMQLFFSYFAVHFISNSWLMWLIINLVQMAPISAMVRMYIFFASFYYVWKSYVHVVDGCNSSTCMMCYKRNRATRVECTTIVNGVRRSFYVYANGGKGFCKLHNWNCVNCDTFCAGSTFISDEVARDLSLQFKRPINPTDQSSYIVDSVTVKNGSIHLYFDKAGQKTYERHSLSHFVNLDNLRANNTKGSLPINVIVFDGKSKCEESSAKSASVYYSQLMCQPILLLDQALVSDVGDSAEVAVKMFDAYVNTFSSTFNVPMEKLKTLVATAEAELANNVSLDNVLSTFISAARQGFVDSDVETKDVVECLKLSHQSDIEVTGDSCNNYMLTYNKVENMTPRDLGACIDCSARHINAQVAKSHNIALIWNVKDFMSLSEQLRKQIRSAAKKNNLPFKLTCATTRQVVNVVTTKIALKGG

SEQ ID NO: 15780 - protein, 1946 aa, Artificial Sequence
  SARS-CoV-2__MT893685.1__non-structural protein 3 (NSP3)
MAPTKVTFGDDTVIEVQGYKSVNITFELDERIDKVLNEKCSAYTVELGTEVNEFACVVADAVIKTLQPVSELLTPLGIDLDEWSMATYYLFDESGEFKLASHMYCSFYPPDEDEEEGDCEEEEFEPSTQYEYGTEDDYQGKPLEFGATSAALQPEEEQEEDWLDDDSQQTVGQQDGSEDNQTTTIQTIVEVQPQLEMELTPVVQTIEVNSFSGYLKLTDNVYIKNADIVEEAKKVKPTVVVNAANVYLKHGGGVAGALNKATNNAMQVESDDYIATNGPLKVGGSCVLSGHNLAKHCLHVVGPNVNKGEDIQLLKSAYENFNQHEVLLAPLLSAGIFGADPIHSLRVCVDTVRTNVYLAVFDKNLYDKLVSSFLEMKSEKQVEQKIAEIPKEEVKPFITESKPSVEQRKQDDKKIKACVEEVTTTLEETKFLTENLLLYIDINGNLHPDSATLVSDIDITFLKKDAPYIVGDVVQEGVLTAVVIPTKKAGGTTEMLAKALRKVPTDNYITTYPGQGLNGYTVEEAKTVLKKCKSAFYILPSIISNEKQEILGTVSWNLREMLAHAEETRKLMPVCVETKAIVSTIQRKYKGIKIQEGVVDYGARFYFYTSKTTVASLINTLNDLNETLVTMPLGYVTHGLNLEEAARYMRSLKVPATVSVSSPDAVTAYNGYLTSSSKTPEEHFIETISLAGSYKDWSYSGQSTQLGIEFLKRGDKSVYYTSNPTTFHLDGEVITFDNLKTLLSLREVRTIKVFTTVDNINLHTQVVDMSMTYGQQFGPTYLDGADVTKIKPHNSHEGKTFYVLPNDDTLRVEAFEYYHTTDPSFLGRYMSALNHTKKWKYPQVNGLTSIKWADNNCYLATALLTLQQIELKFNPPALQDAYYRARAGEAANFCALILAYCNKTVGELGDVRETMSYLFQHANLDSCKRVLNVVCKTCGQQQTTLKGVEAVMYMGTLSYEQFKKGVQIPCTCGKQATKYLVQQESPFVMMSAPPAQYELKHGTFTCASEYTGNYQCGHYKHITSKETLYCIDGALLTKSSEYKGPITDVFYKENSYTTTIKPVTYKLDGVVCTEIDPKLDNYYKKDNSYFTEQPIDLVPNQPYPNASFDNFKFVCDNIKFADDLNQLTGYKKPASRELKVTFFPDLNGDVVAIDYKHYTPSFKKGAKLLHKPIVWHVNNATNKATYKPNTWCIRCLWSTKPVETSNSFDVLKSEDAQGMDNLACEDLKPVSEEVVENPTIQKDVLECNVKTTEVVGDIILKPANNSLKITEEVGHTDLMAAYVDNSSLIIKKPNELSRVLGLKTLATHGLAAVNSVPWDTIANYAKPFLNKVVSTTTNIVTRCLNRVCTNYMPYFFTLLLQLCTFTRSTNSRIKASMPTTIAKNTVKSVGKFCLEASFNYLKSPNFSKLINIIIWFLLLSVCLGSLIYSTAALGVLMSNLGMPSYCTGYREGYLNSTNVTIATYCTGSIPCSVCLSGLDSLDTYPSLETIQITISSFKWDLTAFGLVAEWFLAYILFTRFFYVLGLAAIMQLFFSYFAVHFISNSWLMWLIINLVQMAPISAMVRMYIFFASFYYVWKSYVHVVDGCNSSTCMMCYKRNRATRVECTTIVNGVRRSFYVYANGGKGFCKLHNWNCVNCDTFCAGSTFISDEVARDLSLQFKRPINPTDQSSYIVDSVTVKNGSIHLYFDKAGQKTYERHSLSHFVNLDNLRANNTKGSLPINVIVFDGKSKCEESSAKSASVYYSQLMCQPILLLDQALVSDVGDSAEVAVKMFDAYVNTFSSTFNVPMEKLKTLVATAEAELAKNVSLDNVLSTFISAARQGFVDSDVETKDVVECLKLSHQSDIEVTGDSCNNYMLTYNKVENMTPRDLGACIDCSARHINAQVAKSHNIALIWNVKDFMSLSEQLRKQIRSAAKKNNLPFKLTCATTRQVVNVVTTKIALKGG

SEQ ID NO: 15781 - protein, 1946 aa, Artificial Sequence
  SARS-CoV-2__MT897460.1__non-structural protein 3 (NSP3)
MAPTKVTFGDDTVIEVQGYKSVNITFELDERIDKVLNEKCSAYTVELGTEVNEFACVVADAVIKTLQPVSELLTPLGIDLDEWSMATYYLFDESGEFKLASHMYCSFYPPDEDEEEGDCEEEEFEPSTQYEYGTEDDYQGKPLEFGATSAALQPEEEQEEDWLDDDSQQTVGQQDGSEDNQTTTIQTIVEVQPQLEMELTPVVQTIEVNSFSGYLKLTDNVYIKNADIVEEAKKVKPTVVVNAANVYLKHGGGVAGALNKATNNAMQVESDDYIATNGPLKVGGSCVLSGHNLAKHCLHVVGPNVNKGEDIQLLKSAYENFNQHEVLLAPLLSAGIFGADPIHSLRVCVDTVRTNVYLAVFDKNLYDKLVSSFLEMKSEKQVEQKIAEIPKEEVKPFITESKPSVEQRKQDDKKIKACVEEVTTTLEETKFLTENLLLYIDINGNLHPDSATLVSDIDITFLKKDAPYIVGDVVQEGVLTAVVIPTKKAGGTTEMLAKALRKVPTDNYITTYPGQGLNGYTVEEAKTVLKKCKSAFYILPSIISNEKQEILGTVSWNLREMLAHAEETRKLMPVCVETKAIVSTIQRKYKGIKIQEGVVDYGARFYFYTSKTTVASLINTLNDLNETLVTMPLGYVTHGLNLEEAARYMRSLKVPATVSVSSPDAVTAYNGYLTSSSKTPEEHFIETISLAGSYKDWSYSGQSTQLGIEFLKRGDKSVYYTSNPTTFHLDGEVITFDNLKTLLSLREVRTIKVFTTVDNINLHTQVVDMSMTYGQQFGPTYLDGADVTKIKPHNSHEGKTFYVLPNDDTLRVEAFEYYHTTDPSFLGRYMSALNHTKKWKYPQVNGLTSIKWADNNCYLATALLTLQQIELKFNPPALQDAYYRARAGEAANFCALILAYCNKTVGELGDVRETMSYLFQHANLDSCKRVLNVVCKTCGQQQTTLKGVEAVMYMGTLSYEQFKKGFQIPCTCGKQATKYLVQQESPFVMMSAPPAQYELKHGTFTCASEYTGNYQCGHYKHITSKETLYCIDGALLTKSSEYKGPITDVFYKENSYTTTIKPVTYKLDGVVCTEIDPKLDNYYKKDNSYFTEQPIDLVPNQPYPNASFDNFKFVCDNIKFADDLNQLTGYKKPASRELKVTFFPDLNGDVVAIDYKHYTPSFKKGAKLLHKPIVWHVNNATNKATYKPNTWCIRCLWSTKPVETSNSFDVLKSEDAQGMDNLACEDLKPVSEEVVENPTIQKDVLECNVKTTEVVGDIILKPANNSLKITEEVGHTDLMAAYVDNSSLTIKKPNELSRVLGLKTLATHGLAAVNSVPWDTIANYAKPFLNKVVSTTTNIVTRCLNRVCTNYMPYFFTLLLQLCTFTRSTNSRIKASMPTTIAKNTVKSVGKFCLEASFNYLKSPNFSKLINIIIWFLLLSVCLGSLIYSTAALGVLMSNLGMPSYCTGYREGYLNSTNVTIATYCTGSIPCSVCLSGLDSLDTYPSLETIQITISSFKWDLTAFGLVAEWFLAYILFTRFFYVLGLAAIMQLFFSYFAVHFISNSWLMWLIINLVQMAPISAMVRMYIFFASFYYVWKSYVHVVDGCNSSTCMMCYKRNRATRVECTTIVNGVRRSFYVYANGGKGFCKLHNWNCVNCDTFCAGSTFISDEVARDLSLQFKRPINPTDQSSYIVDSVTVKNGSIHLYFDKAGQKTYERHSLSHFVNLDNLRANNTKGSLPINVIVFDGKSKCEESSAKSASVYYSQLMCQPILLLDQALVSDVGDSAEVAVKMFDAYVNTFSSTFNVPMEKLKTLVATAEAELAKNVSLDNVLSTFISAARQGFVDSDVEIKDVVECLKLSHQSDIEVTGDSCNNYMLTYNKVENMTPRDLGACIDCSARHINAQVAKSHNIALIWNVKDFMSLSEQLRKQIRSAAKKNNLPFKLTCATTRQVVNVVTTKIALKGG

SEQ ID NO: 15782 - protein, 1946 aa, Artificial Sequence
  SARS-CoV-2__MT897461.1__non-structural protein 3 (NSP3)
MAPTKVTFGDDTVIEVQGYKSVNITFELDERIDKVLNEKCSAYTVELGTEVNEFACVVADAVIKTLQPVSELLTPLGIDLDEWSMATYYLFDESGEFKLASHMYCSFYPPDEDEEEGDCEEEEFEPSTQYEYGTEDDYQGKPLEFGATSAALQPEEEQEEDWLDDDSQQTVGQQDGSEDNQTTTIQTIVEVQPQLEMELTPVVQTIEVNSFSGYLKLTDNVYIKNADIVEEAKKVKPTVVVNAANVYLKHGGGVAGALNKATNNAMQVESDDYIATNGPLKVGGSCVLSGHNLAKHCLHVVGPNVNKGEDIQLLKSAYENFNQHEVLLAPLLSAGIFGADPIHSLRVCVDTVCTNVYLAVFDKNLYDKLVSSFLEMKSEKQVEQKIAEIPKEEVKPFITESKPSVEQRKQDDKKIKACVEEVTTTLEETKFLTENLLLYIDINGNLHPDSATLVSDIDITFLKKDAPYIVGDVVQEGVLTAVVIPTKKAGGTTEMLAKALRKVPTDNYITTYPGQGLNGYTVEEAKTVLKKCKSAFYILPSIISNEKQEILGTVSWNLREMLAHAEETRKLMPVCVETKAIVSTIQRKYKGIKIQEGVVDYGARFYFYTSKTTVASLINTLNDLNETLVTMPLGYVTHGLNLEEAARYMRSLKVPATVSVSSPDAVTAYNGYLTSSSKTPEEHFIETISLAGSYKDWSYSGQSTQLGIEFLKRGDKSVYYTSNPTTFHLDGEVITFDNLKTLLSLREVRTIKVFTTVDNINLHTQVVDMSMTYGQQFGPTYLDGADVTKIKPHNSHEGKTFYVLPNDDTLRVEAFEYYHTTDPSFLGRYMSALNHTKKWKYPQVNGLTSIKWADNNCYLATALLTLQQIELKFNPPALQDAYYRARAGEAANFCALILAYCNKTVGELGDVRETMSYLFQHANLDSCKRVLNVVCKTCGQQQTTLKGVEAVMYMGTLSYEQFKKGVQIPCTCGKQATKYLVQQESPFVMMSAPPAQYELKHGTFTCASEYTGNYQCGHYKHITSKETLYCIDGALLTKSSEYKGPITDVFYKENSYTTTIKPVTYKLDGVVCTEIDPKLDNYYKKDNSYFTEQPIDLVPNQPYPNASFDNFKFVCDNIKFADDLNQLTGYKKPASRELKVTFFPDLNGDVVAIDYKHYTPSFKKGAKLLHKPIVWHVNNATNKATYKPNTWCIRCLWSTKPVETSNSFDVLKSEDAQGMDNLACEDLKPVSEEVVENPTIQKDVLECNVKTTEVVGDIILKPANNSLKITEEVGHTDLMAAYVDNSSLTIKKPNELSRVLGLKTLATHGLAAVNSVPWDTIANYAKPFLNKVVSTTTNIVTRCLNRVCTNYMPYFFTLLLQLCTFTRSTNSRIKASMPTTIAKNTVKSVGKFCLEASFNYLKSPNFSKLINIIIWFLLLSVCLGSLIYSTAALGVLMSNLGMPSYCTGYREGYLNSINVTIATYCTGSIPCSVCLSGLDSLDTYPSLETIQITISSFKWDLTAFGLVAEWFLAYILFTRFFYVLGLAAIMQLFFSYFAVHFISNSWLMWLIINLVQMAPISAMVRMYIFFASFYYVWKSYVHVVDGCNSSTCMMCYKRNRATRVECTTIVNGVRRSFYVYANGGKGFCKLHNWNCVNCDTFCAGSTFISDEVARDLSLQFKRPINPTDQSSYIVDSVTVKNGSIHLYFDKAGQKTYERHSLSHFVNLDNLRANNTKGSLPINVIVFDGKSKCEESSAKSASVYYSQLMCQPILLLDQALVSDVGDSAEVAVKMFDAYVNTFSSTFNVPMEKLKTLVATAEAELAKNVSLDNVLSTFISAARQGFVDSDVETKDVVECLKLSHQSDIEVTGDSCNNYMLTYNKVENMTPRDLGACIDCSARHINAQVAKSHNIALIWNVKDFMSLSEQLRKQIRSAAKKNNLPFKLTCATTRQVVNVVTTKIALKGG

SEQ ID NO: 15783 - protein, 1946 aa, Artificial Sequence
  SARS-CoV-2__MT890230.1__non-structural protein 3 (NSP3)
MAPTKVTFGDDTVIEVQGYKSVNITFELDERIDKVLNEKCSAYTVELGTEVNEFACVVADAVIKTLQPVSELLTPLGIDLDEWSMATYYLFDESGEFKLASHMYCSFYPPDEDEEEGDCEEEEFEPSTQYEYGTEDDYQGKPLEFGATSAALQPEEEQEEDWLDDDSQQTVGQQDGSEDNQTTTIQTIVEVQPQLEMELTPVVQTIEVNSFSGYLKLTDNVYIKNADIVEEAKKVKPTVVVNAANVYLKHGGGVAGALNKATNNAMQVESDDYIATNGPLKVGGSCVLSGHNLAKHCLHVVGPNVNKGEDIQLLKSAYENFNQHEVLLAPLLSAGIFGADPIHSLRVCVDTVRTNVYLAVFDKNLYDKLVSSFLEMKSEKQVEQKIAEIPKEEVKPFITESKPSVEQRKQDDKKIKACVEEVTTTLEETKFLTENLLLYIDINGNLHPDSATLVSDIDITFLKKDAPYIVGDVVQEGVLTAVVIPTKKAGGTTEMLAKALRKVPTDNYITTYPGQGLNGYTVEEAKTVLKKCKSAFYILPSIISNEKQEILGTVSWNLREMLAHAEETRKLMPVCVETKAIVSTIQRKYKGIKIQEGVVDYGARFYFYTSKTTVASLINTLNDLNETLVTMPLGYVTHGLNLEEAARYMRSLKVPATVSVSSPDAVTAYNGYLTSSSKTPEEHFIETISLAGSYKDWSYSGQSTQLGIEFLKRGDKSVYYTSNPTTFHLDGEVITFDNLKTLLSLREVRTIKVFTTVDNINLHTQVVDMSMTYGQQFGPTYLDGADVTKIKPHNSHEGKTFYVLPNDDTLRVEAFEYYHTTDPSFLGRYMSALNHTKKWKYPQVNGLTSIKWADNNCYLATALLTLQQIELKFNPPALQDAYYRARAGEAANFCALILAYCNKTVGELGDVRETMSYLFQHANLDSCKRVLNVVCKTCGQQQTTLKGVEAVMYMGTLSYEQFKKGVQIPCTCGKQATKYLVQQESSFVMMSAPPAQYELKHGTFTCASEYTGNYQCGHYKHITSKETLYCIDGALLTKSSEYKGPITDVFYKENSYTTTIKPVTYKLDGVVCTEIDPKLDNYYKKDNSYFTEQPIDLVPNQPYPNASFDNFKFVCDNIKFADDLNQLTGYKKPASRELKVTFFPDLNGDVVAIDYKHYTPSFKKGAKLLHKPIVWHVNNATNKATYKPNTWCIRCLWSTKPVETSNSFDVLKSEDAQGMDNLACEDLKPVSEEVVENPTIQKDVLECNVKTTEVVGDIILKPANNSLKITEEVGHTDLMAAYVDNSSLTIKKPNELSRVLGLKTLATHGLAAVNSVPWDTIANYAKPFLNKVVSTTTNIVTRCLNRVCTNYMPYFFTLLLQLCTFTRSTNSRIKASMPTTIAKNTVKSVGKFCLEASFNYLKSPNFSKLINIIIWFLLLSVCLGSLIYSTAALGVLMSNLGMPSYCTGYREGYLNSTNVTIATYCTGSIPCSVCLSGLDSLDTYPSLETIQITISSFKWDLTAFGLVAEWFLAYILFTRFFYVLGLAAIMQLFFSYFAVHFISNSWLMWLIINLVQMAPISAMVRMYIFFASFYYVWKSYVHVVDGCNSSTCMMCYKRNRATRVECTTIVNGVRRSFYVYANGGKGFCKLHNWNCVNCDTFCAGSTFISDEVARDLSLQFKRPINPTDQSSYIVDSVTVKNGSIHLYFDKAGQKTYERHSLSHFVNLDNLRANNTKGSLPINVIVFDGKSKCEESSAKSASVYYSQLMCQPILLLDQALVSDVGDSAEVAVKMFDAYVNTFSSTFNVPMEKLKTLVATAEAELAKNVSLDNVLSTFISAARQGFVDSDVETKDVVECLKLSHQSDIEVTGDSCNNYMLTYNKVENMTPRDLGACIDCSARHINAQVAKSHNIALIWNVKDFMSLSEQLRKQIRSAAKKNNLPFKLTCATTRQVVNVVTTKIALKGG

SEQ ID NO: 15784 - protein, 1946 aa, Artificial Sequence
  SARS-CoV-2__MT890285.1__non-structural protein 3 (NSP3)
MAPTKVTFGDDTVIEVQGYKSVNITFELDERIDKVLNEKCSAYTVELGTEVNEFACVVADAVIKTLQPVSELLTPLGIDLDEWSMATYYLFDESGEFKLASHMYCSFYPPDEDEEEGDCEEEEFEPSTQYEYGTEDDYQGKPLEFGATSAALQPEEEQEEDWLDDDSQQTVGQQDGSEDNQTTTIQTIVEVQPQLEMELTPVVQTIEVNSFSGYLKLTDNVYIKNADIVEEAKKVKPTVVVNAANVYLKHGGGVAGALNKATNNAMQVESDDYIATNGPLKVGGSCVLSGHNLAKHCLHVVGPNVNKGEDIQLLKSAYENFNQHEVLLAPLLSAGIFGADPIHSLRVCVDTVRTNVYLAVFDKNLYDKLVSSFLEMKSEKQVEQKIAEIPKEEVKPFITESKPSVEQRKQDDKKIKACVEEVTTTLEETKFLTENLLLYIDINGNLHPDSATLVSDIDITFLKKDAPYIVGDVVQEGVLTAVVIPTKKAGGTTEMLAKALRKVPTDNYITTYPGQGLNGYTVEEAKTVLKKCKSAFYILPSIISNEKQEILGTVSWNLREMLAHAEETRKLMPVCVETKAIVSTIQRKYKGIKIQEGVVDYGARFYFYTSKTTVASLINTLNDLNETLVTMPLGYVTHGLNLEEAARYMRSLKVPATVSVSSPDAVTAYNGYLTSSSKTPEEHFIETISLAGSYKDWSYSGQSTQLGIEFLKRGDKSVYYTSNPTTFHLDGEVITFDNLKTLLSLREVRTIKVFTTVDNINLHTQVVDMSMTYGQQFGPTYLDGADVTKIKPHNSHEGKTFYVLPNDDTLRVEAFEYYHTTDPSFLGRYMSALNHTKKWKYPQVNGLTSIKWADNNCYLATALLTLQQIELKFNPPALQDAYYRARAGEAANFCALILAYCNKTVGELGDVRETMSYLFQHANLDSCKRVLNVVCKTCGQQQTTLKGVEAVMYMGTLSYEQFKKGVQIPCTCGKQATKYLVQQESPFVMMSAPPAQYELKHGTFTCASEYTGNYQCGHYKHITSKETLYCIDGALLTKSSEYKGPITDVFYKENSYTTTIKPVTYKLDGVVCTEIDPKLDNYYKKDNSYFTEQPIDLVPNQPYPNASFDNFKFVCDNIKFADDLNQLTGYKKPASRELKVTFFPDLNGDVVAIDYKHYTPSFKKGAKLLHKPIVWHVNNATNKATYKPNTWCIRCLWSTKPVETSNSFDVLKSEDAQGMDNLACEDLKPVSEEVVENPTIQKDVLECNVKTTEVVGDIILKPANNSLKITEEVGHTDLMAAYVDNSSLTIKKPNELSRVLGLKTLATHGLAAVTSVPWDTIANYAKPFLNKVVSTTTNIVTRCLNRVCTNYMPYFFTLLLQLCTFTRSTNSRIKASMPTTIAKNTVKSVGKFCLEASFNYLKSPNFSKLINIIIWFLLLSVCLGSLIYSTAALGVLMSNLGMPSYCTGYREGYLNSTNVTIATYCTGSIPCSVCLSGLDSLDTYPSLETIQITISSFKWDLTAFGLVAEWFLAYILFTRFFYVLGLAAIMQLFFSYFAVHFISNSWLMWLIINLVQMAPISAMVRMYIFFASFYYVWKSYVHVVDGCNSSTCMMCYKRNRATRVECTTIVNGVRRSFYVYANGGKGFCKLHNWNCVNCDTFCAGSTFISDEVARDLSLQFKRPINPTDQSSYIVDSVTVKNGSIHLYFDKAGQKTYERHSLSHFVNLDNLRANNTKGSLPINVIVFDGKSKCEESSAKSASVYYSQLMCQPILLLDQALVSDVGDSAEVAVKMFDAYVNTFSSTFNVPMEKLKTLVATAEAELAKNVSLDNVLSTFISAARQGFVDSDVETKDVVECLKLSHQSDIEVTGDSCNNYMLTYNKVENMTPRDLGACIDCSARHINAQVAKSHNIALIWNVKDFMSLSEQLRKQIRSAAKKNNLPFKLTCATTRQVVNVVTTKIALKGG

SEQ ID NO: 15785 - protein, 1946 aa, Artificial Sequence
  SARS-CoV-2__MT890295.1__non-structural protein 3 (NSP3)
MAPTKVTFGDDTVIEVQGYKSVNITFELDERIDKVLNEKCSAYTVELGTEVNEFACVVADAVIKTLQPVSELLTPLGIDLDEWSMATYYLFDESGEFKLASHMYCSFYPPDEDEEEGDCEEEEFEPSTQYEYGTEDDYQGKPLEFGATSAALQPEEEQEEDWLDDDSQQTVGQQDGSEDNHTTTIQTIVEVQPQLEMELTPVVQTIEVNSFSGYLKLTDNVYIKNADIVEEAKKVKPTVVVNAANVYLKHGGGVAGALNKATNNAMQVESDDYIATNGPLKVGGSCVLSGHNLAKHCLHVVGPNVNKGEDIQLLKSAYENFNQHEVLLAPLLSAGIFGADPIHSLRVCVDTVRTNVYLAVFDKNLYDKLVSSFLEMKSEKQVEQKIAEIPKEEVKPFITESKPSVEQRKQDDKKIKACVEEVTTTLEETKFLTENLLLYIDINGNLHPDSATLVSDIDITFLKKDAPYIVGDVVQEGVLTAVVIPTKKAGGTTEMLAKALRKVPTDNYITTYPGQGLNGYTVEEAKTVLKKCKSAFYILPSIISNEKQEILGTVSWNLREMLAHAEETRKLMPVCVETKAIVSTIQRKYKGIKIQEGVVDYGARFYFYTSKTTVASLINTLNDLNETLVTMPLGYVTHGLNLEEAARYMRSLKVPATVSVSSPDAVTAYNGYLTSSSKTPEEHFIETISLAGSYKDWSYSGQSTQLGIEFLKRGDKSVYYTSNPTTFHLDGEVITFDNLKTLLSLREVRTIKVFTTVDNINLHTQVVDMSMTYGQQFGPTYLDGADVTKIKPHNSHEGKTFYVLPNDDTLRVEAFEYYHTTDPSFLGRYMSALNHTKKWKYPQVNGLTSIKWADNNCYLATALLTLQQIELKFNPPALQDAYYRARAGEAANFCALILAYCNKTVGELGDVRETMSYLFQHANLDSCKRVLNVVCKTCGQQQTTLKGVEAVMYMGTLSYEQFKKGVQIPCTCGKQATKYLVQQESPFVMMSAPPAQYELKHGTFTCASEYTGNYQCGHYKHITSKETLYCIDGALLTKSSEYKGPITDVFYKENSYTTTIKPVTYKLDGVVCTEIDPKLDNYYKKDNSYFTEQPIDLVPNQPYPNASFDNFKFVCDNIKFADDLNQLTGYKKPASRELKVTFFPDLNGDVVAIDYKHYTPSFKKGAKLLHKPIVWHVNNATNKATYKPNTWCIRCLWSTKPVETSNSFDVLKSEDAQGMDNLACEDLKPVSEEVVENPTIQKDVLECNVKTTEVVGDIILKPANNSLKITEEVGHTDLMAAYVDNSSLTIKKPNELSRVLGLKTLATHGLAAVNSVPWDTIANYAKPFLNKVVSTTTNIVTRCLNRVCTNYMPYFFTLLLQLCTFTRSTNSRIKASMPTTIAKNTVKSVGKFCLEASFNYLKSPNFSKLINIIIWFLLLSVCLGSLIYSTAALGVLMSNLGMPSYCTGYREGYLNSTNVTIATYCTGSIPCSVCLSGLDSLDTYPSLETIQITISSFKWDLTAFGLVAEWFLAYILFTRFFYVLGLAAIMQLFFSYFAVHFISNSWLMWLIINLVQMAPISAMVRMYIFFASFYYVWKSYVHVVDGCNSSTCMMCYKRNRATRVECTTIVNGVRRSFYVYANGGKGFCKLHNWNCVNCDTFCAGSTFISDEVARDLSLQFKRPINPTDQSSYIVDSVTVKNGSIHLYFDKAGQKTYERHSLSHFVNLDNLRANNTKGSLPINVIVFDGKSKCEESSAKSASVYYSQLMCQPILLLDQALVSDVGDSAEVAVKMFDAYVNTFSSTFNVPMEKLKTLVATAEAELAKNVSLDNVLSTFISAARQGFVDSDVETKDVVECLKLSHQSDIEVTGDSCNNYMLTYNKVENMTPRDLGACIDCSARHINAQVAKSHNIALIWNVKDFMSLSEQLRKQIRSAAKKNNLPFKLTCATTRQVVNVVTTKIALKGG

SEQ ID NO: 15786 - protein, 1946 aa, Artificial Sequence
  SARS-CoV-2__MT890338.1__non-structural protein 3 (NSP3)
MAPTKVTFGDDTVIEVQGYKSVNITFELDERIDKVLNEKCSAYTVELGTEVNEFACVVADAVIKTLQPVSELLTPLGIDLDEWSMATYYLFDESGEFKLASHMYCSFYPPDEDEEEGDCEEEEFEPSTQYEYGTEDDYQGKPLEFGATSAALQPEEEQEEDWLDDDSQQTVGQQDGSEDNQTTTIQTIVEVQPQLEMELTPVVQTIEVNSFSGYLKLTDNVYIKNADIVEEAKKVKPTVVVNAANVYLKHGGGVAGALNKATNNAMQVESDDYIATNGPLKVGGSCVLSGHNLAKHCLHVVGPNVNKGEDIQLLKSAYENFNQHEVLLAPLLSAGIFGADPIHSLRVCVDTVRTNVYLAVFDKNLYDKLVSSFLEMKSEKQVEQKIAEIPKEEVKPFITESKPSVEQRKQDDKKIKACVEEVTTTLEETKFLTENLLLYIDINGNLHPDSATLVSDIDITFLKKDAPYIVGDVVQEGVLTAVVIPTKKAGGTTEMLAKALRKVPTDNYITTYPGQGLNGYTVEEAKTVLKKCKSAFYILPSIISNEKQEILGTVSWNLREMLAHAEETRKLMPVCVETKAIVSTIQRKYKGIKIQEGVVDYGARFYFYTSKTTVASLINTLNDLNETLVTMPLGYVTHGLNLEEAARYMRSLKVPATVSVSSPDAVTAYNGYLTSSSKTPEEHFIETISLAGSYKDWSYSGQSTQLGIEFLKRGDKSVYYTSNPTTFHLDGEVITFDNLKTLLSLREVRTIKVFTTVDNINLHTQVVDMSMTYGQQFGPTYLDGADVTKIKPHNSHEGKTFYVLPNDDTLRVEAFEYYHTTDPSFLGRYMSALNHTKKWKYPQVNGLTSIKWADNNCYLATALLTLQQIELKFNPPALQDAYYRARAGEAANFCALILAYCNKTVGELGDVRETMSYLFQHANLDSCKRVLNVVCKTCGQQQTTLKGVEAVMYMGTLSYEQFKKGVQIPCTCGKQATKYLVQQESPFVMMSAPPAQYELKHGTFTCASEYTGNYQCGHYKHITSKETLYCIDGALLTKSSEYKGPITDVFYKENSYTTTIKPVTYKLDGVVCTEIDPKLDNYYKKDNSYFTEQPIDLVPNQPYPNAGFDNFKFVCDNIKFADDLNQLTGYKKPASRELKVTFFPDLNGDVVAIDYKHYTPSFKKGAKLLHKPIVWHVNNATNKATYKPNTWCIRCLWSTKPVETSNSFDVLKSEDAQGMDNLACEDLKPVSEEVVENPTTQKDVLECNVKTTEVVGDIILKPANNSLKITEEVGHTDLMAAYVDNSSLTIKKPNELSRVLGLKTLATHGLAAVNSVPWDTIANYAKPFLNKVVSTTTNIVTRCLNRVCTNYMPYFFTLLLQLCTFTRSTNSRIKASMPTTIAKNTVKSVGKFCLEASFNYLKSPNFSKLINIIIWFLLLSVCLGSLIYSTAALGVLMSNLGMPSYCTGYREGYLNSTNVTIATYCTGSIPCSVCLSGLDSLDTYPSLETIQITISSFKWDLTAFGLVAEWFLAYILFTRFFYVLGLAAIMQLFFSYFAVHFISNSWLMWLIINLVQMAPISAMVRMYIFFASFYYVWKSYVHVVDGCNSSTCMMCYKRNRATRVECTTIVNGVRRSFYVYANGGKGFCKLHNWNCVNCDTFCAGSTFISDEVARDLSLQFKRPINPTDQSSYIVDSVTVKNGSIHLYFDKAGQKTYERHSLSHFVNLDNLRANNTKGSLPINVIVFDGKSKCEESSAKSASVYYSQLMCQPILLLDQALVSDVGDSAEVAVKMFDAYVNTFSSTFNVPMEKLKTLVATAEAELAKNVSLDNVLSTFISAARQGFVDSDVETKDVVECLKLSHQSDIEVTGDSCNNYMLTYNKVENMTPRDLGACIDCSARHINAQVAKSHNIALIWNVKDFMSLSEQLRKQIRSAAKKNNLPFKLTCATTRQVVNVVTTKIALKGG

SEQ ID NO: 15787 - protein, 1946 aa, Artificial Sequence
  SARS-CoV-2__MT890340.1__non-structural protein 3 (NSP3)
MAPTKVTFGDDTVIEVQGYKSVNITFELDERIDKVLNEKCSAYTVELGTEVNEFACVVADAVIKTLQPVSELLTPLGIDLDEWSMATYYLFDESGEFKLASHMYCSFYPPDEDEEEGDCEEEEFEPSTQYEYGTEDDYQGKPLEFGATSAALQPEEEQEEDWLDDDSQQTVGQQDGSEDNQTTTIQTIVEVQPQLEMELTPVVQTIEVNSFSGYLKLTDNVYIKNADIVEEAKKVKPTVVVNAANVYLKHGGGVAGALNKATNNAMQVESDDYIATNGPLKVGGSCVLSGHNLAKHCLHVVGPNVNKGEDIQLLKSAYENFNQHEFLLAPLLSAGIFGADPIHSLRVCVDTVRTNVYLAVFDKNLYDKLVSSFLEMKSEKQVEQKIAEIPKEEVKPFITESKPSVEQRKQDDKKIKACVEEVTTTLEETKFLTENLLLYIDINGNLHPDSATLVSDIDITFLKKDAPYIVGDVVQEGVLTAVVIPTKKAGGTTEMLAKALRKVPTDNYITTYPGQGLNGYTVEEAKTVLKKCKSAFYILPSIISNEKQEILGTVSWNLREMLAHAEETRKLMPVCVETKAIVSTIQRKYKGIKIQEGVVDYGARFYFYTSKTTVASLINTLNDLNETLVTMPLGYVTHGLNLEEAARYMRSLKVPATVSVSSPDAVTAYNGYLTSSSKTPEEHFIETISLAGSYKDWSYSGQSTQLGIEFLKRGDKSVYYTSNPTTFHLDGEVITFDNLKTLLSLREVRTIKVFTTVDNINLHTQVVDMSMTYGQQFGPTYLDGADVTKIKPHNSHEGKTFYVLPNDDTLRVEAFEYYHTTDPSFLGRYMSALNHTKKWKYPQVNGLTSIKWADNNCYLATALLTLQQIELKFNPPALQDAYYRARAGEAANFCALILAYCNKTVGELGDVRETMSYLFQHANLDSCKRVLNVVCKTCGQQQTTLKGVEAVMYMGTLSYEQFKKGVQIPCTCGKQATKYLVQQESPFVMMSAPPAQYELKHGTFTCASEYTGNYQCGHYKHITSKETLYCIDGALLTKSSEYKGPITDVFYKENSYTTTIKPVTYKLDGVVCTEIDPKLDNYYKKDNSYFTEQPIDLVPNQPYPNASFDNFKFVCDNIKFADDLNQLTGYKKPASRELKVTFFPDLNGDVVAIDYKHYTPSFKKGAKLLHKPIVWHVNNATNKATYKPNTWCIRCLWSTKPVETSNSFDVLKSEDAQGMDNLACEDLKPVSEEVVENPTIQKDVLECNVKTTEVVGDIILKPANNSLKITEEVGHTDLMAAYVDNSSLTIKKPNELSRVLGLKTLATHGLAAVNSVPWDTIANYAKPFLNKVVSTTTNIVTRCLNRVCTNYMPYFFTLLLQLCTFTRSTNSRIKASMPTTIAKNTVKSVGKFCLEASFNYLKSPNFSKLINIIIWFLLLSVCLGSLIYSTAALGVLMSNLGMPSYCTGYREGYLNSTNVTIATYCTGSIPCSVCLSGLDSLDTYPSLETIQITISSFKWDLTAFGLVAEWFLAYILFTRFFYVLGLAAIMQLFFSYFAVHFISNSWLMWLIINLVQMAPISAMVRMYIFFASFYYVWKSYVHVVDGCNSSTCMMCYKRNRATRVECTTIVNGVRRSFYVYANGGKGFCKLHNWNCVNCDTFCAGSTFISDEVARDLSLQFKRPINPTDQSSYIVDSVTVKNGSIHLYFDKAGQKTYERHSLSHFVNLDNLRANNTKGSLPINVIVFDGKSKCEESSAKSASVYYSQLMCQPILLLDQALVSDVGDSAEVAVKMFDAYVNTFSSTFNVPMEKLKTLVATAEAELAKNVSLDNVLSTFISAARQGFVDSDVETKDVVECLKLSHQSDIEVTGDSCNNYMLTYNKVENMTPRDLGACIDCSARHINAQVAKSHNIALIWNVKDFMSLSEQLRKQIRSAAKKNNLPFKLTCATTRQVVNVVTTKIALKGG

SEQ ID NO: 15788 - protein, 1946 aa, Artificial Sequence
  SARS-CoV-2__MT890346.1__non-structural protein 3 (NSP3)
MAPTKVTFGDDTVIEVQGYKSVNITFELDERIDKVLNEKCSAYTVELGTEVNEFACVVADAVIKTLQPVSELLTPLGIDLDEWSMATYYLFDESGEFKLASHMYCSFYPPDEDEEEGDCEEEEFEPSTQYEYGTEDDYQGKPLEFGATSAALQPEEEQEEDWLDDDSQQTVGQQDGSEDNQTTTIQTIVEVQPQLEMELTPVVQTIEVNSFSGYLKLTDNVYIKNADIVEEAKKVKPTVVVNAANVYLKHGGGVAGALNKATNNAMQVESDDYIATNGPLKVGGSCVLSGHNLAKHCLHVVGPNVNKGEDIQLLKSAYENFNQHEVLLAPLLSVGIFGADPIHSLRVCVDTVRTNVYLAVFDKNLYDKLVSSFLEMKSEKQVEQKIAEIPKEEVKPFITESKPSVEQRKQDDKKIKACVEEVTTTLEETKFLTENLLLYIDINGNLHPDSATLVSDIDITFLKKDAPYIVGDVVQEGVLTAVVIPTKKAGGTTEMLAKALRKVPTDNYITTYPGQGLNGYTVEEAKTVLKKCKSAFYILPSIISNEKQEILGTVSWNLREMLAHAEETRKLMPVCVETKAIVSTIQRKYKGIKIQEGVVDYGARFYFYTSKTTVASLINTLNDLNETLVTMPLGYVTHGLNLEEAARYMRSLKVPATVSVSSPDAVTAYNGYLTSSSKTPEEHFIETISLAGSYKDWSYSGQSTQLGIEFLKRGDKSVYYTSNPTTFHLDGEVITFDNLKTLLSLREVRTIKVFTTVDNINLHTQVVDMSMTYGQQFGPTYLDGADVTKIKPHNSHEGKTFYVLPNDDTLRVEAFEYYHTTDPSFLGRYMSALNHTKKWKYPQVNGLTSIKWADNNCYLATALLTLQQIELKFNPPALQDAYYRARAGEAANFCALILAYCNKTVGELGDVRETMSYLFQHANLDSCKRVLNVVCKTCGQQQTTLKGVEAVMYMGTLSYEQFKKGVQIPCTCGKQATKYLVQQESPFVMMSAPPAQYELKHGTFTCASEYTGNYQCGHYKHITSKETLYCIDGALLTKSSEYKGPITDVFYKENSYTTTIKPVTYKLDGVVCTEIDPKLDNYYKKDNSYFTEQPIDLVPNQPYPNASFDNFKFVCDNIKFADDLNQLTGYKKPASRELKVTFFPDLNGDVVAIDYKHYTPSFKKGAKLLHKPIVWHVNNATNKATYKPNTWCIRCLWSTKPVETSNSFDVLKSEDAQGMDNLACEDLKPVSEEVVENPTIQKDVLECNVKTTEVVGDIILKPANNSLKITEEVGHTDLMAAYVDNSSLTIKKPNELSRVLGLKTLATHGLAAVNSVPWDTIANYAKPFLNKVVSTTTNIVTRCLNRVCTNYMPYFFTLLLQLCTFTRSTNSRIKASMPTTIAKNTVKSVGKFCLEASFNYLKSPNFSKLINIIIWFLLLSVCLGSLIYSTAALGVLMSNLGMPSYCTGYREGYLNSTNVTIATYCTGSIPCSVCLSGLDSLDTYPSLETIQITISSFKWDLTAFGLVAEWFLAYILFTRFFYVLGLAAIMQLFFSYFAVHFISNSWLMWLIINLVQMAPISAMVRMYIFFASFYYVWKSYVHVVDGCNSSTCMMCYKRNRATRVECTTIVNGVRRSFYVYANGGKGFCKLHNWNCVNCDTFCAGSTFISDEVARDLSLQFKRPINPTDQSSYIVDSVTVKNGSIHLYFDKAGQKTYERHSLSHFVNLDNLRANNTKGSLPINVIVFDGKSKCEESSAKSASVYYSQLMCQPILLLDQALVSDVGDSAEVAVKMFDAYVNTFSSTFNVPMEKLKTLVATAEAELAKNVSLDNVLSTFISAARQGFVDSDVETKDVVECLKLSHQSDIEVTGDSCNNYMLTYNKVENMTPRDLGACIDCSARHINAQVAKSHNIALIWNVKDFMSLSEQLRKQIRSAAKKNNLPFKLTCATTRQVVNVVTTKIALKGG

SEQ ID NO: 15789 - protein, 1946 aa, Artificial Sequence
  SARS-CoV-2__MT890353.1__non-structural protein 3 (NSP3)
MAPTKVTFGDDTVIEVQGYKSVNITFELDERIDKVLNEKCSAYTVELGTEVNEFACVVADAVIKTLQPVSELLTPLGIDLDEWSMATYYLFDESGEFKLASHMYCSFYPPDEDEEEGDCEEEEFEPSTQYEYGTEDDYQGKPLEFGATSAALQPEEEQEEDWLDDDSQQTVGQQDGSEDNQTTTIQTIVEVQPQLEMELTPVVQTIEVNSFSGYLKLTDNVYIKNADIVEEVKKVKPTVVVNAANVYLKHGGGVAGALNKATNNAMQVESDDYIATNGPLKVGGSCVLSGHNLAKHCLHVVGPNVNKGEDIQLLKSAYENFNQHEVLLAPLLSAGIFGADPIHSLRVCVDTVRTNVYLAVFDKNLYDKLVSSFLEMKSEKQVEQKIAEIPKEEVKPFITESKPSVEQRKQDDKKIKACVEEVTTTLEETKFLTENLLLYIDINGNLHPDSATLVSDIDITFLKKDAPYIVGDVVQEGVLTAVVIPTKKAGGTTEMLAKALRKVPTDNYITTYPGQGLNGYTVEEAKTVLKKCKSAFYILPSIISNEKQEILGTVSWNLREMLAHAEETRKLMPVCVETKAIVSTIQRKYKGIKIQEGVVDYGARFYFYTSKTTVASLINTLNDLNETLVTMPLGYVTHGLNLEEAARYMRSLKVPATVSVSSPDAVTAYNGYLTSSSKTPEEHFIETISLAGSYKDWSYSGQSTQLGIEFLKRGDKSVYYTSNPTTFHLDGEVITFDNLKTLLSLREVRTIKVFTTVDNINLHTQVVDMSMTYGQQFGPTYLDGADVTKIKPHNSHEGKTFYVLPNDDTLRVEAFEYYHTTDPSFLGRYMSALNHTKKWKYPQVNGLTSIKWADNNCYLATALLTLQQIELKFNPPALQDAYYRARAGEAANFCALILAYCNKTVGELGDVRETMSYLFQHANLDSCKRVLNVVCKTCGQQQTTLKGVEAVMYMGTLSYEQFKKGVQIPCTCGKQATKYLVQQESPFVMMSAPPAQYELKHGTFTCASEYTGNYQCGHYKHITSKETLYCIDGALLTKSSEYKGPITDVFYKENSYTTTIKPVTYKLDGVVCTEIDPKLDNYYKKDNSYFTEQPIDLVPNQPYPNASFDNFKFVCDNIKFADDLNQLTGYKKPASRELKVTFFPDLNGDVVAIDYKHYTPSFKKGAKLLHKPIVWHVNNATNKATYKPNTWCIRCLWSTKPVETSNSFDVLKSEDAQGMDNLACEDLKPVSEEVVENPTIQKDVLECNVKTTEVVGDIILKPANNSLKITEEVGHTDLMAAYVDNSSLTIKKPNELSRVLGLKTLATHGLAAVNSVPWDTIANYAKPFLNKVVSTTTNIVTRCLNRVCTNYMPYFFTLLLQLCTFTRSTNSRIKASMPTTIAKNTVKSVGKFCLEASFNYLKSPNFSKLINIIIWFLLLSVCLGSLIYSTAALGVLMSNLGMPSYCTGYREGYLNSINVTIATYCTGSIPCSVCLSGLDSLDTYPSLETIQITISSFKWDLTAFGLVAEWFLAYILFTRFFYVLGLAAIMQLFFSYFAVHFISNSWLMWLIINLVQMAPISAMVRMYIFFASFYYVWKSYVHVVDGCNSSTCMMCYKRNRATRVECTTIVNGVRRSFYVYANGGKGFCKLHNWNCVNCDTFCAGSTFISDEVARDLSLQFKRPINPTDQSSYIVDSVTVKNGSIHLYFDKAGQKTYERHSLSHFVNLDNLRANNTKGSLPINVIVFDGKSKCEESSAKSASVYYSQLMCQPILLLDQALVSDVGDSAEVAVKMFDAYVNTFSSTFNVPMEKLKTLVATAEAELAKNVSLDNVLSTFISAARQGFVDSDVETKDVVECLKLSHQSDIEVTGDSCNNYMLTYNKVENMTPRDLGACIDCSARHINAQVAKSHNIALIWNVKDFMSLSEQLRKQIRSAAKKNNLPFKLTCATTRQVVNVVTTKIALKGG

SEQ ID NO: 15790 - protein, 1946 aa, Artificial Sequence
  SARS-CoV-2__MT890355.1__non-structural protein 3 (NSP3)
MAPTKVTFGDDTVIEVQGYKSVNITFELDERIDKVLNEKCSAYTVELGTEVNEFACVVADAVIKTLQPVSELLTPLGIDLDEWSMATYYLFDESGEFKLASHMYCSFYPPDEDEEEGDCEEEEFEPSTQYEYGTEDDYQGKPLEFGATSAALQPEEEQEEDWLDDDSQQTVGQQDGSEDNQTTTIQTIVEVQPQLEMELTPVVQTIEVNSFSGYLKLTDNVYIKNADIVEEAKKVKPTVVVNAANVYLKHGGGVAGALNKATNNAMQVESDDYIATNGPLKVGGSCVLSGHNLAKHCLHVVGPNVNKGEDIQLLKSAYENFNQHEVLLAPLLSAGIFGADPIHSLRVCVDTVRTNVYLAVFDKNLYDKLVSSFLEMKSEKQVEQKIAEIPKEEVKPFITESKPSVEQRKQDDKKIKACVEEVTTTLEETKFLTENLLLYIDINGNLHPDSATLVSDIDITFLKKDAPYIVGDVVQEGVLTAVVIPTKKAGGTTEMLAKALRKVPTDNYITTYPGQGLNGYTVEEAKTVLKKCKSAFYILPSIISNEKQEILGTVSWNLREMLAHAEETRKLMPVCVETKAIVSTIQRKYKGIKIQEGVVDYGARFYFYTSKTTVASLINTLNDLNETLVTMPLGYVTHGLNLEEAARYMRSLKVPATVSVSSPDAVTAYNGYLTSSSKTPEEHFIETISLAGSYKDWSYSGQSTQLGIEFLKRGDKSVYYTSNPTTFHLDGEVITFDNLKTLLSLREVRTIKVFTTVDNINLHTQVVDMSMTYGQQFGPTYLDGADVTKIKPHNSHEGKTFYVLPNDDTLRVEAFEYYHTTDPSFLGRYMSALNHTKKWKYPQVNGLTSIKWADNNCYLATALLTLQQIELKFNPPALQDAYYRARAGEAANFCALILAYCNKTVGELGDVRETMSYLFQHANLDSCKRVLNVVCKTCGQQQTTLKGVEAVMYMGTLSYEQFKKGVQIPCTCGKQATKYLVQQESPFVMMSAPPAQYELKHGTFTCASEYTGNYQCGHYKHITSKETLYCIDGALLTKSSEYKGPITDVFYKENSYTTTIKPVTYKLDGVVCTEIDPKLDNYYKKDNSYFTEQPIDLVPNQPYPNASFDNFKFVCDNIKFADDLNQLTGYKKPASRELKVTFFPDLNGDVVAIDYKHYTPSFKKGAKLLHKPIVWHVNNATNKATYKPNTWCIRCLWSTKPVETSNSFDVLKSEDAQGMDNLACEDLKPVSEEVVENPTIQKDVLECNVKTTEVVGDIILKPANNSLKITEEVGHTDLMAAYVDNSSLTIKKPNELSRVLGLKTLATHGLAAVNSVPWDTIANYAKPFLNKVVSTTTNIVTRCLNRVCTNYMPYFFTLLLQLCTFTRSTNSRIKASMPTTIAKNTVKSVGKFCLEASFNYLKSPNFSKLINIIIWFLLLSVCLGSLIYSTAALGVLMSNLGMPSYCTGYREGYLNSTNVTIATYCTGSIPCSVCLSGLDSLDTYPFLETIQITISSFKWDLTAFGLVAEWFLAYILFTRFFYVLGLAAIMQLFFSYFAVHFISNSWLMWLIINLVQMAPISAMVRMYIFFASFYYVWKSYVHVVDGCNSSTCMMCYKRNRATRVECTTIVNGVRRSFYVYANGGKGFCKLHNWNCVNCDTFCAGSTFISDEVARDLSLQFKRPINPTDQSSYIVDSVTVKNGSIHLYFDKAGQKTYERHSLSHFVNLDNLRANNTKGSLPINVIVFDGKSKCEESSAKSASVYYSQLMCQPILLLDQALVSDVGDSAEVAVKMFDAYVNTFSSTFNVPMEKLKTLVATAEAELAKNVSLDNVLSTFISAARQGFVDSDVETKDVVECLKLSHQSDIEVTGDSCNNYMLTYNKVENMTPRDLGACIDCSARHINAQVAKSHNIALIWNVKDFMSLSEQLRKQIRSAAKKNNLPFKLTCATTRQVVNVVTTKIALKGG

SEQ ID NO: 15791 - protein, 1946 aa, Artificial Sequence
  SARS-CoV-2__MT890669.1__non-structural protein 3 (NSP3)
MAPTKVTFGDDTVIEVQGYKSVNITFELDERIDKVLNEKCSAYTVELGTEVNEFACVVADAVIKTLQPVSELLTPLGIDLDEWSMATYYLFDESGEFKLASHMYCSFYPPDEDEEEGDCEEEEFEPSTQYEYGTEDDYQGKPLEFGATSAALQPEEEQEEDWLDDDSQQTVGQQDGSEDNQTTTIQTIVEVQPQLEMELTPVVQTIEVNSFSGYLKLTDNVYIKNADIVEEAKKVKPTVVVNAANVYLKHGGGVAGALNKATNNAMQVESDDYIATNGPLKVGGSCVLSGHNLAKHCLHVVGPNVNKGEDIQLLKSAYENFNQHEVLLAPLLSAGIFGADPIHSLRVCVDTVRTNVYLAVFDKNLYDKLVSSFLEMKSEKQVEQKIAEIPKEEVKPFITESKPLVEQRKQDDKKIKACVEEVTTTLEETKFLTENLLLYIDINGNLHPDSATLVSDIDITFLKKDAPYIVGDVVQEGVLTAVVIPTKKAGGTTEMLAKALRKVPTDNYITTYPGQGLNGYTVEEAKTVLKKCKSAFYILPSIISNEKQEILGTVSWNLREMLAHAEETRKLMPVCVETKAIVSTIQRKYKGIKIQEGVVDYGARFYFYTSKTTVASLINTLNDLNETLVTMPLGYVTHGLNLEEAARYMRSLKVPATVSVSSPDAVTAYNGYLTSSSKTPEEHFIETISLAGSYKDWSYSGQSTQLGIEFLKRGDKSVYYTSNPTTFHLDGEVITFDNLKTLLSLREVRTIKVFTTVDNINLHTQVVDMSMTYGQQFGPTYLDGADVTKIKPHNSHEGKTFYVLPNDDTLRVEAFEYYHTTDPSFLGRYMSALNHTKKWKYPQVNGLTSIKWADNNCYLATALLTLQQIELKFNPPALQDAYYRARAGEAANFCALILAYCNKTVGELGDVRETMSYLFQHANLDSCKRVLNVVCKTCGQQQTTLKGVEAVMYMGTLSYEQFKKGVQIPCTCGKQATKYLVQQESPFVMMSAPPAQYELKHGTFTCASEYTGNYQCGHYKHITSKETLYCIDGALLTKSSEYKGPITDVFYKENSYTTTIKPVTYKLDGVVCTEIDPKLDNYYKKDNSYFTEQPIDLVPNQPYPNASFDNFKFVCDNIKFADDLNQLTGYKKPASRELKVTFFPDLNGDVVAIDYKHYTPSFKKGAKLLHKPIVWHVNNATNKATYKPNTWCIRCLWSTKPVETSNSFDVLKSEDAQGMDNLACEDLKPVSEEVVENPTIQKDVLECNVKTTEVVGDIILKPANNSLKITEEVGHTDLMAAYVDNSSLTIKKPNELSRVLGLKTLATHGLAAVNSVPWDTIANYAKPFLNKVVSTTTNIVTRCLNRVCTNYMPYFFTLLLQLCTFTRSTNSRIKASMPTTIAKNTVKSVGKFCLEASFNYLKSPNFSKLINIIIWFLLLSVCLGSLIYSTAALGVLMSNLGMPSYCTGYREGYLNSTNVTIATYCTGSIPCSVCLSGLDSLDTYPSLETIQITISSFKWDLTAFGLVAEWFLAYILFTRFFYVLGLAAIMQLFFSYFAVHFISNSWLMWLIINLVQMAPISAMVRMYIFFASFYYVWKSYVHVVDGCNSSTCMMCYKRNRATRVECTTIVNGVRRSFYVYANGGKGFCKLHNWNCVNCDTFCAGSTFISDEVARDLSLQFKRPINPTDQSSYIVDSVTVKNGSIHLYFDKAGQKTYERHSLSHFVNLDNLRANNTKGSLPINVIVFDGKSKCEESSAKSASVYYSQLMCQPILLLDQALVSDVGDSAEVAVKMFDAYVNTFSSTFNVPMEKLKTLVATAEAELAKNVSLDNVLSTFISAARQGFVDSDVETKDVVECLKLSHQSDIEVTGDSCNNYMLTYNKVENMTPRDLGACIDCSARHINAQVAKSHNIALIWNVKDFMSLSEQLRKQIRSAAKKNNLPFKLTCATTRQVVNVVTTKIALKGG

SEQ ID NO: 15792 - protein, 1946 aa, Artificial Sequence
  SARS-CoV-2__MT892964.1__non-structural protein 3 (NSP3)
MAPTKVTFGDDTVIEVQGYKSVNITFELDERIDKVLNEKCSAYTVELGTEVNEFACVVADAVIKTLQPVSELLTPLGIDLDEWSMATYYLFDESGEFKLASHMYCSFYPPDEDEEEGDCEEEEFEPSTQYEYGTEDDYQGKPLEFGATSAALQPEEEQEEDWLDDDSQQTVGQQDGSEDNQTTTIQTIVEVQPQLEMELTPVVQTIEVNSFSGYLKLTDNVYIKNADIVEEAKKVKPTVVVNAANVYLKHGGGVAGALNKATNNAMQVESDDYIATNGPLKVGGSCVLSGHNLAKHCLHVVGPNVNKGEDIQLLKSAYENFNQHEVLLAPLLSAGIFGADPIHSLRVCVDTVRTNVYLAVFDKNLYDKLVSSFLEMKSEKQVEQKIAEIPKEEVKPFITESKPSVEQRKQDDKKIKACVEEVTTTLEETKFLTENLLLYIDINGNLHPDSATLVSDIDITFLKKDAPYIVGDVVQEGVLTAVVIPTKKAGGTTEMLAKALRKVPTDNYITTYPGQGLNGYTVEEAKTVLKKCKSAFYILPSIISNEKQEILGTVSWNLREMLAHAEETRKLMPVCVETKAIVSTIQRKYKGIKIQEGVVDYGARFYFYTSKTTVASLINTLNDLNETLVTMPLGYVTHGLNLEEAARYMRSLKVPATVSVSSPDAVTAYNGYLTSSSKTPEEHFIETISLAGSYKDWSYSGQSTQLGIEFLKRGDKSVYYTSNPTTFHLDGEVITFDNLKTLLSLREVRTIKVFTTVDNINLHTQVVDMSMTYGQQFGPTYLDGADVTKIKPHNSHEGKTFYVLPNDDTLRVEAFEYYHTTDPSFLGRYMSALNHTKKWKYPQVNGLTSIKWADNNCYLATALLTLQQIELKFNPPALQDAYYRARAGEAANFCALILAYCNKTVGELGDVRETMSYLFQHANLDSCKRVLNVVCKTCGQQQTTLKGVEAVMYMGTLSYEQFKKGVQIPCTCGKQATKYLVQQESPFVMMSAPPAQYELKHGTFTCASEYTGNYQCGHYKHITSKETLYCIDGALLTKSSEYKGPITDVFYKENSYTTTIKPVTYKLDGVVCTEIDPKLDNYYKKDNSYFTEQPIDLVPNQPYPNASFDNFKFVCDNIKFADDLNQLTGYKKPASRELKVTFFPDLNGDVVAIDYKHYTPSFKKGAKLLHKPIVWHVNNATNKATYKPNTWCIRCLWSTKPVETSNSFDVLKSEDAQGMDNLACEDLKPVSEEVVENPTIQKDVLECNVKTTEVVGDIILKPANNSLKITEEVGHTDLMAAYVDNSSLTIKKPNELSRVLGLKTLATHGLAAVNSVPWDTIANYAKPFLNKVVSTTTNIVTRCLNRVCTNYMPYFFTLLLQLCTFTRSTNSRIKASMPTTIAKNTVKSVGKFCLEASFNYLKSPNFSKLINIIIWFLLLSVCLGSLIYSTAALGVLMSNLGMPSYCTGYREGYLNSTNVTIATYCTGSIPCSVCLSGLDSLDTYPSLETIQITISSFKWDLTAFGLVAEWFLAYILFTRFFYVLGLAAIMQLFFSYFAVHFISNSWLMWLIINLVQMAPISAMVRMYIFFASFYYVWKSYVHVVDGCNSSTCMMCYKRNRATRVECTTIVNGVRRSFYVYANGGKGFCKLHNWNCVNCDTFCAGSTFISDEVARDLSLQFKRPINPTDQSSYIVDSVTVKNGSIHLYFDKAGQKTYERHSLSHFVNLDNLRANNTKGSLPINVIVFDGKSKCEESSAKSASVYYSQLMCQPILLLDQALVSDVGDSAEVAVKMFDAYVNTFSSTFNVPMEKLKTLVATAEAELAKNVSLDNVLSTLISAARQGFVDSDVETKDVVECLKLSHQSDIEVTGDSCNNYMLTYNKVENMTPRDLGACIDCSARHINAQVAKSHNIALIWNVKDFMSLSEQLRKQIRSAAKKNNLPFKLTCATTRQVVNVVTTKIALKGG

SEQ ID NO: 15793 - protein, 1946 aa, Artificial Sequence
  SARS-CoV-2__MT892973.1__non-structural protein 3 (NSP3)
MAPTKVTFGDDTVIEVQGYKSVNITFELDERIDKVLNEKCSAYTVELGTEVNEFACVVADAVIKTLQPVSELLTPLGIDLDEWSMATYYLFDESGEFKLASHMYCSFYPPDEDEEEGDCEEEEFEPSTQYEYGTEDDYQGKPLEFGATSAALQPEEEQEEDWLDDDSQQTVGQQDGSEDNQTTTIQTIVEVQPQLEMELTPVVQTIEVNSFSGYLKLTDNVYIKNADIVEEAKKVKPTVVVNAANVYLKHGGGVAGALNKATNNAMQVESDDYIATNGPLKVGGSCVLSGHNLAKHCLHVVGPNVNKGEDIQLLKSAYENFNQHEVLLAPLLSAGIFGADPIHSLRVCVDTVRTNVYLAVFDKNLYDKLVSSFLEMKSEKQVEQNIAEIPKEEVKPFITESKPSVEQRKQDDKKIKACVEEVTTTLEETKFLTENLLLYIDINGNLHPDSATLVSDIDITFLKKDAPYIVGDVVQEGVLTAVVIPTKKAGGTTEMLAKALRKVPTDNYITTYPGQGLNGYTVEEAKTVLKKCKSAFYILPSIISNEKQEILGTVSWNLREMLAHAEETRKLMPVCVETKAIVSTIQRKYKGIKIQEGVVDYGARFYFYTSKTTVASLINTLNDLNETLVTMPLGYVTHGLNLEEAARYMRSLKVPATVSVSSPDAVTAYNGYLTSSSKTPEEHFIETISLAGSYKDWSYSGQSTQLGIEFLKRGDKSVYYTSNPTTFHLDGEVITFDNLKTLLSLREVRTIKVFTTVDNINLHTQVVDMSMTYGQQFGPTYLDGADVTKIKPHNSHEGKTFYVLPNDDTLRVEAFEYYHTTDPSFLGRYMSALNHTKKWKYPQVNGLTSIKWADNNCYLATALLTLQQIELKFNPPALQDAYYRARAGEAANFCALILAYCNKTVGELGDVRETMSYLFQHANLDSCKRVLNVVCKTCGQQQTTLKGVEAVMYMGTLSYEQFKKGVQIPCTCGKQATKYLVQQESPFVMMSAPPAQYELKHGTFTCASEYTGNYQCGHYKHITSKETLYCIDGALLTKSSEYKGPITDVFYKENSYTTTIKPVTYKLDGVVCTEIDPKLDNYYKKDNSYFTEQPIDLVPNQPYPNASFDNFKFVCDNIKFADDLNQLTGYKKPASRELKVTFFPDLNGDVVAIDYKHYTPSFKKGAKLLHKPIVWHVNNATNKATYKPNIWCIRCLWSTKPVETSNSFDVLKSEDAQGMDNLACEDLKPVSEEVVENPTIQKDVLECNVKTTEVVGDIILKPANNSLKITEEVGHTDLMAAYVDNSSLTIKKPNELSRVLGLKTLATHGLAAVNSVPWDTIANYAKPFLNKVVSTTTNIVTRCLNRVCTNYMPYFFTLLLQLCTFTRSTNSRIKASMPTTIAKNTVKSVGKFCLEASFNYLKSPNFSKLINIIIWFLLLSVCLGSLIYSTAALGVLMSNLGMPSYCTGYREGYLNSTNVTIATYCTGSIPCSVCLSGLDSLDTYPSLETIQITISSFKWDLTAFGLVAEWFLAYILFTRFFYVLGLAAIMQLFFSYFAVHFISNSWLMWLIINLVQMAPISAMVRMYIFFASFYYVWKSYVHVVDGCNSSTCMMCYKRNRATRVECTTIVNGVRRSFYVYANGGKGFCKLHNWNCVNCDTFCAGSTFISDEVARDLSLQFKRPINPTDQSSYIVDSVTVKNGSIHLYFDKAGQKTYERHSLSHFVNLDNLRANNTKGSLPINVIVFDGKSKCEESSAKSASVYYSQLMCQPILLLDQALVSDVGDSAEVAVKMFDAYVNTFSSTFNVPMEKLKTLVATAEAELAKNVSLDNVLSTFISAARQGFVDSDVETKDVVECLKLSHQSDIEVTGDSCNNYMLTYNKVENMTPRDLGACIDCSARHINAQVAKSHNIALIWNVKDFMSLSEQLRKQIRSAAKKNNLPFKLTCATTRQVVNVVTTKIALKGG

SEQ ID NO: 15794 - protein, 1946 aa, Artificial Sequence
  SARS-CoV-2__MT892977.1__non-structural protein 3 (NSP3)
MAPTKVTFGDDTVIEVQGYKSVNITFELDERIDKVLNEKCSAYTVELGTEVNEFACVVADAVIKTLQPVSELLTPLGIDLDEWSMATYYLFDESGEFKLASHMYCSFYPPDEDEEEGDCEEEEFEPSTQYEYGTEDDYQGKPLEFGATSAALQPEEEQEEDWLDDDSQQTVGQQDGSEDNQTTTIQTIVEVQPQLEMELTPVVQTIEVNSFSGYLKLTDNVYIKNADIVEEAKKVKPTVVVNAANVYLKHGGGVAGALNKATNNAMQVESDDYIATNGPLKVGGSCVLSGHNLAKHCLHVVGPNVNKGEDIQLLKSAYENFNQHEVLLAPLLSAGIFGADPIHSLRVCVDTVRTNVYLAVFDKNLYDKLVSSFLEMKSEKQVEQKIAEIPKEEVKPFITESKPSVEQRKQDDKKIKACVEEVTTTLEETKFLTENLLLYIDINGNLHPDSATLVSDIDITFLKKDAPYIVGDVVQEGVLTAVVIPTKKAGGTTEMLAKALRKVPTDNYITTYPGQGLNGYTVEEAKTVLKKCKSAFYILPSIISNEKQEILGTVSWNLREMLAHAEETRKLMPVCVETKAIVSTIQRKYKGIKIQEGVVDYGARFYFYTSKTTVASLINTLNDLNETLVTMPLGYVTHGLNLEEAARYMRSLKVPATVSVSSPDAVTAYNGYLTSSSKTPEEHFIETISLAGSYKDWSYSGQSTQLGIEFLKRGDKSVYYTSNPTTFHLDGEVITFDNLKTLLSLREVRTIKVFTTVDNINLHTQVVDMSMTYGQQFGPTYLDGADVTKIKPHNSHEGKTFYVLPNDDTLRVEAFEYYHTTDSSFLGRYMSALNHTKKWKYPQVNGLTSIKWADNNCYLATALLTLQQIELKFNPPALQDAYYRARAGEAANFCALILAYCNKTVGELGDVRETMSYLFQHANLDSCKRVLNVVCKTCGQQQTTLKGVEAVMYMGTLSYEQFKKGVQIPCTCGKQATKYLVQQESPFVMMSAPPAQYELKHGTFTCASEYTGNYQCGHYKHITSKETLYCIDGALLTKSSEYKGPITDVFYKENSYTTTIKPVTYKLDGVVCTEIDPKLDNYYKKDNSYFTEQPIDLVPNQPYPNASFDNFKFVCDNIKFADDLNQLTGYKKPASRELKVTFFPDLNGDVVAIDYKHYTPSFKKGAKLLHKPIVWHVNNATNKATYKPNTWCIRCLWSTKPVETSNSFDVLKSEDAQGMDNLACEDLKPVSEEVVENPTIQKDVLECNVKTTEVVGDIILKPANNSLKITEEVGHTDLMAAYVDNSSLTIKKPNELSRVLGLKTLATHGLAAVNSVPWDTIANYAKPFFNKVVSTTTNIVTRCLNRVCTNYMPYFFTLLLQLCTFTRSTNSRIKASMPTTIAKNTVKSVGKFCLEASFNYLKSPNFSKLINIIIWFLLLSVCLGSLIYSTAALGVLMSNLGMPSYCTGYREGYLNSTNVTIATYCTGSIPCSVCLSGLDSLDTYPSLETIQITISSFKWDLTAFGLVAEWFLAYILFTRFFYVLGLAAIMQLFFSYFAVHFISNSWLMWLIINLVQMAPISAMVRMYIFFASFYYVWKSYVHVVDGCNSSTCMMCYKRNRATRVECTTIVNGVRRSFYVYANGGKGFCKLHNWNCVNCDTFCAGSTFISDEVARDLSLQFKRPINPTDQSSYIVDSVTVKNGSIHLYFDKAGQKTYERHSLSHFVNLDNLRANNTKGSLPINVIVFDGKSKCEESSAKSASVYYSQLMCQPILLLDQALVSDVGDSAEVAVKMFDAYVNTFSSTFNVPMEKLKTLVATAEAELAKNVSLDNVLSTFISAARQGFVDSDVETKDVVECLKLSHQSDIEVTGDSCNNYMLTYNKVENMTPRDLGACIDCSARHINAQVAKSHNIALIWNVKDFMSLSEQLRKQIRSAAKKNNLPFKLTCATTRQVVNVVTTKIALKGG

SEQ ID NO: 15795 - protein, 1946 aa, Artificial Sequence
  SARS-CoV-2__MT892981.1__non-structural protein 3 (NSP3)
MAPTKVTFGDDTVIEVQGYKSVNITFELDERIDKVLNEKCSAYTVELGTEVNEFACVVADAVIKTLQPVSELLTPLGIDLDEWSMATYYLFDESGEFKLASHMYCSFYPPDEDEEEGDCEEEEFEPSTQYEYGTEDDYQGKPLEFGATSAALQPEEEQEEDWLDDDSQQTVGQQDGSEDNQTTTIQTIVEVQPQLEMELTPVVQTIEVNSFSGYLKLTDNVYIKNADIVEEAKKVKPTVVVNAANVYLKHGGGVAGALNKATNNAMQVESDDYIATNGPLKVGGSCVLSGHNLAKHCLHVVGPNVNKGEDIQLLKSAYENFNQHEVLLAPLLSAGIFGADPIHSLRVCVDTVRTNVYLAVFDKNLYDKLVSSFLEMKSEKQVEQKIAEIPKEEVKPFITESKPSVEQRKQDDKKIKACVEEVTTTLEETKFLTENLLLYIDINGNLHPDSATLVSDIDITFLKKDAPYIVGDVVQEGVLTAVVIPTKKAGGTTEMLAKALRKVPTDNYITTYPGQGLNGYTVEEAKTVLKKCKSAFYILPSIISNEKQEILGTVSWNLREMLAHAEETRKLMPVCVETKAIVSTIQRKYKGIKIQEGVVDYGARFYFYTSKTTVASLINTLNDLNETLVTMPLGYVTHGLNLEEAARYMRSLKVPATVSVSSPDAVTAYNGYLTSSSKTPEEHFIETISLAGSYKDWSYSGQSTQLGIEFLKRGDKSVYYTSNPTTFHLDGEVITFDNLKTLLSLREVRTIKVFTTVDNINLHTQVVDMSMTYGQQFGPTYLDGADVTKIKPHNSHEGKTFYVLPNDDTLRVEAFEYYHTTDPSFLGRYMSALNHTKKWKYPQVNGLTSIKWADNNCYLATALLILQQIELKFNPPALQDAYYRARAGEAANFCALILAYCNKTVGELGDVRETMSYLFQHANLDSCKRVLNVVCKTCGQQQTTLKGVEAVMYMGTLSYEQFKKGVQIPCTCGKQATKYLVQQESPFVMMSAPPAQYELKHGTFTCASEYTGNYQCGHYKHITSKETLYCIDGALLTKSSEYKGPITDVFYKENSYTTTIKPVTYKLDGVVCTEIDPKLDNYYKKDNSYFTEQPIDLVPNQPYPNASFDNFKFVCDNIKFADDLNQLTGYKKPASRELKVTFFPDLNGDVVAIDYKHYTPSFKKGAKLLHKPIVWHVNNATNKATYKPNTWCIRCLWSTKPVETSNSFDVLKSEDAQGMDNLACEDLKPVSEEVVENPTIQKDVLECNVKTTEVVGDIILKPANNSLKITEEVGHTDLMAAYVDNSSLTIKKPNELSRVLGLKTLATHGLAAVNSVPWDTIANYAKPFLNKVVSTTTNIVTRCLNRVCTNYMPYFFTLLLQLCTFTRSTNSRIKASMPTTIAKNTVKSVGKFCLEASFNYLKSPNFSKLINIIIWFLLLSVCLGSLIYSTAALGVLMSNLGMPSYCTGYREGYLNSTNVTIATYCTGSIPCSVCLSGLDSLDTYPSLETIQITISSFKWDLTAFGLVAEWFLAYILFTRFFYVLGLAAIMQLFFSYFAVHFISNSWLMWLIINLVQMAPISAMVRMYIFFASFYYVWKSYVHVVDGCNSSTCMMCYKRNRATRVECTTIVNGVRRSFYVYANGGKGFCKLHNWNCVNCDTFCAGSTFISDEVARDLSLQFKRPINPTDQSSYIVDSVTVKNGSIHLYFDKAGQKTYERHSLSHFVNLDNLRANNTKGSLPINVIVFDGKSKCEESSAKSASVYYSQLMCQPILLLDQALVSDVGDSAEVAVKMFDAYVNTFSSTFNVPMEKLKTLVATAEAELAKNVSLDNVLSTFISAARQGFVDSDVETKDVVECLKLSHQSDIEVTGDSCNNYMLTYNKVENMTPRDLGACIDCSARHINAQVAKSHNIALIWNVKDFMSLSEQLRKQIRSAAKKNNLPFKLTCATTRQVVNVVTTKIALKGG

SEQ ID NO: 15796 - protein, 1946 aa, Artificial Sequence
  SARS-CoV-2__MT892982.1__non-structural protein 3 (NSP3)
MAPTKVTFGDDTVIEVQGYKSVNITFELDERIDKVLNEKCSAYTVELGTEVNEFACVVADAVIKTLQPVSELLTPLGIDLDEWSMATYYLFDESGEFKLASHMYCSFYPPDEDEEEGDCEEEEFEPSTQYEYGTEDDYQGKPLEFGATSAALQPEEEQEEDWLDDDSQQTVGQQDGSEDNQTTTIQTIVEVQPQLEMELTPVVQTIEVNSFSGYLKLTDNVYIKNADIVEEAKKVKPTVVVNAANVYLKHGGGVAGALNKATNNAMQVESDDYIATNGPLKVGGSCVLSGHNLAKHCLHVVGPNVNKGEDIQLLKSAYENFNQHEVLLAPLLSAGIFGADPIHSLRVCVDTVRTNVYLAVFDKNLYDKLVSSFLEMKSEKQVEQKIAEIPKEEVKPFITESKPSVEQRKQDDKKIKACVEEVTTTLEETKFLTENLLLYIDINGNLHPDSATLVSDIDITFLKKDAPYIVGDVVQEGVLTAVVIPTKKAGGTTEMLAKALRKVPTDNYITTYPGQGLNGYTVEEAKTVLKKCKSAFYILPSIISNEKQEILGTVSWNLREMLAHAEETRKLMPVCVETKAIVSTIQRKYKGIKIQEGVVDYGARFYFYTSKTTVASLINTLNDLNETLVTMPLGYVTHGLNLEEAARYMRSLKVPATVSVSSPDAVTAYNGYLTSSSKTPEEHFIETISLAGSYKDWSYSGQSTQLGIEFLKRGDKSVYYTSNPTTFHLDGEVITFDNLKTLLSLREVRTIKVFTTVDNINLHTQVVDMSMTYGQQFGPTYLDGADVTKIKPHNSHEGKTFYVLPNDDTLRVEAFEYYHTTDPSFLGRYMSALNHTKKWKYPQVNGLTSIKWADNNCYLATALLTLQQIELKFNPPALQDAYYRARAGEAVNFCALILAYCNKTVGELGDVRETMSYLFQHANLDSCKRVLNVVCKTCGQQQTTLKGVEAVMYMGTLSYEQFKKGVQIPCTCGKQATKYLVQQESPFVMMSAPPAQYELKHGTFTCASEYTGNYQCGHYKHITSKETLYCIDGALLTKSSEYKGPITDVFYKENSYTTTIKPVTYKLDGVVCTEIDPKLDNYYKKDNSYFTEQPIDLVPNQPYPNASFDNFKFVCDNIKFADDLNQLTGYKKPASRELKVTFFPDLNGDVVAIDYKHYTPSFKKGAKLLHKPIVWHVNNATNKATYKPNTWCIRCLWSTKPVETSNSFDVLKSEDAQGMDNLACEDLKPVSEEVVENPTIQKDVLECNVKTTEVVGDIILKPANNSLKITEEVGHTDLMAAYVDNSSLTIKKPNELSRVLGLKTLATHGLAAVNSVPWDTIANYAKPFLNKVVSTTTNIVTRCLNRVCTNYMPYFFTLLLQLCTFTRSTNSRIKASMPTTIAKNTVKSVGKFCLEASFNYLKSPNFSKLINIIIWFLLLSVCLGSLIYSTAALGVLMSNLGMPSYCTGYREGYLNSTNVTIATYCTGSIPCSVCLSGLDSLDTYPSLETIQITISSFKWDLTAFGLVAEWFLAYILFTRFFYVLGLAAIMQLFFSYFAVHFISNSWLMWLIINLVQMAPISAMVRMYIFFASFYYVWKSYVHVVDGCNSSTCMMCYKRNRATRVECTTIVNGVRRSFYVYANGGKGFCKLHNWNCVNCDTFCAGSTFISDEVARDLSLQFKRPINPTDQSSYIVDSVTVKNGSIHLYFDKAGQKTYERHSLSHFVNLDNLRANNTKGSLPINVIVFDGKSKCEESSAKSASVYYSQLMCQPILLLDQALVSDVGDSAEVAVKMFDAYVNTFSSTFNVPMEKLKTLVATAEAELAKNVSLDNVLSTFISAARQGFVDSDVETKDVVECLKLSHQSDIEVTGDSCNNYMLTYNKVENMTPRDLGACIDCSARHINAQVAKSHNIALIWNVKDFMSLSEQLRKQIRSAAKKNNLPFKLTCATTRQVVNVVTTKIALKGG

SEQ ID NO: 15797 - protein, 1946 aa, Artificial Sequence
  SARS-CoV-2__MT892985.1__non-structural protein 3 (NSP3)
MAPTKVTFGDDTVIEVQGYKSVNITFELDERIDKVLNEKCSAYTVELGTEVNEFACVVADAVIKTLQPVSELLTPLGIDLDEWSMATYYLFDESGEFKLASHMYCSFYPPDEDEEEGDCEEEEFEPSTQYEYGTEYDYQGKPLEFGATSAALQPEEEQEEDWLDDDSQQTVGQQDGSEDNQTTTIQTIVEVQPQLEMELTPVVQTIEVNSFSGYLKLTDNVYIKNADIVEEAKKVKPTVVVNAANVYLKHGGGVAGALNKATNNAMQVESDDYIATNGPLKVGGSCVLSGHNLAKHCLHVVGPNVNKGEDIQLLKSAYENFNQHEVLLAPLLSAGIFGADPIHSLRVCVDTVRTNVYLAVFDKNLYDKLVSSFLEMKSEKQVEQKIAEIPKEEVKPFITESKPSVEQRKQDDKKIKACVEEVTTTLEETKFLTENLLLYIDINGNLHPDSATLVSDIDITFLKKDAPYIVGDVVQEGVLTAVVIPTKKAGGTTEMLAKALRKVPTDNYITTYPGQGLNGYTVEEAKTVLKKCKSAFYILPSIISNEKQEILGTVSWNLREMLAHAEETRKLMPVCVETKAIVSTIQRKYKGIKIQEGVVDYGARFYFYTSKTTVASLINTLNDLNETLVTMPLGYVTHGLNLEEAARYMRSLKVPATVSVSSPDAVTAYNGYLTSSSKTPEEHFIETISLAGSYKDWSYSGQSTQLGIEFLKRGDKSVYYTSNPTTFHLDGEVITFDNLKTLLSLREVRTIKVFTTVDNINLHTQVVDMSMTYGQQFGPTYLDGADVTKIKPHNSHEGKTFYVLPNDDTLRVEAFEYYHTTDPSFLGRYMSALNHTKKWKYPQVNGLTSIKWADNNCYLATALLTLQQIELKFNPPALQDAYYRARAGEAANFCALILAYCNKTVGELGDVRETMSYLFQHANLDSCKRVLNVVCKTCGQQQTTLKGVEAVMYMGTLSYEQFKKGVQIPCTCGKQATKYLVQQESPFVMMSAPPAQYELKHGTFTCASEYTGNYQCGHYKHITSKETLYCIDGALLTKSSEYKGPITDVFYKENSYTTTIKPVTYKLDGVVCTEIDPKLDNYYKKDNSYFTEQPIDLVPNQPYPNASFDNFKFVCDNIKFADDLNQLTGYKKPASRELKVTFFPDLNGDVVAIDYKHYTPSFKKGAKLLHKPIVWHVNNATNKATYKPNTWCIRCLWSTKPVETSNSFDVLKSEDAQGMDNLACEDLKPVSEEVVENPTIQKDVLECNVKTTEVVGDIILKPANNSLKITEEVGHTDLMAAYVDNSSLTIKKPNELSRVLGLKTLATHGLAAVNSVPWDTIANYAKPFLNKVVSTTTNIVTRCLNRVCTNYMPYFFTLLLQLCTFTRSTNSRIKASMPTTIAKNTVKSVGKFCLEASFNYLKSPNFSKLINIIIWFLLLSVCLGSLIYSTAALGVLMSNLGMPSYCTGYREGYLNSTNVTIATYCTGSIPCSVCLSGLDSLDTYPSLETIQITISSFKWDLTAFGLVAEWFLAYILFTRFFYVLGLAAIMQLFFSYFAVHFISNSWLMWLIINLVQMAPISAMVRMYIFFASFYYVWKSYVHVVDGCNSSTCMMCYKRNRATRVECTTIVNGVRRSFYVYANGGKGFCKLHNWNCVNCDTFCAGSTFISDEVARDLSLQFKRPINPTDQSSYIVDSVTVKNGSIHLYFDKAGQKTYERHSLSHFVNLDNLRANNTKGSLPINVIVFDGKSKCEESSAKSASVYYSQLMCQPILLLDQALVSDVGDSAEVAVKMFDAYVNTFSSTFNVPMEKLKTLVATAEAELAKNVSLDNVLSTFISAARQGFVDSDVETKDVVECLKLSHQSDIEVTGDSCNNYMLTYNKVENMTPRDLGACIDCSARHINAQVAKSHNIALIWNVKDFMSLSEQLRKQIRSAAKKNNLPFKLTCATTRQVVNVVTTKIALKGG

SEQ ID NO: 15798 - protein, 1946 aa, Artificial Sequence
  SARS-CoV-2__MT893006.1__non-structural protein 3 (NSP3)
MAPTKVTFGDDTVIEVQGYKSVNITFELDERIDKVLNEKCSAYTVELGTEVNEFACVVADAVIKTLQPVSELLTPLGIDLDEWSMATYYLFDESGEFKLASHMYCSFYPPDEDEEEGDCEEEEFEPSTQYEYGTEDDYQGKPLEFGATSAALQPEEEQEEDWLDDDSQQTVGQQDGSEDNQTTTIQTIVEVQPQLEMELTPVVQTIEVNSFSGYLKLTDNVYIKNADIVEEAKKVKPTVVVNAANVYLKHGGGVAGALNKATNNAMQVESDDYIATNGPLKVGGSCVLSGHNLAKHCLHVVGPNVNKGEDIQLLKSAYENFNQHEVLLAPLLSAGIFGADPIHSLRVCVDTVRTNVYLAVFDKNLYDKLVSSFLEMKSEKQVEQKIAEIPKEEVKPFITESKPSVEQRKQDDKKIKACVEEVTTTLEETKFLTENLLLYIDINGNLHPDSATLVSDIDITFLKKDAPYIVGDVVQEGVLTAVVIPTKKAGGTTEMLAKALRKVPTDNYITTYPGQGLNGYTVEEAKTVLKKCKSAFYILPSIISNEKQEILGTVSWNLREMLAHAEETRKLMPVCVETKAIVSTIQRKYKGIKIQEGVVDYGARFYFYTSKTTVASLINTLNDLNETLVTMPLGYVTHGLNLEEAARYMRSLKVPATVSVSSPDAVTAYNGYLTSSSKTPEEHFIETISLAGSYKDWSYSGQSTQLGIEFLKRGDKSVYYTSNPTTFHLDGEVITFDNLKTLLSLREVRTIKVFTTVDNINLHTQVVDMSMTYGQQFGPTYLDGADVTKIKPHNSHEGKTFYVLPNDDTLRVEAFEYYHTTDPSFLGRYMSALNHTKKWKYPQVNGLTSIKWADNNCYLATALLTLQQIELKFNPPALQDAYYRARAGEAANFCALILAYCNKTVGELGDVRETMSYLFQHANLDSCKRVLNVVCKTCGQQQTTLKGVEAVMYMGTLSYEQFKKGVQIPCTCGKQATKYLVQQESPFVMMSAPPAQYELKHGTFTCASEYTGNYQCGHYKHITSKETLYCIDGALLTKSSEYKGPITDVFYKENSYTTTIKPVIYKLDGVVCTEIDPKLDNYYKKDNSYFTEQPIDLVPNQPYPNASFDNFKFVCDNIKFADDLNQLTGYKKPASRELKVTFFPDLNGDVVAIDYKHYTPSFKKGAKLLHKPIVWHVNNATNKATYKPNTWCIRCLWSTKPVETSNSFDVLKSEDAQGMDNLACEDLKPVSEEVVENPTIQKDVLECNVKTTEVVGDIILKPANNSLKITEEVGHTDLMAAYVDNSSLTIKKPNELSRVLGLKTLATHGLAAVNSVPWDTIANYAKPFLNKVVSTTTNIVTRCLNRVCTNYMPYFFTLLLQLCTFTRSTNSRIKASMPTTIAKNTVKSVGKFCLEASFNYLKSPNFSKLINIIIWFLLLSVCLGSLIYSTAALGVLMSNLGMPSYCTGYREGYLNSTNVTIATYCTGSIPCSVCLSGLDSLDTYPSLETIQITISSFKWDLTAFGLVAEWFLAYILFTRFFYVLGLAAIMQLFFSYFAVHFISNSWLMWLIINLVQMAPISAMVRMYIFFASFYYVWKSYVHVVDGCNSSTCMMCYKRNRATRVECTTIVNGVRRSFYVYANGGKGFCKLHNWNCVNCDTFCAGSTFISDEVARDLSLQFKRPINPTDQSSYIVDSVTVKNGSIHLYFDKAGQKTYERHSLSHFVNLDNLRANNTKGSLPINVIVFDGKSKCEESSAKSASVYYSQLMCQPILLLDQALVSDVGDSAEVAVKMFDAYVNTFSSTFNVPMEKLKTLVATAEAELAKNVSLDNVLSTFISAARQGFVDSDVETKDVVECLKLSHQSDIEVTGDSCNNYMLTYNKVENMTPRDLGACIDCSARHINAQVAKSHNIALIWNVKDFMSLSEQLRKQIRSAAKKNNLPFKLTCATTRQVVNVVTTKIALKGG

SEQ ID NO: 15799 - protein, 1946 aa, Artificial Sequence
  SARS-CoV-2__MT893010.1__non-structural protein 3 (NSP3)
MAPTKVTFGDDTVIEVQGYKSVNITFELDESIDKVLNEKCSAYTVELGTEVNEFACVVADAVIKTLQPVSELLTPLGIDLDEWSMATYYLFDESGEFKLASHMYCSFYPPDEDEEEGDCEEEEFEPSTQYEYGTEDDYQGKPLEFGATSAALQPEEEQEEDWLDDDSQQTVGQQDGSEDNQTTTIQTIVEVQPQLEMELTPVVQTIEVNSFSGYLKLTDNVYIKNADIVEEAKKVKPTVVVNAANVYLKHGGGVAGALNKATNNAMQVESDDYIATNGPLKVGGSCVLSGHNLAKHCLHVVGPNVNKGEDIQLLKSAYENFNQHEVLLAPLLSAGIFGADPIHSLRVCVDTVRTNVYLAVFDKNLYDKLVSSFLEMKSEKQVEQKIAEIPKEEVKPFITESKPSVEQRKQDDKKIKACVEEVTTTLEETKFLTENLLLYIDINGNLHPDSATLVSDIDITFLKKDAPYIVGDVVQEGVLTAVVIPTKKAGGTTEMLAKALRKVPTDNYITTYPGQGLNGYTVEEAKTVLKKCKSAFYILPSIISNEKQEILGTVSWNLREMLAHAEETRKLMPVCVETKAIVSTIQRKYKGIKIQEGVVDYGARFYFYTSKTTVASLINTLNDLNETLVTMPLGYVTHGLNLEEAARYMRSLKVPATVSVSSPDAVTAYNGYLTSSSKTPEEHFIETISLAGSYKDWSYSGQSTQLGIEFLKRGDKSVYYTSNPTTFHLDGEVITFDNLKTLLSLREVRTIKVFTTVDNINLHTQVVDMSMTYGQQFGPTYLDGADVTKIKPHNSHEGKTFYVLPNDDTLRVEAFEYYHTTDPSFLGRYMSALNHTKKWKYPQVNGLTSIKWADNNCYLATALLTLQQIELKFNPPALQDAYYRARAGEAANFCALILAYCNKTVGELGDVRETMSYLFQHANLDSCKRVLNVVCKTCGQQQTTLKGVEAVMYMGTLSYEQFKKGVQIPCTCGKQATKYLVQQESPFVMMSAPPAQYELKHGTFTCASEYTGNYQCGHYKHITSKETLYCIDGALLTKSSEYKGPITDVFYKENSYTTTIKPVTYKLDGVVCTEIDPKLDNYYKKDNSYFTEQPIDLVPNQPYPNASFDNFKFVCDNIKFADDLNQLTGYKKPASRELKVTFFPDLNGDVVAIDYKHYTPSFKKGAKLLHKPIVWHVNNATNKATYKPNTWCIRCLWSTKPVETSNSFDVLKSEDAQGMDNLACEDLKPVSEEVVENPTIQKDVLECNVKTTEVVGDIILKPANNSLKITEEVGHTDLMAAYVDNSSLTIKKPNELSRVLGLKTLATHGLAAVNSVPWDTIANYAKPFLNKVVSTTTNIVTRCLNRVCTNYMPYFFTLLLQLCTFTRSTNSRIKASMPTTIAKNTVKSVGKFCLEASFNYLKSPNFSKLINIIIWFLLLSVCLGSLIYSTAALGVLMSNLGMPSYCTGYREGYLNSTNVTIATYCTGSIPCSVCLSGLDSLDTYPSLETIQITISSFKWDLTAFGLVAEWFLAYILFTRFFYVLGLAAIMQLFFSYFAVHFISNSWLMWLIINLVQMAPISAMVRMYIFFASFYYVWKSYVHVVDGCNSSTCMMCYKRNRATRVECTTIVNGVRRSFYVYANGGKGFCKLHNWNCVNCDTFCAGSTFISDEVARDLSLQFKRPINPTDQSSYIVDSVTVKNGSIHLYFDKAGQKTYERHSLSHFVNLDNLRANNTKGSLPINVIVFDGKSKCEESSAKSASVYYSQLMCQPILLLDQALVSDVGDSAEVAVKMFDAYVNTFSSTFNVPMEKLKTLVATAEAELAKNVSLDNVLSTFISAARQGFVDSDVETKDVVECLKLSHQSDIEVTGDSCNNYMLTYNKVENMTPRDLGACIDCSARHINAQVAKSHNIALIWNVKDFMSLSEQLRKQIRSAAKKNNLPFKLTCATTRQVVNVVTTKIALKGG

SEQ ID NO: 15800 - protein, 1946 aa, Artificial Sequence
  SARS-CoV-2__MT893018.1__non-structural protein 3 (NSP3)
MAPTKVTFGDDTVIEVQGYKSVNITFELDERIDKVLNEKCSAYTVELGTEVNEFACVVADAVIKTLQPVSELLTPLGIDLDEWSMATYYLFDESGEFKLASHMYCSFYPPDEDEEEGDCEEEEFEPSTQYEYGTEDDYQGKPLEFGATSAALQPEEEQEEDWLDDDSQQTVGQQDGSEDNQTTTIQTIVEVQPQLEMELTPVVQTIEVNSFSGYLKLTDNVYIKNADIVEEAKKVKPTVVVNAANVYLKHGGGVAGALNKATNNAMQVESDDYIATNGPLKVGGSCVLSGHNLAKHCLHVVGPNVNKGEDIQLLKSAYENFNQHEVLLAPLLSAGIFGADPIHSLRVCVDTVRTNVYLAVFDKNLYDKLVSSFLEMKSEKQVEQKIAEIPKEEVKPFITESKPSVEQRKQDDKKIKACVEEVTTTLEETKFLTENLLLYIDINGNLHPDSATLVSDIDITFLKKDAPYIVGDVVQEGVLTAVVIPTKKAGGTTEMLAKALRKVPTDNYITTYPGQGLNGYTVEEAKTVLKKCKSAFYILPSIISNEKQEILGTVSWNLREMLAHAEETRKLMPVCVETKAIVSTIQRKYKGIKIQEGVVDYGARFYFYTSKTTVASLINTLNDLNETLVTMPLGYVTHGLNLEEAARYMRSLKVPATVSVSSPDAVTAYNGYLTSSSKTPEEHFIETISLAGSYKDWSYSGQSTQLGIEFLKRGDKSVYYTSNPTTFHLDGEVITFDNLKTLLSLREVRTIKVFTTVDNINLHTQVVDMSMTYGQQFGPTYLDGADVTKIKPHNSHEGKTFYVLPNDDILRVEAFEYYHTTDPSFLGRYMSALNHTKKWKYPQVNGLTSIKWADNNCYLATALLTLQQIELKFNPPALQDAYYRARAGEAANFCALILAYCNKTVGELGDVRETMSYLFQHANLDSCKRVLNVVCKTCGQQQTTLKGVEAVMYMGTLSYEQFKKGVQIPCTCGKQATKYLVQQESPFVMMSAPPAQYELKHGTFTCASEYTGNYQCGHYKHITSKETLYCIDGALLTKSSEYKGPITDVFYKENSYTTTIKPVTYKLDGVVCTEIDPKLDNYYKKDNSYFTEQPIDLVPNQPYPNASFDNFKFVCDNIKFADDLNQLTGYKKPASRELKVTFFPDLNGDVVAIDYKHYTPSFKKGAKLLHKPIVWHVNNATNKATYKPNTWCIRCLWSTKPVETSNSFDVLKSEDAQGMDNLACEDLKPVSEEVVENPTIQKDVLECNVKTTEVVGDIILKPANNSLKITEEVGHTDLMAAYVDNSSLTIKKPNELSRVLGLKTLATHGLAAVNSVPWDTIANYAKPFLNKVVSTTTNIVTRCLNRVCTNYMPYFFTLLLQLCTFTRSTNSRIKASMPTTIAKNTVKSVGKFCLEASFNYLKSPNFSKLINIIIWFLLLSVCLGSLIYSTAALGVLMSNLGMPSYCTGYREGYLNSTNVTIATYCTGSIPCSVCLSGLDSLDTYPSLETIQITISSFKWDLTAFGLVAEWFLAYILFTRFFYVLGLAAIMQLFFSYFAVHFISNSWLMWLIINLVQMAPISAMVRMYIFFASFYYVWKSYVHVVDGCNSSTCMMCYKRNRATRVECTTIVNGVRRSFYVYANGGKGFCKLHNWNCVNCDTFCAGSTFISDEVARDLSLQFKRPINPTDQSSYIVDSVTVKNGSIHLYFDKAGQKTYERHSLSHFVNLDNLRANNTKGSLPINVIVFDGKSKCEESSAKSASVYYSQLMCQPILLLDQALVSDVGDSAEVAVKMFDAYVNTFSSTFNVPMEKLKTLVATAEAELAKNVSLDNVLSTFISAARQGFVDSDVETKDVVECLKLSHQSDIEVTGDSCNNYMLTYNKVENMTPRDLGACIDCSARHINAQVAKSHNIALIWNVKDFMSLSEQLRKQIRSAAKKNNLPFKLTCATTRQVVNVVTTKIALKGG

SEQ ID NO: 15801 - protein, 1946 aa, Artificial Sequence
  SARS-CoV-2__MT889692.1__non-structural protein 3 (NSP3)
MAPTKVTFGDDTVIEVQGYKSVNITFELDERIDKVLNEKCSAYTVELGTEVNEFACVVADAVIKTLQPVSELLTPLGIDLDEWSMATYYLFDESGEFKLASHMYCSFYPPDEDEEEGDCEEEEFEPSTQYEYGTEDDYQGKPLEFGATSAALQPEEEQEEDWLDDDSQQTVGQQDGSEDNQTTTIQTIVEVQPQLEMELTPVVQTIEVNSFSGYLKLTDNVYIKNADIVAEATKVKPTVVVNAANVYLKHGGGVAGALNKATNNAMQVESDDYIATNGPLKVGGSCVLSGHNLAKHRLHVVGPNVNKGEDIQLLKSAYENFNQHEVLLAPLLSAGIFGADPIHSLRVCVDTVRTNVYLAVFDKNLYDKLVSSFLEMKSEKQVEQKIAEIPKEEVKPFITESKPSVEQRKQDDKKIKACVEEVTTTLEETKFLTENLLLYIDINGNLHPDSATLVSDIDITFLKKDAPYIVGDVVQEGVLTAVVIPTKKAGGTTEMLAKALRKVPTDNYITTYPGQGLNGYTVEEAKTVLKKCKSAFYILPSIISNEKQEILGTVSWNLREMLAHAEETRKLMPVCVETKAIVSTIQRKYKGIKIQEGVVDYGARFYFYTSKTTVASLINTLNDLNETLVTMPLGYVTHGLNLEEAARYMRSLKVPATVSVSSPDAVTAYNGYLTSSSKTPEEHFIETISLAGSYKDWSYSGQSTQLGIEFLKRGDKSVYYTSNPTTFHLDGEVITFDNLKTLLSLREVRTIKVFTTVDNINLHTQVVDMSMTYGQQFGPTYLDGADVTKIKPHNSHEGKTFYVLPNDDTLRVEAFEYYHTTDPSFLGRYMSALNHTKKWKYPQVNGLTSIKWADNNCYLATALLTLQQIELKFNPPALQDAYYRARAGEAANFCALILAYCNKTVGELGDVRETMSYLFQHANLDSCKRVLNVVCKTCGQQQTTLKGVEAVMYMGTLSYEQFKKGVQIPCTCGKQATKYLVQQESPFVMMSAPPAQYELKHGTFTCASEYTGNYQCGHYKHITSKETLYCIDGALLTKSSEYKGPITDVFYKENSYTTTIKPVTYKLDGVVCTEIDPKLDNYYKKDNSYFTEQPIDLVPNQPYPNASFDNFKFVCDNIKFADDLNQLTGYKKPASRELKVTFFPDLNGDVVAIDYKHYTPSFKKGAKLLHKPIVWHVNNATNKATYKPNTWCIRCLWSTKPVETSNSFDVLKSEDAQGMDNLACEDLKPVSEEVVENPTIQKDVLECNVKTTEVVGDIILKPANNSLKITEEVGHTDLMAAYVDNSSLTIKKPNELSRVLGLKTLATHGLAAVNSVPWDTIANYAKPFLNKVVSTTTNIVTLCLNRVCTNYMPYFFTLLLQLCTFTRSTNSRIKASMPTTIAKNTVKSVGKFCLEASFNYLKSPNFSKLINIIIWFLLLSVCLGSLIYSTAALGVLMSNLGMPSYCTGYREGYLNSTNVTIATYCTGSIPCSVCLSGLDSLDTYPSLETIQITISSFKWDLTAFGLVAEWFLAYILFTRFFYVLGLAAIMQLFFSYFAVHFISNSWLMWLIINLVQMAPISAMVRMYIFFASFYYVWKSYVHVVDGCNSSTCMMCYKRNRATRVECTTIVNGVRRSFYVYANGGKGFCKLHNWNCVNCDTFCAGSTFISDEVARDLSLQFKRPINPTDQSSYIVDSVTVKNGSIHLYFDKAGQKTYERHSLSHFVNLDNLRANNTKGSLPINVIVFDGKSKCEESSAKSASVYYSQLMCQPILLLDQALVSDVGDSAEVAVKMFDAYVSTFSSTFNVPMEKLKTLVATAEAELAKNVSLDNVLSTFISAARQGFVDSDVETKDVVECLKLSHQSDIEVTGDSCNNYMLTYNKVENMTPRDLGACIDCSARHINAQVAKSHNIALIWNVKDFMSLSEQLRKQIRSAAKKNNLPFKLTCATTRQVVNVVTTKIALKGG

SEQ ID NO: 15802 - protein, 1946 aa, Artificial Sequence
  SARS-CoV-2__MT883499.1__non-structural protein 3 (NSP3)
MAPTKVTFGDDTVIEVQGYKSVNITFELDERIDKVLNEKCSAYTVELGTEVNEFACVVADAVIKTLQPVSELLTPLGIDLDEWSMATYYLFDESGEFKLASHMYCSFYPPDEDEEEGDCEEEEFEPSTQYEYGTEDDYQGKPLEFGATSAALQPEEEQEEDWLDDDSQQTVGQQDGSEDNQTTTIQTIVEVQPQLEMELTPVVQTIEVNSFSGYLKLTDNVYIKNADIVEEAKKVKPTVVVNAANVYLKHGGGVAGALNKATNNAMQVESDDYIATNGPLKVGGSCVLSGHNLAKHCLHVVGPNVNKGEDIQLLKSAYENFNQHEVLLAPLLSAGIFGADPIHSLRVCVDTVRTNVYLAVFDKNLYDKLVSSFLEMKSEKQVEQKIAEIPKEEVKPFITESKPSVEQRKQDDKKIKACVEEVTTTLEEIKFLTENLLLYIDINGNLHPDSATLVSDIDITFLKKDAPYIVGDVVQEGVLTAVVIPTKKAGGTTEMLAKALRKVPTDNYITTYPGQGLNGYTVEEAKTVLKKCKSAFYILPSIISNEKQEILGTVSWNLREMLAHAEETRKLMPVCVETKAIVSTIQRKYKGIKIQEGVVDYGARFYFYTSKTTVASLINTLNDLNETLVTMPLGYVTHGLNLEEAARYMRSLKVPATVSVSSPDAVTAYNGYLTSSSKTPEEHFIETISLAGSYKDWSYSGQSTQLGIEFLKRGDKSVYYTSNPTTFHLDGEVITFDNLKTLLSLREVRTIKVFTTVDNINLHTQVVDMSMTYGQQFGPTYLDGADVTKIKPHNSHEGKTFYVLPNDDTLRVEAFEYYHTTDPSFLGRYMSALNHTKKWKYPQVNGLTSIKWADNNCYLATALLTLQQIELKFNPPALQDAYYRARAGEAANFCALILAYCNKTVGELGDVRETMSYLFQHANLDSCKRVLNVVCKTCGQQQTTLKGVEAVMYMGTLSYEQFKKGVQIPCTCGKQATKYLVQQESPFVMMSAPPAQYELKHGTFTCASEYTGNYQCGHYKHITSKETLYCIDGALLTKSSEYKGPITDVFYKENSYTTTIKPVTYKLDGVVCTEIDPKLDNYYKKDNSYFTEQPIDLVPNQPYPNASFDNFKFVCDNIKFADDLNQLTGYKKPASRELKVTFFPDLNGDVVAIDYKHYTPSFKKGAKLLHKPIVWHVNNATNKATYKPNTWCIRCLWSTKPVETSNSFDVLKSEDAQGMDNLACEDLKPVSEEVVENPTIQKDVLECNVKTTEVVGDIILKPANNSLKITEEVGHTDLMAAYVDNSSLTIKKPNELSRVLGLKTLATHGLAAVNSVPWDTIANYAKPFLNKVVSTTTNIVTRCLNRVCTNYMPYFFTLLLQLCTFTRSTNSRIKASMPTTIAKNTVKSVGKFCLEASFNYLKSPNFSKLINIIIWFLLLSVCLGSLIYSTAALGVLMSNLGMPSYCTGYREGYLNSTNVTIATYCTGSIPCSVCLSGLDSLDTYPSLETIQITISSFKWDLTAFGLVAEWFLAYILFTRFFYVLGLAAIMQLFFSYFAVHFISNSWLMWLIINLVQMAPISAMVRMYIFFASFYYVWKSYVHVVDGCNSSTCMMCYKRNRATRVECTTIVNGVRRSFYVYANGGKGFCKLHNWNCVNCDTFCAGSTFISDEVARDLSLQFKRPINPTDQSSYIVDSVTVKNGSIHLYFDKAGQKTYERHSLSHFVNLDNLRANNTKGSLPINVIVFDGKSKCEESSAKSASVYYSQLMCQPILLLDQALVSDVGDSAEVAVKMFDAYVNTFSSTFNVPMEKLKTLVATAEAELAKNVSLDNVLSTFISAARQGFVDSDVETKDVVECLKLSHQSDIEVTGDSCNNYMLTYNKVENMTPRDLGACIDCSARHINAQVAKSHNIALIWNVKDFMSLSEQLRKQIRSAAKKNNLPFKLTCATTRQVVNVVTTKIALKGG

SEQ ID NO: 15803 - protein, 1946 aa, Artificial Sequence
  SARS-CoV-2__MT886301.1__non-structural protein 3 (NSP3)
MAPTKVTFGDDTVIEVQGYKSVNITFELDERIDKVLNEKCSAYTVELGTEVNEFACVVTDAVIKTLQPVSELLTPLGIDLDEWSMATYYLFDESGEFKLASHMYCSFYPPDEDEEEGDCEEEEFEPSTQYEYGTEDDYQGKPLEFGATSAALQPEEEQEEDWLDDDSQQTVGQQDGSEDNQTTTIQTIVEVQPQLEMELTPVVQTIEVNSFSGYLKLTDNVYIKNADIVEEAKKVKPTVVVNAANVYLKHGGGVAGALNKATNNAMQVESDDYIATNGPLKVGGSCVLSGHNLAKHCLHVVGPNVNKGEDIQLLKSAYENFNQHEVLLAPLLSAGIFGADPIHSLRVCVDTVRTNVYLAVFDKNLYDKLVSSFLEMKSEKQVEQKIAEIPKEEVKPFITESKPSVEQRKQDDKKIKACVEEVTTTLEETKFLTENLLLYIDINGNLHPDSATLVSDIDITFLKKDAPYIVGDVVQEGVLTAVVIPTKKAGGTTEMLAKALRKVPTDNYITTYPGQGLNGYTVEEAKTVLKKCKSAFYILPSIISNEKQEILGTVSWNLREMLAHAEETRKLMPVCVETKAIVSTIQRKYKGIKIQEGVVDYGARFYFYTSKTTVASLINTLNDLNETLVTMPLGYVTHGLNLEEAARYMRSLKVPATVSVSSPDAVTAYNGYLTSSSKTPEEHFIETISLAGSYKDWSYSGQSTQLGIEFLKRGDKSVYYTSNPTTFHLDGEVITFDNLKTLLSLREVRTIKVFTTVDNINLHTQVVDMSMTYGQQFGPTYLDGADVTKIKPHNSHEGKTFYVLPNDDTLRVEAFEYYHTTDPSFLGRYMSALNHTKKWKYPQVNGLTSIKWADNNCYLATALLTLQQIELKFNPPALQDAYYRARAGEAANFCALILAYCNKTVGELGDVRETMSYLFQHANLDSCKRVLNVVCKTCGQQQTTLKGVEAVMYMGTLSYEQFKKGVQIPCTCGKQATKYLVQQESPFVMMSAPPAQYELKHGTFTCASEYTGNYQCGHYKHITSKETLYCIDGALLTKSSEYKGPITDVFYKENSYTTTIKPVTYKLDGVVCTEIDPKLDNYYKKDNSYFTEQPIDLVPNQPYPNASFDNFKFVCDNIKFADDLNQLTGYKKPASRELKVTFFPDLNGDVVAIDYKHYTPSFKKGAKLLHKPIVWHVNNATNKATYKPNTWCIRCLWSTKPVETSNSFDVLKSEDAQGMDNLACEDLKPVSEEVVENPTIQKDVLECNVKTTEVVGDIILKPANNSLKITEEVGHTDLMAAYVDNSSLTIKKPNELSRVLGLKTLATHGLAAVNSVPWDTIANYAKPFLNKVVSTTTNIVTRCLNRVCTNYMPYFFTLLLQLCTFTRSTNSRIKASMPTTIAKNTVKSVGKFCLEASFNYLKSPNFSKLINIIIWFLLLSVCLGSLIYSTAVLGVLMSNLGMPSYCTGYREGYLNSTNVTIATYCTGSIPCSVCLSGLDSLDTYPSLETIQITISSFKWDLTAFGLVAEWFLAYILFTRFFYVLGLAAIMQLFFSYFAVHFISNSWLMWLIINLVQMAPISAMVRMYIFFASFYYVWKSYVHVVDGCNSSTCMMCYKRNRATRVECTTIVNGVRRSFYVYANGGKGFCKLHNWNCVNCDTFCAGSTFISDEVARDLSLQFKRPINPTDQSSYIVDSVTVKNGSIHLYFDKAGQKTYERHSLSHFVNLDNLRANNTKGSLPINVIVFDGKSKCEESSAKSASVYYSQLMCQPILLLDQALVSDVGDSAEVAVKMFDAYVNTFSSTFNVPMEKLKTLVATAEAELAKNVSLDNVLSTFISAARQGFVDSDVETKDVVECLKLSHQSDIEVTGDSCNNYMLTYNKVENMTPRDLGACIDCSARHINAQVAKSHNIALIWNVKDFMSLSEQLRKQIRSAAKKNNLPFKLTCATTRQVVNVVTTKIALKGG

SEQ ID NO: 15804 - protein, 1946 aa, Artificial Sequence
  SARS-CoV-2__MT886315.1__non-structural protein 3 (NSP3)
MAPTKVTFGDDTVIEVQGYKSVNITFELDERIDKVLNEKCSAYTVELGTEVNEFACVVADAVIKTLQPVSELLTPLGIDLDEWSMATYYLFDESGEFKLASHMYCSFYPPDEDEEEGDCEEEEFEPSTQYEYGTEDDYQGKPLEFGATSAALQPEEEQEEDWLDDDSQQTVGQQDGSEDNQTTTIQTIVEVQPQLEMELTPVVQTIEVNSFSGYLKLTDNVYIKNADIVEEAKKVKPTVVVNAANVYLKHGGGVAGALNKATNNAMQVESDDYIATNGPLKVGGSCVLSGHNLAKHCLHVVGPNVNKGEDIQLLKSAYENFNQHEVLLAPLLSAGIFGADPIHSLRVCVDTVRTNVYLAVFDKNLYDKLVSSFLEMKSEKQVEQKIAEIPKEEVKPFITESKPSVEQRKQDDKKIKACVEEVTTTLEETKFLTENLLLYIDINGNLHPDSATLVSDIDITFLKKDAPYIVGDVVQEGVLTAVVIPTKKAGGTTEMLAKALRKVPTDNYITTYPGQGLNGYTVEEAKTVLKKCKSAFYILPSIISNEKQEILGTVSWNLREMLAHAEETRKLMPVCVETKAIVSTIQRKYKGIKIQEGVVDYGARFYFYTSKTTVASLINTLNDLNETLVTMPLGYVTHGLNLEEAARYMRSLKVPATVSVSSPDAVTAYNGYLTSSSKTLEEHFIETISLAGSYKDWSYSGQSTQLGIEFLKRGDKSVYYTSNPTTFHLDGEVITFDNLKTLLSLREVRTIKVFTTVDNINLHTQVVDMSMTYGQQFGPTYLDGADVTKIKPHNSHEGKTFYVLPNDDTLRVEAFEYYHTTDPSFLGRYMSALNHTKKWKYPQVNGLTSIKWADNNCYLATALLTLQQIELKFNPPALQDAYYRARAGEAANFCALILAYCNKTVGELGDVRETMSYLFQHANLDSCKRVLNVVCKTCGQQQTTLKGVEAVMYMGTLSYEQFKKGVQIPCTCGKQATKYLVQQESPFVMMSAPPAQYELKHGTFTCASEYTGNYQCGHYKHITSKETLYCIDGALLTKSSEYKGPITDVFYKENSYTTTIKPVTYKLDGVVCTEIDPKLDNYYKKDNSYFTEQPIDLVPNQPYPNASFDNFKFVCDNIKFADDLNQLTGYKKPASRELKVTFFPDLNGDVVAIDYKHYTPSFKKGAKLLHKPIVWHVNNATNKATYKPNTWCIRCLWSTKPVETSNSFDVLKSEDAQGMDNLACEDLKPVSEEVVENPTIQKDVLECNVKTTEVVGDIILKPANNSLKITEEVGHTDLMAAYVDNSSLTIKKPNELSRVLGLKTLATHGLAAVNSVPWDTIANYAKPFLNKVVSTTTNIVTRCLNRVCTNYMPYFFTLLLQLCTFTRSTNSRIKASMPTTIAKNTVKSVGKFCLEASFNYLKSPNFSKLINIIIWFLLLSVCLGSLIYSTAALGVLMSNLGMPSYCTGYREGYLNSTNVTIATYCTGSIPCSVCLSGLDSLDTYPSLETIQITISSFKWDLTAFGLVAEWFLAYILFTRFFYVLGLAAIMQLFFSYFAVHFISNSWLMWLIINLVQMAPISAMVRMYIFFASFYYVWKSYVHVVDGCNSSTCMMCYKRNRATRVECTTIVNGVRRSFYVYANGGKGFCKLHNWNCVNCDTFCAGSTFISDEVARDLSLQFKRPINPTDQSSYIVDSVTVKNGSIHLYFDKAGQKTYERHSLSHFVNLDNLRANNTKGSLPINVIVFDGKSKCEESSAKSASVYYSQLMCQPILLLDQALVSDVGDSAEVAVKMFDAYVNTFSSTFNVPMEKLKTLVATAEAELAKNVSLDNVLSTFISAARQGFVDSDVETKDVVECLKLSHQSDIEVTGDSCNNYMLTYNKVENMTPRDLGACIDCSARHINAQVAKSHNIALIWNVKDFMSLSEQLRKQIRSAAKKNNLPFKLTCATTRQVVNVVTTKIALKGG

SEQ ID NO: 15805 - protein, 1946 aa, Artificial Sequence
  SARS-CoV-2__MT886334.1__non-structural protein 3 (NSP3)
MAPTKVTFGDDTVIEVQGYKSVNITFELDERIDKVLNEKCSAYTVELGTEVNEFACVVADAVIKTLQPVSELLTPLGIDLDEWSMATYYLFDESGEFKLASHMYCSFYPPDEDEEEGDCEEEEFEPSTQYEYGTEDDYQGKPLEFGATSAALQPEEEQEEDWLDDDSQQTVGQQDGSEDNQTTTIQTIVEVQPQLEMELTPVVQTIEVNSFSGYLKLTDNVYIKNADIVEEAKKVKPTVVVNAANVYLKHGGGVAGALNKATNNAMQVESDDYIATNGPLKVGGSCVLSGHNLAKHCLHVVGPNVNKGEDIQLLKSAYENFNQHEVLLAPLLSAGIFGADPIHSLRVCVDTVRTNVYLAVFDKNLYDKLVSSFLEMKSEKQVEQKIAEIPKEEVKPFITESKPSVEQRKQDDKKIKACVEEVTTTLEETKFLTENLLLYIDINGNLHPDSATLVSDIDITFLKKDAPYIVGDVVQEGVLTAVVIPTKKAGGTTEMLAKALRKVPTDNYITTYPGQGLNGYTVEEAKTVLKKCKSAFYILPSIISNEKQEILGTVSWNLREMLAHAEETRKLMPVCVETKAIVSTIQRKYKGIKIQEGVVDYGARFYFYTSKTTVASLINTLNDLNETLVTMPLGYVTHGLNLEEAARYMRSLKVPATVSVSSPDAVTAYNGYLTSSSKTPEEHFIETISLAGSYKDWSYSGQSTQLGIEFLKRGDKSVYYTSNPTTFHLDGEVITFDNLKTLLSLREVRTIKVFTTVDNINLHTQVVDMSMTYGQQFGPTYLDGADVTKIKPHNSHEGKTFYVLPNDDTLRVEAFEYYHTTDPSFLGRYMSALNHTKKWKYPQVNGLTSIKWADNNCYLATALLTLQQIELKFNPPALQDAYYRARAGEAANFCALILAYCNKTVGELGDVRETMSYLFQHANLDSCKRVLNVVCKTCGQQQTTLKGVEAVMYMGTLSYEQFKKGVQIPCTCGKQATKYLVQQESPFVMMSAPPAQYELKHGTFTCASEYTGNYQCGHYKHITSKETLYCIDGALLTKSSEYKGPITDVFYKENSYTTTIKPVTYKLDGVVCTEIDPKLDNYYKKDNSYFTEQPIDLVPNQPYPNASFDNFKFVCDNIKFADDLNQLTGYKKPASRELKVTFFPDLNGDVVAIDYKHYTPSFKKGAKLLHKPIVWHVNNATNKATYKPNTWCIRCLWSTKPVETSNSFDVLKSEDAQGMDNLACEDLKPVSEEVVENPTIQKDVLECNVKTTEVVGDIILKPANNSLKITEEVGHTDLMAAYVDNSSLTIKKPNELSRVLGLKTLATHGLAAVNSVPWDTIANYAKPFLNKVVSTTTNIVTRCLNRVCTNYMPYFFTLLLQLCTFTRSTNSRIKASMPTTIAKNTVKSVGKFCLEASFNYLKSPNFSKLINIIIWFLLLSVCLGSLIYSTAALGVLMSNLGMPSYCTGYREGYLNSTNVTIATYCTGSIPCSVCLSGLDSLDTYPSLETIQITISSFKWDLTAFGLVAEWFLAYILFTRFFYVLGLAAIMQLFFSYFAVHFISNSWLMWLIINLVQMAPISAMVRMYIFFASFYYVWKSYVHVVDGCNSSTCMMCYKRNRATRVECTTIVNGVRRSFYVYANGGKGFCKLHNWNCVNCDTFCAGSTFISDEVARDLSLQFKRPINPTDQSSYIVDSVTVKNGSIHLYFDKAGQKTYERHSLSHFVNLDNLRANNTKGSLPINVIVFDGKSKCEESSAKSASVYYSQLMCQPILLLDQALVSDVGDSAEVAVKMFDAYVNTFSSTFNVPMEKLKTLFATAEAELAKNVSLDNVLSTFISAARQGFVDSDVETKDVVECLKLSHQSDIEVTGDSCNNYMLTYNKVENMTPRDLGACIDCSARHINAQVAKSHNIALIWNVKDFMSLSEQLRKQIRSAAKKNNLPFKLTCATTRQVVNVVTTKIALKGG

SEQ ID NO: 15806 - protein, 1946 aa, Artificial Sequence
  SARS-CoV-2__MT886345.1__non-structural protein 3 (NSP3)
MAPTKVTFGDDTVIEVQGYKSVNITFELDERIDKVLNEKCSAYTVELGTEVNEFACVVADAVIKTLQPVSELLTPLGIDLDEWSMATYYLFDESGEFKLASHMYCSFYPPDEDEEEGDCEEEEFEPSTQYEYGTEDDYQGKPLEFGATSAALQPEEEQEEDWLDDDSQQTVGQQDGSEDNQTTTIQTIVEVQPQLEMELTPVVQTIEVNSFSGYLKLTDNVYIKNADIVEEAKKVKPTVVVNAANVYLKHGGGVAGALNKATNNAMQVESDDYIATNGPLKVGGSCVLSGHNLAKHCLHVVGPNVNKGEDIQLLKSAYENFNQHEVLLAPLLSAGIFGADPIHSLRVCVDTVRTNVYLAVFDKNLYDKLVSSFLEMKSEKQVEQKIAEIPKEEVKPFITESKPSVEQRKQDDKKIKACVEEVTTTLEETKFLTENLLLYIDINGNLHPDSATLVSDIDITFLKKDAPYIVGDVVQEGVLTAVVIPTKKAGGTTEMLAKALRKVPTDNYITTYPGQGLNGYTVEEAKTVLKKCKSAFYILPSIISNEKQEILGTVSWNLREMLAHAEETRKLMPVCVETKAIVSTIQRKYKGIKIQEGVVDYGARFYFYTSKTTVASLINTLNDLNETLVTMPLGYVTHGLNLEEAARYMRSLKVPATVSVSSPDAVTAYNGYLTSSSKTPEEHFIETISLAGSYKDWSYSGQSTQLGIEFLKRGDKSVYYTSNPTTFHLDGEVITFDNLKTLLSLREVRTIKVFTTVDNINLHTQVVDMSMTYGQQFGPTYLDGADVTKIKPHNSHEGKTFYVLPNDDTLRVEAFEYYHTTDPSFLGRYMSALNHTKKWKYPQVNGLTSIKWADNNCYLATALLTLQQIELKFNPPALQDAYYRARAGEAANFCALILAYCNKTVGELGDVRETMSYLFQHANLDSCKRVLNVVCKTCGQQQTTLKGVEAVMYMGTLSYEQFKKGVQIPCTCGKQATKYLVQQESPFVMMSAPPAQYELKHGTFTCASEYTGNYQCGHYKHITSKETLYCIDGALLTKSSEYKGPITDVFYKENSYTTTIKPVTYKLDGVVCTEIDPKLDNYYKKDNSYFTEQPIDLVPNQPYPNASFDNFKFVCDNIKFADDLNQLTGYKKPASRELKVTFFPDLNGDVVAIDYKHYTPSFKKGAKLLHKPIVWHVNNATNKATYKPNTWCIRCLWSTKPVETSNSFDVLKSEDAQGMDNLACEDLKPVSEEVVENPTIQKDVLECNVKTTEVVGDIILKPANNSLKITEEVGHTDLMAAYVDNSSLTIKKPNELSRVLGLKTLATHGLAAVNSVPWDTIANYAKPFLNKVVSTTTNIVTRCLNRVCTNYMPYFFTLLLQLCTFTRSTNSRIKASMPTTIAKNTVNSVGKFCLEASFNYLKSPNFSKLINIIIWFLLLSVCLGSLIYSTAALGVLMSNLGMPSYCTGYREGYLNSTNVTIATYCTGSIPCSVCLSGLDSLDTYPSLETIQITISSFKWDLTAFGLVAEWFLAYILFTRFFYVLGLAAIMQLFFSYFAVHFISNSWLMWLIINLVQMAPISAMVRMYIFFASFYYVWKSYVHVVDGCNSSTCMMCYKRNRATRVECTTIVNGVRRSFYVYANGGKGFCKLHNWNCVNCDTFCAGSTFISDEVARDLSLQFKRPINPTDQSSYIVDSVTVKNGSIHLYFDKAGQKTYERHSLSHFVNLDNLRANNTKGSLPINVIVFDGKSKCEESSAKSASVYYSQLMCQPILLLDQALVSDVGDSAEVAVKMFDAYVNTFSSTFNVPMEKLKTLVATAEAELAKNVSLDNVLSTFISAARQGFVDSDVETKDVVECLKLSHQSDIEVTGDSCNNYMLTYNKVENMTPRDLGACIDCSARHINAQVAKSHNIALIWNVKDFMSLSEQLRKQIRSAAKKNNLPFKLTCATTRQVVNVVTTKIALKGG

SEQ ID NO: 15807 - protein, 1946 aa, Artificial Sequence
  SARS-CoV-2__MT886363.1__non-structural protein 3 (NSP3)
MAPTKVTFGDDTVIEVQGYKSVNITFELDERIDKVLNEKCSAYTVELGTEVNEFACVVADAVIKTLQPVSELLTPLGIDLDEWSMATYYLFDESGEFKLASHMYCSFYPPDEDEEEGDCEEEEFEPSTQYEYGTEDDYQGKPLEFGATSAALQPEEEQEEDWLDDDSQQTVGQQDGSEDNQTTTIQTIVEVQPQLEMELTPVVQTIEVNSFSGYLKLTDNVYIKNADIVEEAKKVKPTVVVNAANVYLKHGGGVAGALNKATNNAMQVESDDYIATNGPLKVGGSCVLSGHNLAKHCLHVVGPNVNKGEDIQLLKSAYENFNQHEVLLAPLLSAGIFGADPIHSLRVCVDTVRTNVYLAVFDKNLYDKLVSSFLEMKSEKQVEQKIAEIPKEEVKPFITESKPSVEQRKQDDKKIKACVEEVTTTLEETKFLTENLLLYIDINGNLHPDSATLVSDIDITFLKKDAPYIVGDVVQEGVLTAVVIPTKKAGGTTEMLAKALRKVPTDNYITTYPGQGLNGYTVEEAKTVLKKCKSAFYILPSIISNEKQEILGTVSWNLREMLAHAEETRKLMPVCVETKAIVSTIQRKYKGIKIQEGVVDYGARFYFYTSKTTVASLINTLNDLNETLVTMPLGYVTHGLNLEEAARYMRSLKVPATVSVSSPDAVTAYNGYLTSSSKTPEEHFIETISLAGSYKDWSYSGQSTQLGIEFLKRGDKSVYYTSNPTTFHLDGEVITFDNLKTLLSLREVRTIKVFTTVDNINLHTQVVDMSMTYGQQFGPTYLDGADVTKIKPHNSHEGKTFYVLPNDDTLRVEAFEYYHTTDPSFLGRYMSALNHTKKWKYPQVNGLTSIKWADNNCYLATALLTLQQIELKFNPPALQDAYYRARAGEAANFCALILAYCNKTVGELGDVRETMSYLFQHANLDSCKRVLNVVCKTCGQQQTTLKGVEAVMYMGTLSYEQFKKGVQIPCTCGKQATKYLVQQESPFVMMSAPPAQYELKHGTFTCASEYTGNYQCGHYKHITSKETLYCIDGALLTKSSEYKGPITDVFYKENSYTTTIKPVTYKLDGVVCTEIDPKLDNYYKKDNSYFTEQPIDLVPNQPYPNASFDNFKFVCDNIKFADDLNQLTGYKKPASRELKVTFFPDLNGDVVAIDYKHYTPSFKKGAKLLHKPIVWHVNNATNKATYKPNTWCIRCLWSTKPVETSNSFDVLKSEDAQGMDNLACEDLKPVSEEVVENPTIQKDVLECNVKTTEVVGDIILKPANNSLKITEEVGHTDLMAVYVDNSSLTIKKPNELSRVLGLKTLATHGLAAVNSVPWDTIANYAKPFLNKVVSTTTNIVTRCLNRVCTNYMPYFFTLLLQLCTFTRSTNSRIKASMPTTIAKNTVKSVGKFCLEASFNYLKSPNFSKLINIIIWFLLLSVCLGSLIYSTAALGVLMSNLGMPSYCTGYREGYLNSTNVTIATYCTGSIPCSVCLSGLDSLDTYPSLETIQITISSFKWDLTAFGLVAEWFLAYILFTRFFYVLGLAAIMQLFFSYFAVHFISNSWLMWLIINLVQMAPISAMVRMYIFFASFYYVWKSYVHVVDGCNSSTCMMCYKRNRATRVECTTIVNGVRRSFYVYANGGKGFCKLHNWNCVNCDTFCAGSTFISDEVARDLSLQFKRPINPTDQSSYIVDSVTVKNGSIHLYFDKAGQKTYERHSLSHFVNLDNLRANNTKGSLPINVIVFDGKSKCEESSAKSASVYYSQLMCQPILLLDQALVSDVGDSAEVAVKMFDAYVNTFSSTFNVPMEKLKTLVATAEAELAKNVSLDNVLSTFISAARQGFVDSDVETKDVVECLKLSHQSDIEVTGDSCNNYMLTYNKVENMTPRDLGACIDCSARHINAQVAKSHNIALIWNVKDFMSLSEQLRKQIRSAAKKNNLPFKLTCATTRQVVNVVTTKIALKGG

SEQ ID NO: 15808 - protein, 1946 aa, Artificial Sequence
  SARS-CoV-2__MT886381.1__non-structural protein 3 (NSP3)
MAPTKVTFGDDTVIEVQGYKSVNITFELDERIDKVLNEKCSAYTVELGTEVNEFACVVADAVIKTLQPVSELLTPLGIDLDEWSMATYYLFDESGEFKLASHMYCSFYPPDEDEEEGDCEEEEFEPSTQYEYGTEDDYQGKPLEFGATSAALQPEEEQEEDWLDDDSQQTVGQQDGSEDNQTTTIQTIVEVQPQLEMELTSVVQTIEVNSFSGYLKLTDNVYIKNADIVEEAKKVKPTVVVNAANVYLKHGGGVAGALNKATNNAMQVESDDYIATNGPLKVGGSCVLSGHNLAKHCLHVVGPNVNKGEDIQLLKSAYENFNQHEVLLAPLLSAGIFGADPIHSLRVCVDTVRTNVYLAVFDKNLYDKLVSSFLEMKSEKQVEQKIAEIPKEEVKPFITESKPSVEQRKQDDKKIKACVEEVTTTLEETKFLTENLLLYIDINGNLHPDSATLVSDIDITFLKKDAPYIVGDVVQEGVLTAVVIPTKKAGGTTEMLAKALRKVPTDNYITTYPGQGLNGYTVEEAKTVLKKCKSAFYILPSIISNEKQEILGTVSWNLREMLAHAEETRKLMPVCVETKAIVSTIQRKYKGIKIQEGVVDYGARFYFYTSKTTVASLINTLNDLNETLVTMPLGYVTHGLNLEEAARYMRSLKVPATVSVSSPDAVTAYNGYLTSSSKTPEEHFIETISLAGSYKDWSYSGQSTQLGIEFLKRGDKSVYYTSNPTTFHLDGEVITFDNLKTLLSLREVRTIKVFTTVDNINLHTQVVDMSMTYGQQFGPTYLDGADVTKIKPHNSHEGKTFYVLPNDDTLRVEAFEYYHTTDPSFLGRYMSALNHTKKWKYPQVNGLTSIKWADNNCYLATALLTLQQIELKFNPPALQDAYYRARAGEAANFCALILAYCNKTVGELGDVRETMSYLFQHANLDSCKRVLNVVCKTCGQQQTTLKGVEAVMYMGTLSYEQFKKGVQIPCTCGKQATKYLVQQESPFVMMSAPPAQYELKHGTFTCASEYTGNYQCGHYKHITSKETLYCIDGALLTKSSEYKGPITDVFYKENSYTTTIKPVTYKLDGVVCTEIDPKLDNYYKKDNSYFTEQPIDLVPNQPYPNASFDNFKFVCDNIKFADDLNQLTGYKKPASRELKVTFFPDLNGDVVAIDYKHYTPSFKKGAKLLHKPIVWHVNNATNKATYKPNTWCIRCLWSTKPVETSNSFDVLKSEDAQGMDNLACEDLKPVSEEVVENPTIQKDVLECNVKTTEVVGDIILKPANNSLKITEEVGHTDLMAAYVDNSSLTIKKPNELSRVLGLKTLATHGLAAVNSVPWDTIANYAKPFLNKVVSTTTNIVTRCLNRVCTNYMPYFFTLLLQLCTFTRSTNSRIKASMPTTIAKNTVKSVGKFCLEASFNYLKSPNFSKLINIIIWFLLLSVCLGSLIYSTAALGVLMSNLGMPSYCTGYREGYLNSTNVTIATYCTGSIPCSVCLSGLDSLDTYPSLETIQITISSFKWDLTAFGLVAEWFLAYILFTRFFYVLGLAAIMQLFFSYFAVHFISNSWLMWLIINLVQMAPISAMVRMYIFFASFYYVWKSYVHVVDGCNSSTCMMCYKRNRATRVECTTIVNGVRRSFYVYANGGKGFCKLHNWNCVNCDTFCAGSTFISDEVARDLSLQFKRPINPTDQSSYIVDSVTVKNGSIHLYFDKAGQKTYERHSLSHFVNLDNLRANNTKGSLPINVIVFDGKSKCEESSAKSASVYYSQLMCQPILLLDQALVSDVGDSAEVAVKMFDAYVNTFSSTFNVPMEKLKTLVATAEAELAKNVSLDNVLSTFISAARQGFVDSDVETKDVVECLKLSHQSDIEVTGDSCNNYMLTYNKVENMTPRDLGACIDCSARHINAQVAKSHNIALIWNVKDFMSLSEQLRKQIRSAAKKNNLPFKLTCATTRQVVNVVTTKIALKGG

SEQ ID NO: 15809 - protein, 1946 aa, Artificial Sequence
  SARS-CoV-2__MT879619.1__non-structural protein 3 (NSP3)
MAPTKVTFGDDTVIEVQGYKSVNITFELDERIDKVLNEKCSAYTVELGTEVNEFACVVADAVIKTLQPVSELLTPLGIDLDEWSMATYYLFDESGEFKLASHMYCSFYPPDEDEEEGDCEEEEFEPSTQYEYGTEDDYQGKPLEFGATSAALQPEEEQEEDWLDDDSQQTVGQQDGSEDNQTTTIQTIVEVQPQLEMELTPVVQTIEVNSFSGYLKLTDNVYIKNADIVEEAKKVKPTVVVNAANVYLKHGGGVAGALNKATNNAMQVESDDYIATNGPLKVGGSCVLSGHNLAKHCLHVVGPNVNKGEDIQLLKSAYENFNQHEVLLAPLLSAGIFGADPIHSLRVCVDTVRTNVYLAVFDKNLYDKLVSSFLEMKSEKQVEQKIAEIPKEEVKPFITESKPSVEQRKQDDKKIKACVEEVTTTLEETKFLTENLLLYIDINGNLHPDSATLVSDIDITFLKKDAPYIVGDVVQEGVLTAVVIPTKKAGGTTEMLAKALRKVPTDNYITTYPGQGLNGYTVEEAKTVLKKCKSAFYILPSIISNEKQEILGTVSWNLREMLAHAEETRKLMPVCVETKAIVSTIQRKYKGIKIQEGVVDYGARFYFYTSKTTVASLINTLNDLNETLVTMPLGYVTHGLNLEEAARYMRSLKVPATVSVSSPDAVTAYNGYLTSSSKTPEEHFIETISLAGSYKDWSYSGQSTQLGIEFLKRGDKSVYYTSNPTTFHLDGEVITFDNLKTLLSLREVRTIKVFTTVDNINLHTQVVDMSMTYGQQFGPTYLDGADVTKIKPHNSHEGKTFYVLPNDDTLRVEAFEYYHTTDPSFLGRYMSALNHTKKWKYPQVNGLTSIKWADNNCYLATALLTLQQIELKFNPPALQDAYYRARAGEAANFCALILAYCNKTVGELGDVRETMSYLFQHANLDSCKRVLNVVCKTCGQQQTTLKGVEAVMYMGTLSYEQFKKGVQIPCTCGKQATKYLVQQESPFVMMSAPPAQYELKHGTFTCASEYTGNYQCGHYKHITSKETLYCIDGALLTKSSEYKGPITDVFYKENSYTTTIKPVTYKLDGVVCTEIDPKLDNYYKKDNSYFTEQPIDLVPNQPYPNASFDNFKFVCDNIKFADDLNQLTGYKKPASRELKVTFFPDLNGDVVAIDYKHYTPSFKKGAKLLHKPIVWHVNNATNKATYKPNTWCIRCLWSTKPVETSNSFDVLKSEDAQGMDNLACEDLKPVSEEVVENPTIQKDVLECNVKTTEVVGDIILKPANNSLKITEEVGHTDLMAAYVDNSSLTIKKPNELSRVLGLKTLATHGLAAVNSVPWDTIANYAKPFLNKVVSTTTNIVTRCLNRVCTNYMPYFFTLLLQLCTFTRSTNSRIKASMPTTIAKNTVKSVGKFCLEASFNYLKSPNFSKLINIIIWFLLLSVCLGSLIYSTAALGVLMSNLGMPSYCTGYREGYLNSTNVTIATYCTGSIPCSVCLSGLDSLDTYPSLETIQITISSFKWDLTAFGLVAEWFLAYILFTRFFYVLGLAAIMQLFFSYFAVHFISNSWLMWLIINLVQMAPISAMVRMYIFFASFYYVWKSYVHVVDGCNSSTCMMCYKRNRATRVECTTIVNGVRRSFYVYANGGKGFCKLHNWNCVNCDTFCAGSTFISDEVARDLSLQFKRPINPTDQSSYIVDSVTVKNGSIHLYFDKAGQKTYERHSLSHFVNLDNLRANNTKGSLPINVIVFDGKSKCEESSAKSASVYYSQLMCQPILLLDQALVSDVGDSAEVAVKMFDAYVNTFSSTFNVPMEKLKTLVATAEAELAKNVSLDNVLSTFISAARQGFVDSDVETKDVVECLKLSHQSDIEVTGDSCNNYMLTYNKVENMTPRDLGACIDCSARHINAHVAKSHNIALIWNVKDFMSLSEQLRKQIRSAAKKNNLPFKLTCATTRQVVNVVTTKIALKGG

SEQ ID NO: 15810 - protein, 1946 aa, Artificial Sequence
  SARS-CoV-2__MT880873.1__non-structural protein 3 (NSP3)
MAPTKVTFGDDTVIEVQGYKSVNITFELDERIDKVLNEKCSAYTVELGTEVNEFACVVADAVIKTLQPVSELLTPLGIDLDEWSMATYYLFDESGEFKLASHMYCSFYPPDEDEEEGDCEEEEFEPSTQYEYGTEDDYQGKPLEFGATSAALQPEEEQEEDWLDDDSQQTVGQQDGSEDNQTTTIQTIVEVQPQLEMELTPVVQTIEVNSFSGYLKLTDNVYIKNADIVEEAKKVKPTVVVNAANVYLKHGGGVAGALNKATNNAMQVESDDYIATNGPLKVGGSCVLSGHNLAKHCLHVVGPNVNKGEDIQLLKSAYENFNQHEVLLAPLLSAGIFGADPIHSLRVCVDTVRTNVYLAVFDKNLYDKLVSSFLEMKSEKQVEQKIAEIPKEEVKPFITESKPSVEQRKQDDKKIKACVEEVTTTLEETKFLTENLLLYIDINGNLHPDSATLVSDIDITFLKKDAPYIVGDVVQEGVLTAVVIPTKKAGGTTEMLAKALRKVPTDNYITTYPGQGLNGYTVEEAKTVLKKCKSAFYILPSIISNEKQEILGTVSWNLREMLAHAEETRKLMPVCVETKAIVSTIQRKYKGIKIQEGVVDYGARFYFYTSKTTVASLINTLNDLNETLVTMPLGYVTHGLNLEEAARYMRSLKVPATVSVSSPDAVTAYNGYLTSSSKTPEEHFIETISLAGSYKDWSYSGQSTQLGIEFLKRGDKSVYYTSNPTTFHLDGEVITFDNLKTLLSLREVRTIKVFTTVDNINLHTQVVDMSMTYGQQFGPTYLDGADVTKIKPHNSHEGKTFYVLPNDDTLRVEAFEYYHTTDPSFLGRYMSALNHTKKWKYPQVNGLTSIKWADNNCYLATALLTLQQIELKFNPPALQDAYYRARAGEAANFCALILAYCNKTVGELGDVRETMSYLFQHANLDSCKRVLNVVCKTCGQQQTTLKGVEAVMYMGTLSYEQFKKGVQIPCTCGKQATKYLVQQESPFVMMSAPPAQYELKHGTFTCASEYTGNYQCGHYKHITSKETLYCIDGALLTKSSEYKGPITDVFYKENSYTTTIKPVTYKLDGVVCTEIDPKLDNYYKKDNSYFTEQPIDLVPNQPYPNASFDNFKFVCDNIKFADDLNQLTGYKKPASRELKVTFFPDLNGDVVAIDYKHYTPSFKKGAKLLHKPIVWHVNNATNKATYKPNTWCIRCLWSTKPVETSNSFDVLKSEDAQGMDNLACEDLKPVSEEVVENPTIQKDVLECNVKTTEVVGDIILKPANNSLKITEEVGHTDLMAAYVDNSSLTIKKPNELSRVLGLKTLATHGLAAVNSVPWDTIANYAKPFLNKVVSTTTNIVTRCLNRVCTNYMPYFFTLLLQLCTFTRSTNSRIKASMPTTIAKNTVKSVGKFCLEASFNYLKSPNFSKLINIIIWFLLLSVCLGSLIYSTAALGVLMSNLGMPSYCTGYREGYLNSTNVTIATYCTGSIPCSVCLSGLDSLDTYPSLETIQITISSFKWDLTAFGLVAEWFLAYILFTRFFYVLGLAAIMQLFFSYFAVHFISNSWLMWLIINLVQMAPISAMVRMYIFFASFYYVWKSYVHVVDGCNSSTCMMCYKRNRATRVECTTIVNGVRRSFYVYANGGKGFCKLHNWNCVNCDTFCAGSTFISDEVARDLSLQFKRPINPTDQSSYIVDSVTVKNGSIHLYFDKAGQKTYERHSLSHFVNLDNLRANNTKGSLPINVIVFDGKSKCEESSARSASVYYSQLMCQPILLLDQALVSDVGDSAEVAVKMFDAYVNTFSSTFNVPMEKLKTLVATAEAELAKNVSLDNVLSTFISAARQGFVDSDVETKDVVECLKLSHQSDIEVTGDSCNNYMLTYNKVENMTPRDLGACIDCSARHINAQVAKSHNIALIWNVKDFMSLSEQLRKQIRSAAKKNNLPFKLTCATTRQVVNVVTTKIALKGG

SEQ ID NO: 15811 - protein, 1946 aa, Artificial Sequence
  SARS-CoV-2__MT880876.1__non-structural protein 3 (NSP3)
MAPTKVTFGDDTVIEVQGYKSVNITFELDERIDKVLNEKCSAYTVELGTEVNEFACVVADAVIKTLQPVSELLTPLGIDLDEWSMATYYLFDESGEFKLASHMYCSFYPPDEDEEEGDCEEEEFEPSTQYEYGTEDDYQGKPLEFGATSAALQPEEEQEEDWLDDDSQQTVGQQDGSEDNQTTTIQTIVEVQPQLEMELTPVVQTIEVNSFSGYLKLTDNVYIKNADIVEEAKKVKPTVVVNAANVYLKHGGGVAGALNKATNNAMQVESDDYIATNGPLKVGGSCVLSGHNLAKHCLHVVGPNVNKGEDIQLLNSAYENFNQHEVLLAPLLSAGIFGADPIHSLRVCVDTVRTNVYLAVFDKNLYDKLVSSFLEMKSEKQVEQKIAEIPKEEVKPFITESKPSVEQRKQDDKKIKACVEEVTTTLEETKFLTENLLLYIDINGNLHPDSATLVSDIDITFLKKDAPYIVGDVVQEGVLTAVVIPTKKAGGTTEMLAKALRKVPTDNYITTYPGQGLNGYTVEEAKTVLKKCKSAFYILPSIISNEKQEILGTVSWNLREMLAHAEETRKLMPVCVETKAIVSTIQRKYKGIKIQEGVVDYGARFYFYTSKTTVASLINTLNDLNETLVTMPLGYVTHGLNLEEAARYMRSLKVPATVSVSSPDAVTAYNGYLTSSSKTPEEHFIETISLAGSYKDWSYSGQSTQLGIEFLKRGDKSVYYTSNPTTFHLDGEVITFDNLKTLLSLREVRTIKVFTTVDNINLHTQVVDMSMTYGQQFGPTYLDGADVTKIKPHNSHEGKTFYVLPNDDTLRVEAFEYYHTTDPSFLGRYMSALNHTKKWKYPQVNGLTSIKWADNNCYLATALLTLQQIELKFNPPALQDAYYRARAGEAANFCALILAYCNKTVGELGDVRETMSYLFQHANLDSCKRVLNVVCKTCGQQQTTLKGVEAVMYMGTLSYEQFKKGVQIPCTCGKQATKYLVQQESPFVMMSAPPAQYELKHGTFTCASEYTGNYQCGHYKHITSKETLYCIDGALLTKSSEYKGPITDVFYKENSYTTTIKPVTYKLDGVVCTEIDPKLDNYYKKDNSYFTEQPIDLVPNQPYPNASFDNFKFVCDNIKFADDLNQLTGYKKPASRELKVTFFPDLNGDVVAIDYKHYTPSFKKGAKLLHKPIVWHVNNATNKATYKPNTWCIRCLWSTKPVETSNSFDVLKSEDAQGMDNLACEDLKPVSEEVVENPTIQKDVLECNVKTTEVVGDIILKPANNSLKITEEVGHTDLMAAYVDNSSLTIKKPNELSRVLGLKTLATHGLAAVNSVPWDTIANYAKPFLNKVVSTTTNIVTRCLNRVCTNYMPYFFTLLLQLCTFTRSTNSRIKASMPTTIAKNTVKSVGKFCLEASFNYLKSPNFSKLINIIIWFLLLSVCLGSLIYSTAALGVLMSNLGMPSYCTGYREGYLNSTNVTIATYCTGSIPCSVCLSGLDSLDTYPSLETIQITISSFKWDLTAFGLVAEWFLAYILFTRFFYVLGLAAIMQLFFSYFAVHFISNSWLMWLIINLVQMAPISAMVRMYIFFASFYYVWKSYVHVVDGCNSSTCMMCYKRNRATRVECTTIVNGVRRSFYVYANGGKGFCKLHNWNCVNCDTFCAGSTFISDEVARDLSLQFKRPINPTDQSSYIVDSVTVKNGSIHLYFDKAGQKTYERHSLSHFVNLDNLRANNTKGSLPINVIVFDGKSKCEESSARSASVYYSQLMCQPILLLDQALVSDVGDSAEVAVKMFDAYVNTFSSTFNVPMEKLKTLVATAEAELAKNVSLDNVLSTFISAARQGFVDSDVETKDVVECLKLSHQSDIEVTGDSCNNYMLTYNKVENMTPRDLGACIDCSARHINAQVAKSHNIALIWNVKDFMSLSEQLRKQIRSAAKKNNLPFKLTCATTRQVVNVVTTKIALKGG

SEQ ID NO: 15812 - protein, 1946 aa, Artificial Sequence
  SARS-CoV-2__MT873050.1__non-structural protein 3 (NSP3)
MAPTKVTFGDDTVIEVQGYKSVNITFELDERIDKVLNEKCSAYTVELGTEVNEFACVVADAVIKTLQPVSELLTPLGIDLDEWSMATYYLFDESGEFKLASHMYCSFYPPDEDEEEGDCEEEEFEPSTQYEYGTEDDYQGKPLEFGATSAALQPEEEQEEDWLDDDSQQTVGQQDGSEDNQTTTIQTIVEVQPQLEMELTPVVQTIEVNSFSGYLKLTDNVYIKNADIVEEAKKVKPTVVVNAANVYLKHGGGVAGALNKATNNAMQVESDDYIATNGPLKVGGSCVLSGHNLAKHCLHVVGPNVNKGEDIQLLKSAYENFNQHEVLLAPLLSAGIFGADPIHSLRVCVDTVRTNVYLAVFDKNLYDKLVSSFLEMKSEKQVEQKIAEILKEEVKPFITESKPSVEQRKQDDKKIKACVEEVTTTLEETKFLTENLLLYIDINGNLHPDSATLVSDIDITFLKKDAPYIVGDVVQEGVLTAVVIPTKKAGGTTEMLAKALRKVPTDNYITTYPGQGLNGYTVEEAKTVLKKCKSAFYILPSIISNEKQEILGTVSWNLREMLAHAEETRKLMPVCVETKAIVSTIQRKYKGIKIQEGVVDYGARFYFYTSKTTVASLINTLNDLNETLVTMPLGYVTHGLNLEEAARYMRSLKVPATVSVSSPDAVTAYNGYLTSSSKTPEEHFIETISLAGSYKDWSYSGQSTQLGIEFLKRGDKSVYYTSNPTTFHLDGEVITFDNLKTLLSLREVRTIKVFTTVDNINLHTQVVDMSMTYGQQFGPTYLDGADVTKIKPHNSHEGKTFYVLPNDDTLRVEAFEYYHTTDPSFLGRYMSALNHTKKWKYPQVNGLTSIKWADNNCYLATALLTLQQIELKFNPPALQDAYYRARAGEAANFCALILAYCNKTVGELGDVRETMSYLFQHANLDSCKRVLNVVCKTCGQQQTTLKGVEAVMYMGTLSYEQFKKGVQIPCTCGKQATKYLVQQESPFVMMSAPPAQYELKHGTFTCASEYTGNYQCGHYKHITSKETLYCIDGALLTKSSEYKGPITDVFYKENSYTTTIKPVTYKLDGVVCTEIDPKLDNYYKKDNSYFTEQPIDLVPNQPYPNASFDNFKFVCDNIKFADDLNQLTGYKKPASRELKVTFFPDLNGDVVAIDYKHYTPSFKKGAKLLHKPIVWHVNNATNKATYKPNTWCIRCLWSTKPVETSNSFDVLKSEDAQGMDNLACEDLKPVSEEVVENPTIQKDVLECNVKTTEVVGDIILKPANNSLKITEEVGHTDLMAAYVDNSSLTIKKPNELSRVLGLKTLATHGLAAVNSVPWDTIANYAKPFLNKVVSTTTNIVTRCLNRVCTNYMPYFFTLLLQLCTFTRSTNSRIKASMPTTIAKNTVKSVGKFCLEASFNYLKSPNFSKLINIIIWFLLLSVCLGSLIYSTAALGVLMSNLGMPSYCTGYREGYLNSTNVTIATYCTGSIPCSVCLSGLDSLDTYPSLETIQITISSFKWDLTAFGLVAEWFLAYILFTRFFYVLGLAAIMQLFFSYFAVHFISNSWLMWLIINLVQMAPISAMVRMYIFFASFYYVWKSYVHVVDGCNSSTCMMCYKRNRATRVECTTIVNGVRRSFYVYANGGKGFCKLHNWNCVNCDTFCAGSTFISDEVARDLSLQFKRPINPTDQSSYIVDSVTVKNGSIHLYFDKAGQKTYERHSLSHFVNLDNLRANNTKGSLPINVIVFDGKSKCEESSAKSASVYYSQLMCQPILLLDQALVSDVGDSAEVAVKMFDAYVNTFSSTFNVPMEKLKTLVATAEAELAKNVSLDNVLSTFISAARQGFVDSDVETKDVVECLKLSHQSDIEVTGDSCNNYMLTYNKVENMTPRDLGACIDCSARHINAQVAKSHNIALIWNVKDFMSLSEQLRKQIRSAAKKNNLPFKLTCATTRQVVNVVTTKIALKGG

SEQ ID NO: 15813 - protein, 1946 aa, Artificial Sequence
  SARS-CoV-2__MT873051.1__non-structural protein 3 (NSP3)
MAPTKVTFGDDTVIEVQGYKSVNITFELDERIDKVLNEKCSAYTVELGTEVNEFACVVADAVIKTLQPVSELLTPLGIDLDEWSMATYYLFDESGEFKLASHMYCSFYPPDEDEEEGDCEEEEFEPSTQYEYGTEDDYQGKPLEFGATSAALQPEEEQEEDWLDDDSQQTVGQQDGSEDNQTTTIQTIVEVQPQLEMELTPVVQTIEVNSFSGYLKLTDNVYIKNADIVEEAKKVKPTVVVNAANVYLKHGGGVAGALNKATNNAMQVESDDYIATNGPLKVGGSCVLSGHNLAKHCLHVVGPNVNKGEDIQLLKSAYENFNQHEVLLAPLLSAGIFGADPIHSLRVCVDTVRTNVYLAVFDKNLYDKLVSSFLEMKSEKQVEQKIAEIPKEEVKPFITESKPSVEQRKQDDKKIKACVEEVTTTLEETKFLTENLLLYIDINGNLHPDSATLVSDIDITFLKKDAPYIVGDVVQEGVLTAVVIPTKKAGGTTEMLAKALRKVPTDNYITTYPGQGLNGYTVEEAKTVLKKCKSAFYILPSIISNEKQEILGTVSWNLREMLAHAEETRKLMPVCVETKAIVSTIQRKYKGIKIQEGVVDYGARFYFYTSKTTVASLINTLNDLNETLVTMPLGYVTHGLNLEEAARYMRSLKVPATVSVSSPDAVTAYNGYLTSSSKTPEEHFIETISLAGSYKDWSYSGQSTQLGIEFLKRGDKSVYYTSNPTTFHLDGEVITFDNLKTLLSLREVRTIKVFTTVDNINLHTQVVDMSMTYGQQFGPTYLDGADVTKIKPHNSHEGKTFYVLPNDDTLRVEAFEYYHTTDPSFLGRYMSALNHTKKWKYPQVNGLTSIKWADNNCYLATALLTLQQIELKFNPPALQDAYYRARAGEAANFCALILAYCNKTVGELGDVRETMSYLFQHANLDSCKRVLNVVCKTCGQQQTTLKGVEAVMYMGTLSYEQFKKGVQIPCTCGKQATKYLVQQESPFVMMSAPPAQYELKHGTFTCASEYTGNYQCGHYKHITSKETLYCIDGALLTKSSEYKGPITDVFYKENSYTTTIKPVTYKLDGVVCTEIDPKLDNYYKKDNSYFTEQPIDLVPNQPYPNASFDNFKFVCDNIKFADDLNQLTGYKKPASRELKVTFFPDLNGDVVAIDYKHYTPSFKKGAKLLHKPIVWHVNNATNKATYKPNTWCIRCLWSTKPVETSNSFDVLKSEDAQGMDNLACEDLKPVSEEVVENPTIQKDVLECNVKTTEVVGDIILKPANNSLKITEEVGHTDLMAAYVDNSSLTIKKPNELSRVLGLKTLATHGLAAVNSVPWDTIANYAKPFLNKVVSTTTNIVTRCLNRVCTNYMPYFFTLLLQLCTFTRSTNSRIKASMPTTIAKNTVKSVGKFCLEASFNYLKSPNFSKLINIIIWFLLLSVCLGSLIYSTAALGVLMSNLGMPSYCTGYREGYLNSTNVTIATYCTGSIPCSVCLSGLDSLDTYPSLETIQITISSFKWDLTAFGLVAEWFLAYILFTRFFYVLGLAAIMQLFFSYFAVHFISNSWLMWLIINLVQMAPISAMVRMYIFFASFYYVWKSYVHVVDGCNSSTCMMCYKRNRATRVECTTIVNGVRRSFYVYANGGKGFCKLHNWNCVNCDTFCAGSTFISDEVARDLSLQFKRPINPTDQSSYIVDSVTVKNGSIHLYFDKAGQKTYERHSLSHFVNLDNLRANNTKGSLPINVIVFDGKSKCEESSAKSASVYYSQLMCQPILLLDQALVSDVGDSAEVAVKMFDAYVNTFSSTFNVPMEKLKTLVATAEAELAKNVSLDNVLSTFISAARQGFVDSDVETKDVVECLKLSHQSDIEVTGDSCNNYMLTYNKVENMTTRDLGACIDCSARHINAQVAKSHNIALIWNVKDFMSLSEQLRKQIRSAAKKNNLPFKLTCATTRQVVNVVTTKIALKGG

SEQ ID NO: 15814 - protein, 1946 aa, Artificial Sequence
  SARS-CoV-2__MT873064.1__non-structural protein 3 (NSP3)
MAPTKVTFGDDTVIEVQGYKSVNITFELDERIDKVLNEKCSAYTVELGTEVNEFACVVADAVIKTLQPVSELLTPLGIDLDEWSMATYYLFDESGEFKLASHMYCSFYPPDEDEEEGDCEEEEFEPSTQYEYGTEDDYQGKPLEFGATSAALQPEEEQEEDWLDDDSQQTVGQQDGSEDNQTTTIQTIVEVQPQLEMELTPVVQTIEVNSFSGYLKLTDNVYIKNADIVEEAKKVKPTVVVNAANVYLKHGGGVAGALNKATNNAMQVESDDYIATNGPLKVGGSCVLSGHNLAKHCLHVVGPNVNKGEDIQLLKSAYENFNQHEVLLAPLLSAGIFGADPIHSLRVCVDTVRTNVYLAVFDKNLYDKLVSSFLEMKSEKQVEQKIAEIPKEEVKPFITESKPSVEQRKQDDKKIKACVEEVTTTLEETKFLTENLLLYIDINGNLHPDSATLVSDIDITFLKKDAPYIVGDVVQEGVLTAVVIPTKKAGGTTEMLAKALRKVPTDNYITTYPGQGLNGYTVEEAKTVLKKCKSAFYILPSIISNEKQEILGTVSWNLREMLAHAEETRKLMPVCVETKAIVSTIQRKYKGIKIQEGVVDYGARFYFYTSKTTVASLINTLNDLNETLVTMPLGYVTHGLNLEEAARYMRSLKVPATVSVSSPDAVTAYNGYLTSSSKTPEEHFIETISLAGSYKDWSYSGQSTQLGIEFLKRGDKSVYYTSNPTTFHLDGEVITFDNLKTLLSLREVRTIKVFTTVDNINLHTQVVDMSMTYGQQFGPTYLDGADVTKIKPHNSHEGKTFYVLPNDDTLRVEAFEYYHTTDPSFLGRYMSALNHTKKWKYPQVNGLTSIKWADNNCYLATALLTLQQIELKFNPPALQDAYYRARAGEAANFCALILAYCNKTVGELGDVRETMSYLFQHANLDSCKRVLNVVCKTCGQQQTTLKGVEAVMYMGTLSYEQFKKGVQIPCTCGKQATKYLVQQESPFVMMSAPPAQYELKHGTFTCASEYTGNYQCGHYKHITSKETLYCIDGALLTKSSEYKGPITDVFYKENSYTTTIKPVTYKLDGVVCTEIDPKLDNYYKKDNSYFTEQPIDLVPNQPYPNASFDNFKFVCDNIKFADDLNQLTGYKKPASRELKVTFFPDLNGDVVAIDYKHYTPSFKKGAKLLHKPIVWHVNNATNKATYKPNTWCIRCLWSTKPFETSNSFDVLKSEDAQGMDNLACEDLKPVSEEVVENPTIQKDVLECNVKTTEVVGDIILKPANNSLKITEEVGHTDLMAAYVDNSSLTIKKPNELSRVLGLKTLATHGLAAVNSVPWDTIANYAKPFLNKVVSTTTNIVTRCLNRVCTNYMPYFFTLLLQLCTFTRSTNSRIKASMPTTIAKNTVKSVGKFCLEASFNYLKSPNFSKLINIIIWFLLLSVCLGSLIYSTAALGVLMSNLGMPSYCTGYREGYLNSTNVTIATYCTGSIPCSVCLSGLDSLDTYPSLETIQITISSFKWDLTAFGLVAEWFLAYILFTRFFYVLGLAAIMQLFFSYFAVHFISNSWLMWLIINLVQMAPISAMVRMYIFFASFYYVWKSYVHVVDGCNSSTCMMCYKRNRATRVECTTIVNGVRRSFYVYANGGKGFCKLHNWNCVNCDTFCAGSTFISDEVARDLSLQFKRPINPTDQSSYIVDSVTVKNGSIHLYFDKAGQKTYERHSLSHFVNLDNLRANNTKGSLPINVIVFDGKSKCEESSAKSASVYYSQLMCQPILLLDQALVSDVGDSAEVAVKMFDAYVNTFSSTFNVPMEKLKTLVATAEAELAKNVSLDNVLSTFISAARQGFVDSDVETKDVVECLKLSHQSDIEVTGDSCNNYMLTYNKVENMTPRDLGACIDCSARHINAQVAKSHNIALIWNVKDFMSLSEQLRKQIRSAAKKNNLPFKLTCATTRQVVNVVTTKIALKGG

SEQ ID NO: 15815 - protein, 1946 aa, Artificial Sequence
  SARS-CoV-2__MT873083.1__non-structural protein 3 (NSP3)
MAPTKVTFGDDTVIEVQGYKSVNITFELDERIDKVLNEKCSAYTVELGTEVNEFACVVADAVIKTLQPVSELLTPLGIDLDEWSMATYYLFDESGEFKLASHMYCSFYPPDEDEEEGDCEEEEFEPSTQYEYGTEDDYQGKPLEFGATSAALQPEEEQEEDWLDDDSQQTVGQQDGSEDNQTTTIQTIVEVQPQLEMELTPVVQTIEVNSFSGYLKLTDNVYIKNADIVEEAKKVKPTVVVNAANVYLKHGGGVAGALNKATNNAMQVESDDYIATNGPLKVGGSCVLSGHNLAKHCLHVVGPNVNKGEDIQLLKSAYENFNQHEVLLAPLLSAGIFGADPIHSLRVCVDTVRTNVYLAVFDKNLYDKLVSSFLEMKSEKQVEQKIAEIPKEEVKPFITESKPSVEQRKQDDKKIKACVEEVTTTLEETKFLTENLLLYIDINGNLHPDSATLVSDIDITFLKKDAPYIVGDVVQEGVLTAVVIPTKKAGGTTEMLAKALRKVPTDNYITTYPGQGLNGYTVEEAKTMLKKCKSAFYILPSIISNEKQEILGTVSWNLREMLAHAEETRKLMPVCVETKAIVSTIQRKYKGIKIQEGVVDYGARFYFYTSKTTVASLINTLNDLNETLVTMPLGYVTHGLNLEEAARYMRSLKVPATVSVSSPDAVTAYNGYLTSSSKTPEEHFIETISLAGSYKDWSYSGQSTQLGIEFLKRGDKSVYYTSNPTTFHLDGEVITFDNLKTLLSLREVRTIKVFTTVDNINLHTQVVDMSMTYGQQFGPTYLDGADVTKIKPHNSHEGKTFYVLPNDDTLRVEAFEYYHTTDPSFLGRYMSALNHTKKWKYPQVNGLTSIKWADNNCYLATALLTLQQIELKFNPPALQDAYYRARAGEAANFCALILAYCNKTVGELGDVRETMSYLFQHANLDSCKRVLNVVCKTCGQQQTTLKGVEAVMYMGTLSYEQFKKGVQIPCTCGKQATKYLVQQESPFVMMSAPPAQYELKHGTFTCASEYTGNYQCGHYKHITSKETLYCIDGALLTKSSEYKGPITDVFYKENSYTTTIKPVTYKLDGVVCTEIDPKLDNYYKKDNSYFTEQPIDLVPNQPYPNASFDNFKFVCDNIKFADDLNQLTGYKKPASRELKVTFFPDLNGDVVAIDYKHYTPSFKKGAKLLHKPIVWHVNNATNKATYKPNTWCIRCLWSTKPVETSNSFDVLKSEDAQGMDNLACEDLKPVSEEVVENPTIQKDVLECNVKTTEVVGDIILKPANNSLKITEEVGHTDLMAAYVDNSSLTIKKPNELSRVLGLKTLATHGLAAVNSVPWDTIANYAKPFLNKVVSTTTNIVTRCLNRVCTNYMPYFFTLLLQLCTFTRSTNSRIKASMPTTIAKNTVKSVGKFCLEASFNYLKSPNFSKLINIIIWFLLLSVCLGSLIYSTAALGVLMSNLGMPSYCTGYREGYLNSTNVTIATYCTGSIPCSVCLSGLDSLDTYPSLETIQITISSFKWDLTAFGLVAEWFLAYILFTRFFYVLGLAAIMQLFFSYFAVHFISNSWLMWLIINLVQMAPISAMVRMYIFFASFYYVWKSYVHVVDGCNSSTCMMCYKRNRATRVECTTIVNGVRRSFYVYANGGKGFCKLHNWNCVNCDTFCAGSTFISDEVARDLSLQFKRPINPTDQSSYIVDSVTVKNGSIHLYFDKAGQKTYERHSLSHFVNLDNLRANNTKGSLPINVIVFDGKSKCEESSAKSASVYYSQLMCQPILLLDQALVSDVGDSAEVAVKMFDAYVNTFSSTFNVPMEKLKTLVATAEAELAKNVSLDNVLSTFISAARQGFVDSDVETKDVVECLKLSHQSDIEVTGDSCNNYMLTYNKVENMTPRDLGACIDCSARHINAQVAKSHNIALIWNVKDFMSLSEQLRKQIRSAAKKNNLPFKLTCATTRQVVNVVTTKIALKGG

SEQ ID NO: 15816 - protein, 1946 aa, Artificial Sequence
  SARS-CoV-2__MT873098.1__non-structural protein 3 (NSP3)
MAPTKVTFGDDTVIEVQGYKSVNITFELDERIDKVLNEKCSAYTVELGTEVNEFACVVADAVIKTLQPVSELLTPLGIDLDEWSMATYYLFDESGEFKLASHMYCSFYPPDEDEEEGDCEEEEFEPSTQYEYGTEDDYQGKPLEFGATSAALQPEEEQEEDWLDDDSQQTVGQQDGSEDNQTTTIQTIVEVQPQLEMELTPVVQTIEVNSFSGYLKLTDNVYIKNADIVEEAKKVKPTVVVNAANVYLKHGGGVAGALNKATNNAMQVESDDYIATNGPLKVGGSCVLSGHNLAKHCLHVVGPNVNKGEDIQLLKSAYENFNQHEVLLAPLLSAGIFGADPIHSLRVCVDTVRTNVYLAVFDKNLYDKLVSSFLEMKSEKQVEQKIAEIPKEEVKPFITESKPSVEQRKQDDKKIKACVEEVTTTLEETKFLTENLLLYIDINGNLHPDSATLVSDIDITFLKKDAPYIVGDVVQEGVLTAVVIPTKKAGGTTEMLAKALRKVPTDNYITTYPGQGLNGYTVEEAKTVLKKCKSAFYILPSIISNEKQEILGTVSWNLREMLAHAEETRKLMPVCVETKAIVSTIQRKYKGIKIQEGVVDYGARFYFYTSKTTVASLINTLNDLNETLVTMPLGYVTHGLNLEEAARYMRSLKVPATVSVSSPDAVTAYNGYLTSSSKTPEEHFIETISLAGSYKDWSYSGQSTQLGIEFLKRGDKSVYYTSNPTTFHLDGEVITFDNLKTLLSLREVRTIKVFTTVDNINLHTQVVDMSMTYGQQFGPTYLDGADVTKIKPHNSHEGKTFYVLPNDDTLRVEAFEYYHTTDPSFLGRYMSALNHTKKWKYPQVNGLTSIKWADNNCYLATALLTLQQIELKFNPPALQDAYYRARAGEAANFCALILAYCNKTVGELGDVRETMSYLFQHANLDSCKRVLNVVCKTCGQQQTTLKGVEAVMYMGTLSYEQFKKGVQIPCTCGKQATKYLVQQESPFVMMSAPPAQYELKHGTFTCASEYTGNYQCGHYKHITSKETLYCIDGALLTKSSEYKGPITDVFYKENSYTTTIKPVTYKLDGVVCTEIDPKLDNYYKKDNSYFTEQPIDLVPNQPYPNASFDNFKFVCDNIKFADDLNQLTGYKKPASRELKVTFFPDLNGDVVAIDYKHYTPSFKKGAKLLHKPIVWHVNNATNKATYKPNTWCIRCLWSTKPVETSNSFDVLKSEDAQGMDNLACEDLKPVSEEVVENPTIQKDVLECNVKTTEVVGDIILKPANNSLKITEEVGHTDLMAAYVDNSSLTIKKPNELSRVLGLKTLATHGLAAVNSVPWDTIANYAKPFLNKVVSTTTNIVTRCLNRVCTNYMPYFFTLLLQLCTFTRSTNSRIKASMPTTIAKNTVKSVGKFCLEASFNYLKSPNFSKLINIIIWFLLLSVCLGSLIYSTAALGVLMSNLGMPSYCTGYREGYLNSTNVTIATYCTGSIPCSVCLSGLDSLDTYPSLETIQITISSFKWDLTAFGLVAEWFLAYILFTRFFYVLGLAAIMQLFFSYFAVHFISNSWLMWLIINLVQMAPISAMVRMYIFFASFYYVWKSYVHVVDGCNSSTCMMCYKRNRATRVECTTIVNGVRRSFYVYANGGKGFCKLHNWNCVNCDTFCAGSTFISDEVARDLSLQFKRPINPTDQSSYIVDSVTVKNGSIHLYFDKAGQKTYERHSLSHFVNLDNLRANNTKGSLPINVIVFDGKSKCEESSAKSASVYYSQLMCQPILLLDQALVSDVGDSAEVAVKMFDAYVNTFSSTFNVPMEKLKTLVATAEAELAKNVSLDNVLSTFISAARQGFVDSDVETKDVVECLKFSHQSDIEVTGDSCNNYMLTYNKVENMTPRDLGACIDCSARHINAQVAKSHNIALIWNVKDFMSLSEQLRKQIRSAAKKNNLPFKLTCATTRQVVNVVTTKIALKGG

SEQ ID NO: 15817 - protein, 1946 aa, Artificial Sequence
  SARS-CoV-2__MT873131.1__non-structural protein 3 (NSP3)
MAPTKVTFGDDTVIEVQGYKSVNITFELDERIDKVLNEKCSAYTVELGTEVNEFACVVADAVIKTLQPVSELLTPLGIDLDEWSMATYYLFDESGEFKLASHMYCSFYPPDEDEEEGDCEEEEFEPSTQYEYGTEDDYQGKPLEFGATSAALQPEEEQEEDWLDDDSQQTVGQQDGSEDNQTTTIQTIVEVQPQLEMELTPVVQTIEVNSFSGYLKLTDNVYIKNADIVEEAKKVKPTVVVNAANVYLKHGGGVAGALNKATNNAMQVESDDYIATNGPLKVGGSCVLSGHNLAKHCLHVVGPNVNKGEDIQLLKIAYENFNQHEVLLAPLLSAGIFGADPIHSLRVCVDTVRTNVYLAVFDKNLYDKLVSSFLEMKSEKQVEQKIAEIPKEEVKPFITESKPSVEQRKQDDKKIKACVEEVTTTLEETKFLTENLLLYIDINGNLHPDSATLVSDIDITFLKKDAPYIVGDVVQEGVLTAVVIPTKKAGGTTEMLAKALRKVPTDNYITTYPGQGLNGYTVEEAKTVLKKCKSAFYILPSIISNEKQEILGTVSWNLREMLAHAEETRKLMPVCVETKAIVSTIQRKYKGIKIQEGVVDYGARFYFYTSKTTVASLINTLNDLNETLVTMPLGYVTHGLNLEEAARYMRSLKVPATVSVSSPDAVTAYNGYLTSSSKTPEEHFIETISLAGSYKDWSYSGQSTQLGIEFLKRGDKSVYYTSNPTTFHLDGEVITFDNLKTLLSLREVRTIKVFTTVDNINLHTQVVDMSMTYGQQFGPTYLDGADVTKIKPHNSHEGKTFYVLPNDDTLRVEAFEYYHTTDPSFLGRYMSALNHTKKWKYPQVNGLTSIKWADNNCYLATALLTLQQIELKFNPPALQDAYYRARAGEAANFCALILAYCNKTVGELGDVRETMSYLFQHANLDSCKRVLNVVCKTCGQQQTTLKGVEAVMYMGTLSYEQFKKGVQIPCTCGKQATKYLVQQESPFVMMSAPPAQYELKHGTFTCASEYTGNYQCGHYKHITSKETLYCIDGALLTKSSEYKGPITDVFYKENSYTTTIKPVTYKLDGVVCTEIDPKLDNYYKKDNSYFTEQPIDLVPNQPYPNASFDNFKFVCDNIKFADDLNQLTGYKKPASRELKVTFFPDLNGDVVAIDYKHYTPSFKKGAKLLHKPIVWHVNNATNKATYKPNTWCIRCLWSTKPVETSNSFDVLKSEDAQGMDNLACEDLKPVSEEVVENPTIQKDVLECNVKTTEVVGDIILKPANNSLKITEEVGHTDLMAAYVDNSSLTIKKPNELSRVLGLKTLATHGLAAVNSVPWDTIANYAKPFLNKVVSTTTNIVTRCLNRVCTNYMPYFFTLLLQLCTFTRSTNSRIKASMPTTIAKNTVKSVGKFCLEASFNYLKSPNFSKLINIIIWFLLLSVCLGSLIYSTAALGVLMSNLGMPSYCTGYREGYLNSTNVTIATYCTGSIPCSVCLSGLDSLDTYPSLETIQITISSFKWDLTAFGLVAEWFLAYILFTRFFYVLGLAAIMQLFFSYFAVHFISNSWLMWLIINLVQMAPISAMVRMYIFFASFYYVWKSYVHVVDGCNSSTCMMCYKRNRATRVECTTIVNGVRRSFYVYANGGKGFCKLHNWNCVNCDTFCAGSTFISDEVARDLSLQFKRPINPTDQSSYIVDSVTVKNGSIHLYFDKAGQKTYERHSLSHFVNLDNLRANNTKGSLPINVIVFDGKSKCEESSAKSASVYYSQLMCQPILLLDQALVSDVGDSAEVAVKMFDAYVNTFSSTFNVPMEKLKTLVATAEAELAKNVSLDNVLSTFISAARQGFVDSDVETKDVVECLKLSHQSDIEVTGDSCNNYMLTYNKVENMTPRDLGACIDCSARHINAQVAKSHNIALIWNVKDFMSLSEQLRKQIRSAAKKNNLPFKLTCATTRQVVNVVTTKIALKGG

SEQ ID NO: 15818 - protein, 1946 aa, Artificial Sequence
  SARS-CoV-2__MT873132.1__non-structural protein 3 (NSP3)
MAPTKVTFGDDTVIEVQGYKSVNITFELDERIDKVLNEKCSAYTVELGTEVNEFACVVADAVIKTLQPVSELLTPLGIDLDEWSMATYYLFDESGEFKLASHMYCSFYPPDEDEEEGDCEEEEFEPSTQYEYGTEDDYQGKPLEFGATSAALQPEEEQEEDWLDDDSQQTVGQQDGSEDNQTTTIQTIVEVQPQLEMELTPVVQTIEVNSFSGYLKLTDNVYIKNADIVEEAKKVKPTVVVNAANVYLKHGGGVAGALNKATNNAMQVESDDYIATNGPLKVGGSCVLSGHNLAKHCLHVVGPNVNKGEDIQLLKSAYENFNQHEVLLAPLLSAGIFGADPIHSLRVCVDTVRTNVYLAVFDKNLYDKLVSSFLEMKSEKQVEQKIAEIPKEEVKPFITESKPSVEQRKQDDKKIKACVEEVTTTLEETKFLTENLLLYIDINGNLHPDSATLVSDIDITFLKKDSPYIVGDVVQEGVLTAVVIPTKKAGGTTEMLAKALRKVPTDNYITTYPGQGLNGYTVEEAKTVLKKCKSAFYILPSIISNEKQEILGTVSWNLREMLAHAEETRKLMPVCVETKAIVSTIQRKYKGIKIQEGVVDYGARFYFYTSKTTVASLINTLNDLNETLVTMPLGYVTHGLNLEEAARYMRSLKVPATVSVSSPDAVTAYNGYLTSSSKTPEEHFIETISLAGSYKDWSYSGQSTQLGIEFLKRGDKSVYYTSNPTTFHLDGEVITFDNLKTLLSLREVRTIKVFTTVDNINLHTQVVDMSMTYGQQFGPTYLDGADVTKIKPHNSHEGKTFYVLPNDDTLRVEAFEYYHTTDPSFLGRYMSALNHTKKWKYPQVNGLTSIKWADNNCYLATALLTLQQIELKFNPPALQDAYYRARAGEAANFCALILAYCNKTVGELGDVRETMSYLFQHANLDSCKRVLNVVCKTCGQQQTTLKGVEAVMYMGTLSYEQFKKGVQIPCTCGKQATKYLVQQESPFVMMSAPPAQYELKHGTFTCASEYTGNYQCGHYKHITSKETLYCIDGALLTKSSEYKGPITDVFYKENSYTTTIKPVTYKLDGVVCTEIDPKLDNYYKKDNSYFTEQPIDLVPNQPYPNASFDNFKFVCDNIKFADDLNQLTGYKKPASRELKVTFFPDLNGDVVAIDYKHYTPSFKKGAKLLHKPIVWHVNNATNKATYKPNTWCIRCLWSTKPVETSNSFDVLKSEDAQGMDNLACEDLKPVSEEVVENPTIQKDVLECNVKTTEVVGDIILKPANNSLKITEEVGHTDLMAAYVDNSSLTIKKPNELSRVLGLKTLATHGLAAVNSVPWDTIANYAKPFLNKVVSTTTNIVTRCLNRVCTNYMPYFFTLLLQLCTFTRSTNSRIKASMPTTIAKNTVKSVGKFCLEASFNYLKSPNFSKLINIIIWFLLLSVCLGSLIYSTAALGVLMSNLGMPSYCTGYREGYLNSTNVTIATYCTGSIPCSVCLSGLDSLDTYPSLETIQITISSFKWDLTAFGLIAEWFLAYILFTRFFYVLGLAAIMQLFFSYFAVHFISNSWLMWLIINLVQMAPISAMVRMYIFFASFYYVWKSYVHVVDGCNSSTCMMCYKRNRATRVECTTIVNGVRRSFYVYANGGKGFCKLHNWNCVNCDTFCAGSTFISDEVARDLSLQFKRPINPTDQSSYIVDSVTVKNGSIHLYFDKAGQKTYERHSLSHFVNLDNLRANNTKGSLPINVIVFDGKSKCEESSAKSASVYYSQLMCQPILLLDQALVSDVGDSAEVAVKMFDAYVNTFSSTFNVPMEKLKTLVATAEAELAKNVSLDNVLSTFISAARQGFVDSDVETKDVVECLKLSHQSDIEVTGDSCNNYMLTYNKVENMTPRDLGACIDCSARHINAQVAKSHNIALIWNVKDFMSLSEQLRKQIRSAAKKNNLPFKLTCATTRQVVNVVTTKIALKGG

SEQ ID NO: 15819 - protein, 1946 aa, Artificial Sequence
  SARS-CoV-2__MT873148.1__non-structural protein 3 (NSP3)
MAPTKVTFGDDTVIEVQGYKSVNITFELDERIDKVLNEKCSAYTVELGTEVNEFACVVADAVIKTLQPVSELLTPLGIDLDEWSMATYYLFDESGEFKLASHMYCSFYPPDEDEEEGDCEEEEFEPSTQYEYGTEDDYQGKPLEFGATSAALQPEEEQEEDWLDDDSQQTVGQQDGSEDNQTTTIQTIVEVQPQLEMELTPVVQTIEVNSFSGYLKLTDNVYIKNADIVEEAKKVKPTVVVNAANVYLKHGGGVAGALNKATNNAMQVESDDYIATNGPLKVGGSCVLSGHNLAKHCLHVVGPNVNKGEDIQLLKSAYENFNQHEVLLAPLLSAGIFGADPIHSLRVCVDTVRTNVYLAVFDKNLYDKLVSSFLEMKSEKQVEQKIAEIPKEEVKPFITESKPSVEQRKQDDKKIKACVEEVTTTLEETKFLTENLLLYIDINGNLHPDSATLVSDIDITFLKKDAPYIVGDVVQEGVLTAVVIPTKKAGGTTEMLAKALRKVPTDNYITTYPGQGLNGYTVEEAKTVLKKCKSAFYILPSIISNEKQEILGTVSWNLREMLAHAEETRKLMPVCVETKAIVSTIQRKYKGIKIQEGVVDYGARFYFYTSKTTVASLINTLNDLNETLVTMPLGYVTHGLNLEEAARYMRSLKVPATVSVSSPDAVTAYNGYLTSSSKTPEEHFIETISLAGSYKDWSYSGQSTQLGIEFLKRGDKSVYYTSNPTTFHLGGEVITFDNLKTLLSLREVRTIKVFTTVDNINLHTQVVDMSMTYGQQFGPTYLDGADVTKIKPHNSHEGKTFYVLPNDDTLRVEAFEYYHTTDPSFLGRYMSALNHTKKWKYPQVNGLTSIKWADNNCYLATALLTLQQIELKFNPPALQDAYYRARAGEAANFCALILAYCNKTVGELGDVRETMSYLFQHANLDSCKRVLNVVCKTCGQQQTTLKGVEAVMYMGTLSYEQFKKGVQIPCTCGKQATKYLVQQESPFVMMSAPPAQYELKHGTFTCASEYTGNYQCGHYKHITSKETLYCIDGALLTKSSEYKGPITDVFYKENSYTTTIKPVTYKLDGVVCTEIDPKLDNYYKKDNSYFTEQPIDLVPNQPYPNASFDNFKFVCDNIKFADDLNQLTGYKKPASRELKVTFFPDLNGDVVAIDYKHYTPSFKKGAKLLHKPIVWHVNNATNKATYKPNTWCIRCLWSTKPVETSNSFDVLKSEDAQGMDNLACEDLKPVSEEVVENPTIQKDVLECNVKTTEVVGDIILKPANNSLKITEEVGHTDLMAAYVDNSSLTIKKPNELSRVLGLKTLATHGLAAVNSVPWDTIANYAKPFLNKVVSTTTNIVTRCLNRVCTNYMPYFFTLLLQLCTFTRSTNSRIKASMPTTIAKNTVKSVGKFCLEASFNYLKSPNFSKLINIIIWFLLLSVCLGSLIYSTAALGVLMSNLGMPSYCTGYREGYLNSTNVTIATYCTGSIPCSVCLSGLDSLDTYPSLETIQITISSFKWDLTAFGLVAEWFLAYILFTRFFYVLGLAAIMQLFFSYFAVHFISNSWLMWLIINLVQMAPISAMVRMYIFFASFYYVWKSYVHVVDGCNSSTCMMCYKRNRATRVECTTIVNGVRRSFYVYANGGKGFCKLHNWNCVNCDTFCAGSTFISDEVARDLSLQFKRPINPTDQSSYIVDSVTVKNGSIHLYFDKAGQKTYERHSLSHFVNLDNLRANNTKGSLPINVIVFDGKSKCEESSAKSASVYYSQLMCQPILLLDQALVSDVGDSAEVAVKMFDAYVNTFSSTFNVPMEKLKTLVATAEAELAKNVSLDNVLSTFISAARQGFVDSDVETKDVVECLKLSHQSDIEVTGDSCNNYMLTYNKVENMTPRDLGACIDCSARHINAQVAKSHNIALIWNVKDFMSLSEQLRKQIRSAAKKNNLPFKLTCATTRQVVNVVTTKIALKGG

SEQ ID NO: 15820 - protein, 1946 aa, Artificial Sequence
  SARS-CoV-2__MT873152.1__non-structural protein 3 (NSP3)
MAPTKVTFGDDTVIEVQGYKSVNITFELDERIDKVLNEKCSAYTVELGTEVNEFACVVADAVIKTLQPVSELLTPLGIDLDEWSMATYYLFDESGEFKLASHMYCSFYPPDEDEEEGDCEEEEFEPSTQYEYGTEDDYQGKPLEFGATSAALQPEEEQEEDWLDDDSQQTVGQQDGSEDNQTTTIQTIVEVQPQLEMELTPVVQTIEVNSFSGYLKLTDNVYIKNADIVEEAKKVKPTVVVNAANVYLKHGGGVAGALNKATNNAMQVESDDYIATNGPLKVGGSCVLSGHNLAKHCLHVVGPNVNKGEDIQLLKSAYENFNQHEVLLAPLLSAGIFGADPIHSLRVCVDTVRTNVYLAVFDKNLYDKLVSSFLEMKSEKQVEQKIAEILKEEVKPFITESKPSVEQRKQDDKKIKACVEEVTTTLEETKFLTENLLLYIDINGNLHPDSATLVSDIDITFLKKDAPYIVGDVVQEGVLTAVVIPTKKAGGTTEMLAKALRKVPTDNYITTYPGQGLNGYTVEEAKTVLKKCKSAFYILPSIISNEKQEILGTVSWNLREMLAHAEETRKLMPVCVETKAIVSTIQRKYKGIKIQEGVVDYGARFYFYTSKTTVASLINTLNDLNETLVTMPLGYVTHGLNLEEAARYMRSLKVPATVSVSSPDAVTAYNGYLTSSSKTPEEHFIETISLAGSYKDWSYSGQSTQLGIEFLKRGDKSVYYTSNPTTFHLDGEVITFDNLKTLLSLREVRTIKVFTTVDNINLHTQVVDMSMTYGQQFGPTYLDGADVTKIKPHNSHEGKTFYVLPNDDTLRVEAFEYYHTTDPSFLGRYMSALNHTKKWKYPQVNGLTSIKWADNNCYLATALLTLQQIELKFNPPALQDAYYRARAGEAANFCALILAYCNKTVGELGDVRETMSYLFQHANLDSCKRVLNVVCKTCGQQQTTLKGVEAVMYMGTLSYEQFKKGVQIPCTCGKQATKYLVQQESPFVMMSAPPAQYELKHGTFTCASEYTGNYQCGHYKHITSKETLYCIDGALLTKSSEYKGPITDVFYKENSYTTTIKPVTYKLDGVVCTEIDPKLDNYYKKDNSYFTEQPIDLVPNQPYPNASFDNFKFVCDNIKFADDLNQLTGYKKPASRELKVTFFPDLNGDVVAIDYKHYTPSFKKGAKLLHKPIVWHVNNATNKATYKPNTWCIRCLWSTKPVETSNSFDVLKSEDAQGMDNLACEDLKPVSEEVVENPTIQKDVLECNVKTTEVVGDIILKPANNSLKITEEVGHTDLMAAYVDNSSLTIKKPNELSRVLGLKTLATHGLAAVNSVPWDTVANYAKPFLNKVVSTTTNIVTRCLNRVCTNYMPYFFTLLLQLCTFTRSTNSRIKASMPTTIAKNTVKSVGKFCLEASFNYLKSPNFSKLINIIIWFLLLSVCLGSLIYSTAALGVLMSNLGMPSYCTGYREGYLNSTNVTIATYCTGSIPCSVCLSGLDSLDTYPSLETIQITISSFKWDLTAFGLVAEWFLAYILFTRFFYVLGLAAIMQLFFSYFAVHFISNSWLMWLIINLVQMAPISAMVRMYIFFASFYYVWKSYVHVVDGCNSSTCMMCYKRNRATRVECTTIVNGVRRSFYVYANGGKGFCKLHNWNCVNCDTFCAGSTFISDEVARDLSLQFKRPINPTDQSSYIVDSVTVKNGSIHLYFDKAGQKTYERHSLSHFVNLDNLRANNTKGSLPINVIVFDGKSKCEESSAKSASVYYSQLMCQPILLLDQALVSDVGDSAEVAVKMFDAYVNTFSSTFNVPMEKLKTLVATAEAELAKNVSLDNVLSTFISAARQGFVDSDVETKDVVECLKLSHQSDIEVTGDSCNNYMLTYNKVENMTPRDLGACIDCSARHINAQVAKSHNIALIWNVKDFMSLSEQLRKQIRSAAKKNNLPFKLTCATTRQVVNVVTTKIALKGG

SEQ ID NO: 15821 - protein, 1946 aa, Artificial Sequence
  SARS-CoV-2__MT873163.1__non-structural protein 3 (NSP3)
MAPTKVTFGDDTVIEVQGYKSVNITFELDERIDKVLNEKCSAYTVELGTEVNEFACVVADAVIKTLQPVSELLTPLGIDLDEWSMATYYLFDESGEFKLASHMYCSFYPPDEDEEEGDCEEEEFEPSTQYEYGTEDDYQGKPLEFGATSAALQPEEEQEEDWLDDDSQQTVGQQDGSEDNQTTTIQTIVEVQPQLEMELTPVVQTIEVNSFSGYLKLTDNVYIKNADIVEEAKKVKPTVVVNAANVYLKHGGGVAGALNKATNNAMQVESDDYIATNGPLKVGGSCVLSGHNLAKHCLHVVGPNVNKGEDIQLLKSAYENFNQHEVLLAPLLSAGIFGADPIHSLRVCVDTVRTNVYLAVFDKNLYDKLVSSFLEMKSEKQVEQKIAEIPKEEVKPFITESKPSVEQRKQDDKKIKACVEEVTTTLEETKFLTENLLLYIDINGNLHPDSATLVSDIDITFLKKDAPYIVGDVVQEGVLTAVVIPTKKAGGTTEMLAKALRKVPTDNYITTYPGQGLNGYTVEEAKTVLKKCKSAFYILPSIISNEKQEILGTVSWNLREMLAHAEETRKLMPVCVETKAIVSTIQRKYKGIKIQEGVVDYGARFYFYTSKTTVASLINTLNDLNETLVTMPLGYVTHGLNLEEAARYMRSLKVPATVSVSSPDAVTAYNGYLTSSSKTPEEHFIETISLAGSYKDWSYSGQSTQLGIEFLKRGDKSVYYTSNPTTFHLDGEVITFDNLKTLLSLREVRTIKVFTTVDNINLHTQVVDMSMTYGQQFGPTYLDGADVTKIKPHNSHEGKTFYVLPNDDTLRVEAFEYYHTTDPSFLGRYMSALNHTKKWKYPQVNGLTSIKWADNNCYLATALLTLQQIELKFNPPALQDAYYRARAGEAANFCALILAYCNKTVGELGDVRETMSYLFQHANLDSCKRVLNVVCKTCGQQQTTLKGVEAVMYMGTLSYEQFKKGVQIPCTCGKQATKYLVQQESPFVMMSAPPAQYELKHGTFTCASEYTGNYQCGHYKHITSKETLYCIDGALLTKSSEYKGPITDVFYKENSYTTTIKPVTYKLDGVVCTEIDPKLDNYYKKDNSYFTEQPIDLVPNQPYPNASFDNFKFVCDNIKFADDLNQLTGYKKPASRELKVTFFPDLNGDVVAIDYKHYTPSFKKGAKLLHKPIVWHVNNATNKATYKPNTWCIRCLWSTKPVETSNSFDVLKSEDAQGMDNLACEELKPVSEEVVENPTIQKDVLECNVKTTEVVGDIILKPANNSLKITEEVGHTDLMAAYVDNSSLTIKKPNELSRVLGLKTLATHGLAAVNSVPWDTIANYAKPFLNKVVSTTTNIVTRCLNRVCTNYMPYFFTLLLQLCTFTRSTNSRIKASMPTTIAKNTVKSVGKFCLEASFNYLKSPNFSKLINIIIWFLLLSVCLGSLIYSTAALGVLMSNLGMPSYCTGYREGYLNSTNVTIATYCTGSIPCSVCLSGLDSLDTYPSLETIQITISSFKWDLTAFGLVAEWFLAYILFTRFFYVLGLAAIMQLFFSYFAVHFISNSWLMWLIINLVQMAPISAMVRMYIFFASFYYVWKSYVHVVDGCNSSTCMMCYKRNRATRVECTTIVNGVRRSFYVYANGGKGFCKLHNWNCVNCDTFCAGSTFISDEVARDLSLQFKRPINPTDQSSYIVDSVTVKNGSIHLYFDKAGQKTYERHSLSHFVNLDNLRANNTKGSLPINVIVFDGKSKCEESSAKSASVYYSQLMCQPILLLDQALVSDVGDSAEVAVKMFDAYVNTFSSTFNVPMEKLKTLVATAEAELAKNVSLDNVLSTFISAARQGFVDSDVETKDVVECLKLSHQSDIEVTGDSCNNYMLTYNKVENMTPRDLGACIDCSARHINAQVAKSHNIALIWNVKDFMSLSEQLRKQIRSAAKKNNLPFKLTCATTRQVVNVVTTKIALKGG

SEQ ID NO: 15822 - protein, 1946 aa, Artificial Sequence
  SARS-CoV-2__MT873201.1__non-structural protein 3 (NSP3)
MAPTKVTFGDDTVIEVQGYKSVNITFELDERIDKVLNEKCSAYTVELGTEVNEFACVVADAVIKTLQPVSELLTPLGIDLDEWSMATYYLFDESGEFKLASHMYCSFYPPDEDEEEGDCEEEEFEPSTQYEYGTEDDYQGKPLEFGATSAALQPEEEQEEDWLDDDSQQTVGQQDGSEDNQTTTIQTIVEVQPQLEMELTPVVQTIEVNSFSGYLKLTDNVYIKNADIVEEAKKVKPTVVVNAANVYLKHGGGVAGALNKATNNAMQVESDDYIATNGPLKVGGSCVLSGHNLAKHCLHVVGPNVNKGEDIQLLKSAYENFNQHEVLLAPLLSAGIFGADPIHSLRVCVDTVRTNVYLAVFDKNLYDKLVSSFLEMKSEKQVEQKIAEIPKEEVKPFITESKPSVEQRKQDDKKIKACVEEVTTTLEETKFLTENLLLYIDINGNLHPDSATLVSDIDITFLKKDAPYIVGDVVQEGVLTAVVIPTKKAGGTTEMLAKALRKVPTDNYITTYPGQGLNGYTVEEAKTVLKKCKSAFYILPSIISNEKQEILGTVSWNLREMLAHAEETRKLMPVCVETKAIVSTIQRKYKGIKIQEGVVDYGARFYFYTSKTTVASLINTLNDLNETLVTMPLGYVTHGLNLEEAARYMRSLKVPATVSVSSPDAVTAYNGYLTSSSKTPEEHFIETISLAGSYKDWSYSGQSTQLGIEFLKRGDKSVYYTSNPTTFHLDGEVITFDNLKTLLSLREVRTIKVFTTVDNINLHTQVVDMSMTYGQQFGPTYLDGADVTKIKPHNSHEGKTFYVLPNDDTLRVEAFEYYHTTDPSFLGRYMSALNHTKKWKYPQVNGLTSIKWADNNCYLATALLTLQQIELKFNPPALQDAYYRARAGEAANFCALILAYCNKTVGELGDVRETMSYLFQHANLDSCKRVLNVVCKTCGQQQTTLKGVEAVMYMGTLSYEQFKKGVQIPCTCGKQATKYLVQQESPFVMMSAPPAQYELKHGTFTCASEYTGNYQCGHYKHITSKETLYCIDGALLTKSSEYKGSITDVFYKENSYTTTIKPVTYKLDGVVCTEIDPKLDNYYKKDNSYFTEQPIDLVPNQPYPNASFDNFKFVCDNIKFADDLNQLTGYKKPASRELKVTFFPDLNGDVVAIDYKHYTPSFKKGAKLLHKPIVWHVNNATNKATYKPNTWCIRCLWSTKPVETSNSFDVLKSEDAQGMDNLACEDLKPVSEEVVENPTIQKDVLECNVKTTEVVGDIILKPANNSLKITEEVGHTDLMAAYVDNSSLTIKKPNELSRVLGLKTLATHGLAAVNSVPWDTIANYAKPFLNKVVSTTTNIVTRCLNRVCTNYMPYFFTLLLQLCTFTRSTNSRIKASMPTTIAKNTVKSVGKFCLEASFNYLKSPNFSKLINIIIWFLLLSVCLGSLIYSTAALGVLMSNLGMPSYCTGYREGYLNSTNVTIATYCTGSIPCSVCLSGLDSLDTYPSLETIQITISSFKWDLTAFGLVAEWFLAYILFTRFFYVLGLAAIMQLFFSYFAVHFISNSWLMWLIINLVQMAPISAMVRMYIFFASFYYVWKSYVHVVDGCNSSTCMMCYKRNRATRVECTTIVNGVRRSFYVYANGGKGFCKLHNWNCVNCDTFCAGSTFISDEVARDLSLQFKRPINPTDQSSYIVDSVTVKNGSIHLYFDKAGQKTYERHSLSHFVNLDNLRANNTKGSLPINVIVFDGKSKCEESSAKSASVYYSQLMCQPILLLDQALVSDVGDSAEVAVKMFDAYVNTFSSTFNVPMEKLKTLVATAEAELAKNVSLDNVLSTFISAARQGFVDSDVETKDVVECLKLSHQSDIEVTGDSCNNYMLTYNKVENMTPRDLGACIDCSARHINAQVAKSHNIALIWNVKDFMSLSEQLRKQIRSAAKKNNLPFKLTCATTRQVVNVVTTKIALKGG

SEQ ID NO: 15823 - protein, 1946 aa, Artificial Sequence
  SARS-CoV-2__MT873208.1__non-structural protein 3 (NSP3)
MAPTKVTFGDDTVIEVQGYKSVNITFELDERIDKVLNEKCSAYTVELGTEVNEFACVVADAVIKTLQPVSELLTPLGIDLDEWSMATYYLFDESGEFKLASHMYCSFYPPDEDEEEGDCEEEEFEPSTQYEYGTEDDYQGKPLEFGATSAALQPEEEQEEDWLDDDSQQTVGQQDGSEDNQTTTIQTIAEVQPQLEMELTPVVQTIEVNSFSGYLKLTDNVYIKNADIVEEAKKVKPTVVVNAANVYLKHGGGVAGALNKATNNAMQVESDDYIATNGPLKVGGSCVLSGHNLAKHCLHVVGPNVNKGEDIQLLKSAYENFNQHEVLLAPLLSAGIFGADPIHSLRVCVDTVRTNVYLAVFDKNLYDKLVSSFLEMKSEKQVEQKIAEIPKEEVKPFITESKPSVEQRKQDDKKIKACVEEVTTTLEETKFLTENLLLYIDINGNLHPDSATLVSDIDITFLKKDAPYIVGDVVQEGVLTAVVIPTKKAGGTTEMLAKALRKVPTDNYITTYPGQGLNGYTVEEAKTVLKKCKSAFYILPSIISNEKQEILGTVSWNLREMLAHAEETRKLMPVCVETKAIVSTIQRKYKGIKIQEGVVDYGARFYFYTSKTTVASLINTLNDLNETLVTMPLGYVTHGLNLEEAARYMRSLKVPATVSVSSPDAVTAYNGYLTSSSKTPEEHFIETISLAGSYKDWSYSGQSTQLGIEFLKRGDKSVYYTSNPTTFHLDGEVITFDNLKTLLSLREVRTIKVFTTVDNINLHTQVVDMSMTYGQQFGPTYLDGADVTKIKPHNSHEGKTFYVLPNDDTLRVEAFEYYHTTDPSFLGRYMSALNHTKKWKYPQVNGLTSIKWADNNCYLATALLTLQQIELKFNPPALQDAYYRARAGEAANFCALILAYCNKTVGELGDVRETMSYLFQHANLDSCKRVLNVVCKTCGQQQTTLKGVEAVMYMGTLSYEQFKKGVQIPCTCGKQATKYLVQQESPFVMMSAPPAQYELKHGTFTCASEYTGNYQCGHYKHITSKETLYCIDGALLTKSSEYKGPITDVFYKENSYTTTIKPVTYKLDGVVCTEIDPKLDNYYKKDNSYFTEQPIDLVPNQPYPNASFDNFKFVCDNIKFADDLNQLTGYKKPASRELKVTFFPDLNGDVVAIDYKHYTPSFKKGAKLLHKPIVWHVNNATNKATYKPNTWCIRCLWSTKPVETSNSFDVLKSEDAQGMDNLACEDLKPVSEEVVENPTIQKDVLECNVKTTEVVGDIILKPANNSLKITEEVGHTDLMAAYVDNSSLTIKKPNELSRVLGLKTLATHGLAAVNSVPWDTIANYAKPFLNKVVSTTTNIVTRCLNRVCTNYMPYFFTLLLQLCTFTRSTNSRIKASMPTTIAKNTVKSVGKFCLEASFNYLKSPNFSKLINIIIWFLLLSVCLGSLIYSTAALGVLMSNLGMPSYCTGYREGYLNSTNVTIATYCTGSIPCSVCLSGLDSLDTYPSLETIQITISSFKWDLTAFGLVAEWFLAYILFTRFFYVLGLAAIMQLFFSYFAVHFISNSWLMWLIINLVQMAPISAMVRMYIFFASFYYVWKSYVHVVDGCNSSTCMMCYKRNRATRVECTTIVNGVRRSFYVYANGGKGFCKLHNWNCVNCDTFCAGSTFISDEVARDLSLQFKRPINPTDQSSYIVDSVTVKNGSIHLYFDKAGQKTYERHSLSHFVNLDNLRANNTKGSLPINVIVFDGKSKCEESSAKSASVYYSQLMCQPILLLDQALVSDVGDSAEVAVKMFDAYVNTFSSTFNVPMEKLKTLVATAEAELAKNVSLDNVLSTFISAARQGFVDSDVETKDVVECLKLSHQSDIEVTGDSCNNYMLTYNKVENMTPRDLGACIDCSARHINAQVAKSHNIALIWNVKDFMSLSEQLRKQIRSAAKKNNLPFKLTCATTRQVVNVVTTKIALKGG

SEQ ID NO: 15824 - protein, 1946 aa, Artificial Sequence
  SARS-CoV-2__MT873210.1__non-structural protein 3 (NSP3)
MAPTKVTFGDDTVIEVQGYKSVNITFELDERIDKVLNEKCSAYTVELGTEVNEFACVVADAVIKTLQPVSELLTPLGIDLDEWSMATYYLFDESGEFKLASHMYCSFYPPDEDEEEGDCEEEEFEPSTQYEYGTEDDYQGKPLEFGATSAALQPEEEQEEDWLDDDSQQTVGQQDGSEDNQTTTIQTIVEVQPQLEMELTPVVQTIEVNSFSGYLKLTDNVYIKNADIVEEAKKVKPTVVVNAANVYLKHGGGVAGALNKATNNAMQVESDDYIATNGPLKVGGSCVLSGHNLAKHCLHVVGPNVNKGEDIQLLKSAYENFNQHEVLLAPLLSAGIFGADPIHSLRVCVDTVRTNVYLAVFDKNLYDKLVSSFLEMKSEKQVEQKIAEIPKDEVKPFITESKPSVEQRKQDDKKIKACVEEVTTTLEETKFLTENLLLYIDINGNLHPDSATLVSDIDITFLKKDAPYIVGDVVQEGVLTAVVIPTKKAGGTTEMLAKALRKVPTDNYITTYPGQGLNGYTVEEAKTVLKKCKSAFYILPSIISNEKQEILGTVSWNLREMLAHAEETRKLMPVCVETKAIVSTIQRKYKGIKIQEGVVDYGARFYFYTSKTTVASLINTLNDLNETLVTMPLGYVTHGLNLEEAARYMRSLKVPATVSVSSPDAVTAYNGYLTSSSKTPEEHFIETISLAGSYKDWSYSGQSTQLGIEFLKRGDKSVYYTSNPTTFHLDGEVITFDNLKTLLSLREVRTIKVFTTVDNINLHTQVVDMSMTYGQQFGPTYLDGADVTKIKPHNSHEGKTFYVLPNDDTLRVEAFEYYHTTDPSFLGRYMSALNHTKKWKYPQVNGLTSIKWADNNCYLATALLTLQQIELKFNPPALQDAYYRARAGEAANFCALILAYCNKTVGELGDVRETMSYLFQHANLDSCKRVLNVVCKTCGQQQTTLKGVEAVMYMGTLSYEQFKKGVQIPCTCGKQATKYLVQQESPFVMMSAPPAQYELKHGTFTCASEYTGNYQCGHYKHITSKETLYCIDGALLTKSSEYKGPITDVFYKENSYTTTIKPVTYKLDGVVCTEIDPKLDNYYKKDNSYFTEQPIDLVPNQPYPNASFDNFKFVCDNIKFADDLNQLTGYKKPASRELKVTFFPDLNGDVVAIDYKHYTPSFKKGAKLLHKPIVWHVNNATNKATYKPNTWCIRCLWSTKPVETSNSFDVLKSEDAQGMDNLACEDLKPVSEEVVENPTIQKDVLECNVKTTEVVGDIILKPANNSLKITEEVGHTDLMAAYVDNSSLTIKKPNELSRVLGLKTLATHGLAAVNSVPWDTIANYAKPFLNKVVSTTTNIVTRCLNRVCTNYMPYFFTLLLQLCTFTRSTNSRIKASMPTTIAKNTVKSVGKFCLEASFNYLKSPNFSKLINIIIWFLLLSVCLGSLIYSTAALGVLMSNLGMPSYCTGYREGYLNSTNVTIATYCTGSIPCSVCLSGLDSLDTYPSLETIQITISSFKWDLTAFGLVAEWFLAYILFTRFFYVLGLAAIMQLFFSYFAVHFISNSWLMWLIINLVQMAPISAMVRMYIFFASFYYVWKSYVHVVDGCNSSTCMMCYKRNRATRVECTTIVNGVRRSFYVYANGGKGFCKLHNWNCVNCDTFCAGSTFISDEVARDLSLQFKRPINPTDQSSYIVDSVTVKNGSIHLYFDKAGQKTYERHSLSHFVNLDNLRANNTKGSLPINVIVFDGKSKCEESSAKSASVYYSQLMCQPILLLDQALVSDVGDSAEVAVKMFDAYVNTFSSTFNVPMEKLKTLVATAEAELAKNVSLDNVLSTFISAARQGFVDSDVETKDVVECLKLSHQSDIEVTGDSCNNYMLTYNKVENMTPRDLGACIDCSARHINAQVAKSHNIALIWNVKDFMSLSEQLRKQIRSAAKKNNLPFKLTCATTRQVVNVVTTKIALKGG

SEQ ID NO: 15825 - protein, 1946 aa, Artificial Sequence
  SARS-CoV-2__MT873211.1__non-structural protein 3 (NSP3)
MAPTKVTFGDDTVIEVQGYKSVNITFELDERIDKVLNEKCSAYTVELGTEVNEFACVVADAVIKTLQPVSELLTPLGIDLDEWSMATYYLFDESGEFKLASHMYCSFYPPDEDEEEGDCEEEEFEPSTQYEYGTEDDYQGKPLEFGATSAALQPEEEQEEDWLDDDSQQTVGQQDGSEDNQTITIQTIVEVQPQLEMELTPVVQTIEVNSFSGYLKLTDNVYIKNADIVEEAKKVKPTVVVNAANVYLKHGGGVAGALNKATNNAMQVESDDYIATNGPLKVGGSCVLSGHNLAKHCLHVVGPNVNKGEDIQLLKSAYENFNQHEVLLAPLLSAGIFGADPIHSLRVCVDTVRTNVYLAVFDKNLYDKLVSSFLEMKSEKQVEQKIAEIPKEEVKPFITESKPSVEQRKQDDKKIKACVEEVTTTLEETKFLTENLLLYIDINGNLHPDSATLVSDIDITFLKKDAPYIVGDVVQEGVLTAVVIPTKKAGGTTEMLAKALRKVPTDNYITTYPGQGLNGYTVEEAKTVLKKCKSAFYILPSIISNEKQEILGTVSWNLREMLAHAEETRKLMPVCVETKAIVSTIQRKYKGIKIQEGVVDYGARFYFYTSKTTVASLINTLNDLNETLVTMPLGYVTHGLNLEEAARYMRSLKVPATVSVSSPDAVTAYNGYLTSSSKTPEEHFIETISLAGSYKDWSYSGQSTQLGIEFLKRGDKSVYYTSNPTTFHLDGEVITFDNLKTLLSLREVRTIKVFTTVDNINLHTQVVDMSMTYGQQFGPTYLDGADVTKIKPHNSHEGKTFYVLPNDDTLRVEAFEYYHTTDPSFLGRYMSALNHTKKWKYPQVNGLTSIKWADNNCYLATALLTLQQIELKFNPPALQDAYYRARAGEAANFCALILAYCNKTVGELGDVRETMSYLFQHANLDSCKRVLNVVCKTCGQQQTTLKGVEAVMYMGTLSYEQFKKGVQIPCTCGKQATKYLVQQESPFVMMSAPPAQYELKHGTFTCASEYTGNYQCGHYKHITSKETLYCIDGALLTKSSEYKGPITDVFYKENSYTTTIKPVTYKLDGVVCTEIDPKLDNYYKKDNSYFTEQPIDLVPNQPYPNASFDNFKFVCDNIKFADDLNQLTGYKKPASRELKVTFFPDLNGDVVAIDYKHYTPSFKKGAKLLHKPIVWHVNNATNKATYKPNTWCIRCLWSTKPVETSNSFDVLKSEDAQGMDNLACEDLKPVSEEVVENPTIQKDVLECNVKTTEVVGDIILKPANNSLKITEEVGHTDLMAAYVDNSSLTIKKPNELSRVLGLKTLATHGLAAVNSVPWDTIANYAKPFLNKVVSTTTNIVTRCLNRVCTNYMPYFFTLLLQLCTFTRSTNSRIKASMPTTIAKNTVKSVGKFCLEASFNYLKSPNFSKLINIIIWFLLLSVCLGSLIYSTAALGVLMSNLGMPSYCTGYREGYLNSTNVTIATYCTGSIPCSVCLSGLDSLDTYPSLETIQITISSFKWDLTAFGLVAEWFLAYILFTRFFYVLGLAAIMQLFFSYFAVHFISNSWLMWLIINLVQMAPISAMVRMYIFFASFYYVWKSYVHVVDGCNSSTCMMCYKRNRATRVECTTIVNGVRRSFYVYANGGKGFCKLHNWNCVNCDTFCAGSTFISDEVARDLSLQFKRPINPTDQSSYIVDSVTVKNGSIHLYFDKAGQKTYERHSLSHFVNLDNLRANNTKGSLPINVIVFDGKSKCEESSAKSASVYYSQLMCQPILLLDQALVSDVGDSAEVAVKMFDAYVNTFSSTFNVPMEKLKTLVATAEAELAKNVSLDNVLSTFISAARQGFVDSDVETKDVVECLKLSHQSDIEVTGDSCNNYMLTYNKVENMTPRDLGACIDCSARHINAQVAKSHNIALIWNVKDFMSLSEQLRKQIRSAAKKNNLPFKLTCATTRQVVNVVTTKIALKGG

SEQ ID NO: 15826 - protein, 1946 aa, Artificial Sequence
  SARS-CoV-2__MT873238.1__non-structural protein 3 (NSP3)
MAPTKVTFGDDTVIEVQGYKSVNITFELDERIDKVLNEKCSAYTVELGTEVNEFACVVADAVIKTLQPVSELLTPLGIDLDEWSMATYYLFDESGEFKLASHMYCSFYPPDEDEEEGDCEEEEFEPSTQYEYGTEDDYQGKPLEFGATSAALQPEEEQEEDWLDDDSQQTVGQQDGSEDNQTTTIQTIVEVQPQLEMELTPVVQTIEVNSFSGYLKLTDNVYIKNVDIVEEAKKVKPTVVVNAANVYLKHGGGVAGALNKATNNAMQVESDDYIATNGPLKVGGSCVLSGHNLAKHCLHVVGPNVNKGEDIQLLKSAYENFNQHEVLLAPLLSAGIFGADPIHSLRVCVDTVRTNVYLAVFDKNLYDKLVSSFLEMKSEKQVEQKIAEIPKEEVKPFITESKPSVEQRKQDDKKIKACVEEVTTTLEETKFLTENLLLYIDINGNLHPDSATLVSDIDITFLKKDAPYIVGDVVQEGVLTAVVIPTKKAGGTTEMLAKALRKVPTDNYITTYPGQGLNGYTVEEAKTVLKKCKSAFYILPSIISNEKQEILGTVSWNLREMLAHAEETRKLMPVCVETKAIVSTIQRKYKGIKIQEGVVDYGARFYFYTSKTTVASLINTLNDLNETLVTMPLGYVTHGLNLEEAARYMRSLKVPATVSVSSPDAVTAYNGYLTSSSKTPEEHFIETISLAGSYKDWSYSGQSTQLGIEFLKRGDKSVYYTSNPTTFHLDGEVITFDNLKTLLSLREVRTIKVFTTVDNINLHTQVVDMSMTYGQQFGPTYLDGADVTKIKPHNSHEGKTFYVLPNDDTLRVEAFEYYHTTDPSFLGRYMSALNHTKKWKYPQVNGLTSIKWADNNCYLATALLTLQQIELKFNPPALQDAYYRARAGEAANFCALILAYCNKTVGELGDVRETMSYLFQHANLDSCKRVLNVVCKTCGQQQTTLKGVEAVMYMGTLSYEQFKKGVQIPCTCGKQATKYLVQQESPFVMMSAPPAQYELKHGTFTCASEYTGNYQCGHYKHITSKETLYCIDGALLTKSSEYKGPITDVFYKENSYTTTIKPVTYKLDGVVCTEIDPKLDNYYKKDNSYFTEQPIDLVPNQPYPNASFDNFKFVCDNIKFADDLNQLTGYKKPASRELKVTFFPDLNGDVVAIDYKHYTPSFKKGAKLLHKPIVWHVNNATNKATYKPNTWCIRCLWSTKPVETSNSFDVLKSEDAQGMDNLACEDLKPVSEEVVENPTIQKDVLECNVKTTEVVGDIILKPANNSLKITEEVGHTDLMAAYVDNSSLTIKKPNELSRVLGLKTLATHGLAAVNSVPWDTIANYAKPFLNKVVSTTTNIVTRCLNRVCTNYMPYFFTLLLQLCTFTRSTNSRIKASMPTTIAKNTVKSVGKFCLEASFNYLKSPNFSKLINIIIWFLLLSVCLGSLIYSTAALGVLMSNLGMPSYCTGYREGYLNSTNVTIATYCTGSIPCSVCLSGLDSLDTYPSLETIQITISSFKWDLTAFGLVAEWFLAYILFTRFFYVLGLAAIMQLFFSYFAVHFISNSWLMWLIINLVQMAPISAMVRMYIFFASFYYVWKSYVHVVDGCNSSTCMMCYKRNRATRVECTTIVNGVRRSFYVYANGGKGFCKLHNWNCVNCDTFCAGSTFISDEVARDLSLQFKRPINPTDQSSYIVDSVTVKNGSIHLYFDKAGQKTYERHSLSHFVNLDNLRANNTKGSLPINVIVFDGKSKCEESSAKSASVYYSQLMCQPILLLDQALVSDVGDSAEVAVKMFDAYVNTFSSTFNVPMEKLKTLVATAEAELAKNVSLDNVLSTFISAARQGFVDSDVETKDVVECLKLSHQSDIEVTGDSCNNYMLTYNKVENMTPRDLGACIDCSARHINAQVAKSHNIALIWNVKDFMSLSEQLRKQIRSAAKKNNLPFKLTCATTRQVVNVVTTKIALKGG

SEQ ID NO: 15827 - protein, 1946 aa, Artificial Sequence
  SARS-CoV-2__MT873239.1__non-structural protein 3 (NSP3)
MAPTKVTFGDDTVIEVQGYKSVNITFELDERIDKVLNEKCSAYTVELGTEVNEFACVVADAVIKTLQPVSELLTPLGIDLDEWSMATYYLFDESGEFKLASHMYCSFYPPDEDEEEGDCEEEEFEPSTQYEYGTEDDYQGKPLEFGATSAALQPEEEQEEDWLDDDSQQTVGQQDGSEDNQTTTIQTIVEVQPQLEMELTPVVQTIEVNSFSGYLKLTDNVYIKNADIVEEAKKVKPTVVVNAANVYLKHGGGVAGALNKATNNAMQVESDDYIATNGPLKVGGSCVLSGHNLAKHCLHVVGPNVNKGEDIQLLKSAYENFNQHEVLLAPLLSAGIFGADPIHSLRVCVDTVRTNVYLAVFDKNLYDKLVSSFLEMKSEKQVEQKIAEIPKEEVKPFITESKPSVEQRKQDDKKIKACVEEVTTTLEETKFLTENLLLYIDINGNLHPDSATLVSDIDITFLKKDAPYIVGDVVQEGVLTAVVIPTKKAGGTTEMLAKALRKVPTDNYITTYPGQGLNGYTVEEAKTVLKKCKSAFYILPSIISNEKQEILGTVSWNLREMLAHAEETRKLMPVCVETKAIVSTIQRKYKGIKIQEGVVDYGARFYFYTSKTTVASLINTLNDLNETLVTMPLGYVTHGLNLEEAARYMRSLKVPATVSVSSPDAVTAYNGYLTSSSKTPEEHFIETISLAGSYKDWSYSGQSTQLGIEFLKRGDKSVYYTSNPTTFHLDGEVITFDNLKTLLSLREVRTIKVFTTVDNINLHTQVVDMSMTYGQQFGPTYLDGADVTKIKPHNSHEGKTFYVLPNDDTLRVEAFEYYHTTDPSFLGRYMSALNHTKKWKYPQVNGLTSIKWADNNCYLATALLTLQQIELKFNPPALQDAYYRARAGEAANFCALILAYCNKTVGELGDVRETMSYLFQHANLDSCKRVLNVVCKTCGQQQTTLKGVEAVMYMGTLSYEQFKKGVQIPCTCGKQATKYLVQQESPFVMMSAPPAQYELKHGTFTCASEYTGNYQCGHYKHITSKETLYCIDGALLTKSSEYKGPITDVFYKENSYTTTIKPVTYKLDGVVCTEIDPKLDNYYKKDNSYFTEQPIDLVPNQPYPNASFDNFKFVCDNIKFADDLNQLTGYKKPASRELKVTFFPDLNGDVVAIDYKHYTPSFKKGAKLLHKPIVWHVNNATNKATYKPNTWCIRCLWSTKPVETSNSFDVLKSEDAQGMDNLACEDLKPVSEEVVENPTIQKDVLECNVKTTEVVGDIILKPANNSLKITEEVGHTDLMAAYVDNSSLTIKKPNELSRVLGLKTLATHGLAAVNSVPWDTIANYAKPFLNKVVSTTTNIVTRCLNRVCTNYMPYFFTLLLQLCTFTRSTNSRIKASMPTTIAKNTVKSVGKFCLEASFNYLKSPNFSKLINIIIWFLLLSVCLGSLIYSTAALGVLMSNLGMPSYCTGYREGYLNSTNVTIATYCTGSIPCSVCLSGLDSLDTYPSLETIQITISSFKWDLTAFGLVAEWFLAYILFTRFFYVLGLAAIMQLFFSYFAVHFISNSWLMWLIINLVQMAPISAMVRMYIFFASFYYVWKSYVHVVDGCNSSTCMMCYKRNRATRVECTTIVNGVRRSFYVYANGGKGFCKLHNWNCVNCDTFCAGSTFISDEVARDLSLQFKRPINPTDQSSYIVDSVTVKNGSIHLYFDKAGQKTYERHSLSHFVNLDNLRANNTKGSLPINVIVFDGKSKCEESSAKSASVYYSQLMCQPILLLDQALVSDVGDSAEVAVKMFDAYVNTFSSTFNVPMEKLKTLVATAEAELAKNVSLDNVLSTFISAARQGFVDSDVETKDVVECLKLSHQSDIEVTGDSCNNYMLTYNKVENMTPRDLGACIDCSARHINAQVAKSHNIVLIWNVKDFMSLSEQLRKQIRSAAKKNNLPFKLTCATTRQVVNVVTTKIALKGG

SEQ ID NO: 15828 - protein, 1946 aa, Artificial Sequence
  SARS-CoV-2__MT873278.1__non-structural protein 3 (NSP3)
MAPTKVTFGDDTVIEVQGYKSVNITFELDERIDKVLNEKCSAYTVELGTEVNEFACVVADAVIKTLQPVSELLTPLGIDLDEWSMATYYLFDESGEFKLASHMYCSFYPPDEDEEEGDCEEEEFEPSTQYEYGTEDDYQGKPLEFGATSAALQPEEEQEEDWLDDDSQQTVGQQDGSEDNQTTTIQTIVEVQPQLEMELTPVVQTIEVNSFSGYLKLTDNVYIKNADIVEEAKKVKPTVVVNAANVYLKHGGGVAGALNKATNNAMQVESDDYIATNGPLKVGGSCVLSGHNLAKHCLHVVGPNVNKGEDIQLLKSAYENFNQHEVLLAPLLSAGIFGADPIHSLRVCVDTVRTNVYLAVFDKNLYDKLVSSFLEMKSEKQVEQKIAEIPKEEVKPFITESKPSVEQRKQDDKKIKACVEEVTTTLEETKFLTENLLLYIDINGNLHPDSATLVSDIDITFLKKDAPYIVGDVVQEGVLTAVVIPTKKAGGTTEMLAKALRKVPTDNYITTYPGQGLNGYTVEEAKTVLKKCKSAFYILPSIISNEKQEILGTVSWNLREMLAHAEETRKLMPVCVETKAIVSTIQRKYKGIKIQEGVVDYGARFYFYTSKTTVASLINTLNDLNETLVTMPLGYVTHGLNLEEAARYMRSLKVPATVSVSSPDAVTAYNGYLTSSSKTPEEHFIETISLAGSYKDWSYSGQSTQLGIEFLKRGDKSVYYTSNPTTFHLDGEVITFDNLKTLLSLREVRTIKVFTTVDNINLHTQVVDMSMTYGQQFGPTYLDGADVTKIKPHNSHEGKTFYVLPNDDTLRVEAFEYYHTTDPSFLGRYMSALNHTKKWKYPQVNGLTSIKWADNNCYLATALLTLQQIELKFNPPALQDAYYRARAGEAANFCALILAYCNKTVGELGDVRETMSYLFQHANLDSCKRVLNVVCKTCGQQQTTLKGVEAVMYMGTLSYEQFKKGVQIPCTCGKQATKYLVQQESPFVMMSAPPAQYELKHGTFTCASEYTGNYQCGHYKHITSKETLYCIDGALLTKSSEYKGPITDVFYKENSYTTTIKPVTYKLDGVVCTEIDPKLDNYYKKDNSYFTEQPIDLVPNQPYPNASFDNFKFVCDNIKFADDLNQLTGYKKPASRELKVTFFPDLNGDVVAIDYKHYTPSFKKGAKLLHKPIVWHVNNATNKATYKPNTWCIRCLWSTKPVETSNSFDVLKSEDAQGMDNLACEDLKPVSEEVVENPTIQKDVLECNVKTTEVVGDIILKPANNSLKITEEVGHTDLMAAYVDNSSLTIKKPNELSRVLGLKTLATHGLAAVNSVPWDTIANYAKPFLNKVVSTTTNIVTRCLNRVCTNYMPYFFTLLLQLCTFTRSTNSRIKASMPTTIAKNTVKSVGKFCLEASFNYLKSPNFSKLINIIIWFLLLSVCLGSLIYSTAALGVLMSNLGMPSYCTGYREGYLNSTNVTIATYCTGSIPCSVCLSGLDSLDTYPSLETIQITISSFKWDLTAFGLVAEWFLAYILFTRFFYVLGLAVIMQLFFSYFAVHFISNSWLMWLIINLVQMAPISAMVRMYIFFASFYYVWKSYVHVVDGCNSSTCMMCYKRNRATRVECTTIVNGVRRSFYVYANGGKGFCKLHNWNCVNCDTFCAGSTFISDEVARDLSLQFKRPINPTDQSSYIVDSVTVKNGSIHLYFDKAGQKTYERHSLSHFVNLDNLRANNTKGSLPINVIVFDGKSKCEESSAKSASVYYSQLMCQPILLLDQALVSDVGDSAEVAVKMFDAYVNTFSSTFNVPMEKLKTLVATAEAELAKNVSLDNVLSTFISAARQGFVDSDVETKDVVECLKLSHQSDIEVTGDSCNNYMLTYNKVENMTPRDLGACIDCSARHINAQVAKSHNIALIWNVKDFMSLSEQLRKQIRSAAKKNNLPFKLTCATTRQVVNVVTTKIALKGG

SEQ ID NO: 15829 - protein, 1946 aa, Artificial Sequence
  SARS-CoV-2__MT873350.1__non-structural protein 3 (NSP3)
MAPTKVTFGDDTVIEVQGYKSVNITFELDERIDKVLNEKCSAYTVELGTEVNEFACVVADAVIKTLQPVSELLTPLGIDLDEWSMATYYLFDESGEFKLASHMYCSFYPPDEDEEEGDCEEEEFEPSTQYEYGIEDDYQGKPLEFGATSAALQPEEEQEEDWLDDDSQQTVGQQDGSEDNQTTTIQTIVEVQPQLEMELTPVVQTIEVNSFSGYLKLTDNVYIKNADIVEEAKKVKPTVVVNAANVYLKHGGGVAGALNKATNNAMQVESDDYIATNGPLKVGGSCVLSGHNLAKHCLHVVGPNVNKGEDIQLLKSAYENFNQHEVLLAPLLSAGIFGADPIHSLRVCVDTVRTNVYLAVFDKNLYDKLVSSFLEMKSEKQVEQKIAEIPKEEVKPFITESKPSVEQRKQDDKKIKACVEEVTTTLEETKFLTENLLLYIDINGNLHPDSATLVSDIDITFLKKDAPYIVGDVVQEGVLTAVVIPTKKAGGTTEMLAKALRKVPTDNYITTYPGQGLNGYTVEEAKTVLKKCKSAFYILPSIISNEKQEILGTVSWNLREMLAHAEETRKLMPVCVETKAIVSTIQRKYKGIKIQEGVVDYGARFYFYTSKTTVASLINTLNDLNETLVTMPLGYVTHGLNLEEAARYMRSLKVPATVSVSSPDAVTAYNGYLTSSSKTPEEHFIETISLAGSYKDWSYSGQSTQLGIEFLKRGDKSVYYTSNPTTFHLDGEVITFDNLKTLLSLREVRTIKVFTTVDNINLHTQVVDMSMTYGQQFGPTYLDGADVTKIKPHNSHEGKTFYVLPNDDTLRVEAFEYYHTTDPSFLGRYMSALNHTKKWKYPQVNGLTSIKWADNNCYLATALLTLQQIELKFNPPALQDAYYRARAGEAANFCALILAYCNKTVGELGDVRETMSYLFQHANLDSCKRVLNVVCKTCGQQQTTLKGVEAVMYMGTLSYEQFKKGVQIPCTCGKQATKYLVQQESPFVMMSAPPAQYELKHGTFTCASEYTGNYQCGHYKHITSKETLYCIDGALLTKSSEYKGPITDVFYKENSYTTTIKPVTYKLDGVVCTEIDPKLDNYYKKDNSYFTEQPIDLVPNQPYPNASFDNFKFVCDNIKFADDLNQLTGYKKPASRELKVTFFPDLNGDVVAIDYKHYTPSFKKGAKLLHKPIVWHVNNATNKATYKPNTWCIRCLWSTKPVETSNSFDVLKSEDAQGMDNLACEDLKPVSEEVVENPTIQKDVLECNVKTTEVVGDIILKPANNSLKITEEVGHTDLMAAYVDNSSLTIKKPNELSRVLGLKTLATHGLAAVNSVPWDTIANYAKPFLNKVVSTTTNIVTRCLNRVCTNYMPYFFTLLLQLCTFTRSTNSRIKASMPTTIAKNTVKSVGKFCLEASFNYLKSPNFSKLINIIIWFLLLSVCLGSLIYSTAALGVLMSNLGMPSYCTGYREGYLNSTNVTIATYCTGSIPCSVCLSGLDSLDTYPSLETIQITISSFKWDLTAFGLVAEWFLAYILFTRFFYVLGLAAIMQLFFSYFAVHFISNSWLMWLIINLVQMAPISAMVRMYIFFASFYYVWKSYVHVVDGCNSSTCMMCYKRNRATRVECTTIVNGVRRSFYVYANGGKGFCKLHNWNCVNCDTFCAGSTFISDEVARDLSLQFKRPINPTDQSSYIVDSVTVKNGSIHLYFDKAGQKTYERHSLSHFVNLDNLRANNTKGSLPINVIVFDGKSKCEESSAKSASVYYSQLMCQPILLLDQALVSDVGDSAEVAVKMFDAYVNTFSSTFNVPMEKLKTLVATAEAELAKNVSLDNVLSTFISAARQGFVDSDVETKDVVECLKLSHQSDIEVTGDSCNNYMLTYNKVENMTPRDLGACIDCSARHINAQVAKSHNIALIWNVKDFMSLSEQLRKQIRSAAKKNNLPFKLTCATTRQVVNVVTTKIALKGG

SEQ ID NO: 15830 - protein, 1946 aa, Artificial Sequence
  SARS-CoV-2__MT873444.1__non-structural protein 3 (NSP3)
MAPTKVTFGDDTVIEVQGYKSVNITFELDERIDKVLNEKCSAYTVELGTEVNEFACVVADAVIKTLQPVSELLTPLGIDLDEWSMATYYLFDESGEFKLASHMYCSFYPPDEDEEEGDCEEEEFEPSTQYEYGTEDDYQGKPLEFGATSAALQPEEEQEEDWLDDDSQQTVGQQDGSEDNQTTTIQTIVEVQPQLEMELTPVVQTIEVNSFSGYLKLTDNVYIKNADIVEEAKKVKPTVVVNAANVYLKHGGGVAGALNKATNNAMQVESDDYIATNGPLKVGGSCVLSGHNLAKHCLHVVGPNVNKGEDIQLLKSAYENFNQHEVLLAPLLSAGIFGADPIHSLRVCVDTVRTNVYLAVFDKNLYDKLVSSFLEMKSEKQVEQKIAEIPKEEVKPFITESKPSVEQRKQDDKKIKACVEEVTTTLEETKFLTENLLLYIDINGNLHPDSATLVSDIDITFLKKDAPYIVGDVVQEGVLTAVVIPTKKAGGTTEMLAKALRKVPTDNYITTYPGQGLNGYTVEEAKTVLKKCKSAFYILPSIISNEKQEILGTVSWNLREMLAHAEETRKLMPVCVETKAIVSTIQRKYKGIKIQEGVVDYGARFYFYTSKTTVASLINTLNDLNETLVTMPLGYVTHGLNLEEAARYMRSLKVPATVSVSSPDAVTAYNGYLTSSSKTPEEHFIETISLAGSYKDWSYSGQSTQLGIEFLKRGDKSVYYTSNPTTFHLDGEVITFDNLKTLLSLREVRTIKVFTTVDNINLHTQVVDMSMTYGQQFGPTYLDGADVTKIKPHNSHEGKTFYVLPNDDTLRVEAFEYYHTTDPSFLGRYMSALNHTKKWKYPQVNGLTSIKWADNNCYLATALLTLQQIELKFNPPALQDAYYRARAGEAANFCALILAYCNKTVGELGDVRETMSYLFQHANLDSCKRVLNVVCKTCGQQQTTLKGVEAVMYMGTLSYEQFKKGVQIPCTCGKQATKYLVQQESPFVMMSAPPAQYELKHGTFTCASEYTGNYQCGHYKHITSKETLYCIDGALLTKSSEYKGPITDVFYKENSYTTTIKPVTYKLDGVVCTEIDPKLDNYYKKDNSYFTEQPIDLVPNQPYPNASFDNFKFVCDNIKFADDLNQLTGYKKPASRELKVTFFPDLNGDVVAIDYKHYTPSFKKGAKLLHKPIVWHVNNATNKATYKPNTWCIRCLWSTKPVETSNSFDVLKSEDAQGMDNLACEDLKPVSEEVVENPTIQKDVLECNVKTTEVVGDIILKPANNSLKITEEVGHTDLMAAYVDNSSLTIKKPNELSRVLGLKTLATHGLAAVNSVPWDTIANYAKPFLNKVVSTTTNIVTRCLNRVCTNYMPYFFTLLLQLCTFTRSTNSRIKASMPTTIAKNTVKSVGKFCLEASFNYLKSPNFSKLINIIIWFLLLSVCLGSLIYSTAALGVLMSNLGMPSYCTGYREGYLNSTNVTIATYCTGSIPCSVCLSGLDSLDTYPSLETIQITISSFKWDLTAFGLVAEWFLAYILFTRFFYVLGLAAIMQLFFSYFAVHFISNSWLMWLIINLVQMAPISAMVRMYIFFASFYYVWKSYVHVVDGCNSSTCMMCYKRNRATRVECTTIVNGVRRSFYVYANGGKGFCKLHNWNCVNCDTFCAGSTFISDEVARDLSLQFKRPINPTDQSSYIVDIVTVKNGSIHLYFDKAGQKTYERHSLSHFVNLDNLRANNTKGSLPINVIVFDGKSKCEESSAKSASVYYSQLMCQPILLLDQALVSDVGDSAEVAVKMFDAYVNTFSSTFNVPMEKLKTLVATAEAELAKNVSLDNVLSTFISAARQGFVDSDVETKDVVECLKLSHQSDIEVTGDSCNNYMLTYNKVENMTPRDLGACIDCSARHINAQVAKSHNIALIWNVKDFMSLSEQLRKQIRSAAKKNNLPFKLTCATTRQVVNVVTTKIALKGG

SEQ ID NO: 15831 - protein, 1946 aa, Artificial Sequence
  SARS-CoV-2__MT873462.1__non-structural protein 3 (NSP3)
MAPTKVTFGDDTVIEVQGYKSVNITFELDERIDKVLNEKCSAYTVELGTEVNEFACVVADAVIKTLQPVSELLTPLGIDLDEWSMATYYLFDESGEFKLASHMYCSFYPPDEDEEEGDCEEEEFEPSTQYEYGTEDDYQGKPLEFGATSAALQPEEEQEEDWLDDDSQQTVGQQDGSEDNQTTTIQTIVEVQPQLEMELTPVVQTIEVNSFSGYLKLTDNVYIKNADIVEEAKKVKPTVVVNAANVYLKHGGGVAGALNKATNNAMQVESDDYIATNGPLKVGGSCVLSGHNLAKHCLHVVGPNVNKGEDIQLLKSAYENFNQHEVLLAPLLSAGIFGADPIHSLRVCVDTVRTNVYLAVFDKNLYDKLVSSFLEMKSEKQVEQKIAEIPKEEVKPFITESKPSVEQRKQDDKKIKACVEEVTTTLEETKFLTENLLLYIDINGNLHPDSATLVSDIDITFLKKDAPYIVGDVVQEGVLTAVVIPTKKAGGTTEMLAKALRKVPTDNYITTYPGQGLNGYTVEEAKTVLKKCKSAFYILPSIISNEKQEILGTVSWNLREMLAHAEETRKLMPVCVETKAIVSTIQRKYKGIKIQEGVVDYGARFYFYTSKTTVASLINTLNDLNETLVTMPLGYVTHGLNLEEAARYMRSLKVPATVSVSSPDAVTAYNGYLTSSSKTPEEHFIETISLAGSYKDWSYSGQSTQLGIEFLKRGDKSVYYTSNPTTFHLDGEVITFDNLKTLLSLREVRTIKVFTTVDNINLHTQVVDMSMTYGQQFCPTYLDGADVTKIKPHNSHEGKTFYVLPNDDTLRVEAFEYYHTTDPSFLGRYMSALNHTKKWKYPQVNGLTSIKWADNNCYLATALLTLQQIELKFNPPALQDAYYRARAGEAANFCALILAYCNKTVGELGDVRETMSYLFQHANLDSCKRVLNVVCKTCGQQQTTLKGVEAVMYMGTLSYEQFKKGVQIPCTCGKQATKYLVQQESPFVMMSAPPAQYELKHGTFTCASEYTGNYQCGHYKHITSKETLYCIDGALLTKSSEYKGPITDVFYKENSYTTTIKPVTYKLDGVVCTEIDPKLDNYYKKDNSYFTEQPIDLVPNQPYPNASFDNFKFVCDNIKFADDLNQLTGYKKPASRELKVTFFPDLNGDVVAIDYKHYTPSFKKGAKLLHKPIVWHVNNATNKATYKPNTWCIRCLWSTKPVETSNSFDVLKSEDAQGMDNLACEDLKPVSEEVVENPTIQKDVLECNVKTTEVVGDIILKPANNSLKITEEVGHTDLMAAYVDNSSLTIKKPNELSRVLGLKTLATHGLAAVNSVPWDTIANYAKPFLNKVVSTTTNIVTRCLNRVCTNYMPYFFTLLLQLCTFTRSTNSRIKASMPTTIAKNTVKSVGKFCLEASFNYLKSPNFSKLINIIIWFLLLSVCLGSLIYSTAALGVLMSNLGMPSYCTGYREGYLNSTNVTIATYCTGSIPCSVCLSGLDSLDTYPSLETIQITISSFKWDLTAFGLVAEWFLAYILFTRFFYVLGLAAIMQLFFSYFAVHFISNSWLMWLIINLVQMAPISAMVRMYIFFASFYYVWKSYVHVVDGCNSSTCMMCYKRNRATRVECTTIVNGVRRSFYVYANGGKGFCKLHNWNCVNCDTFCAGSTFISDEVARDLSLQFKRPINPTDQSSYIVDSVTVKNGSIHLYFDKAGQKTYERHSLSHFVNLDNLRANNTKGSLPINVIVFDGKSKCEESSAKSASVYYSQLMCQPILLLDQALVSDVGDSAEVAVKMFDAYVNTFSSTFNVPMEKLKTLVATAEAELAKNVSLDNVLSTFISAARQGFVDSDVETKDVVECLKLSHQSDIEVTGDSCNNYMLTYNKVENMTPRDLGACIDCSARHINAQVAKSHNIALIWNVKDFMSLSEQLRKQIRSAAKKNNLPFKLTCATTRQVVNVVTTKIALKGG

SEQ ID NO: 15832 - protein, 1946 aa, Artificial Sequence
  SARS-CoV-2__MT873500.1__non-structural protein 3 (NSP3)
MAPTKVTFGDDTVIEVQGYKSVNITFELDERIDKVLNEKCSAYTVELGTEVNEFACVVADAVIKTLQPVSELLTPLGIDLDEWSMATYYLFDESGEFKLASHMYCSFYPPDEDEEEGDCEEEEFEPSTQYEYGTEDDYQGKPLEFGATSAALQPEEEQEEDWLDDDSQQTVGQQDGSEDNQTTTIQTIVEVQPQLEMELTPVVQTIEVNSFSGYLKLTDNVYIKNADIVEEAKKVKPTVVVNAANVYLKHGGGVAGALNKATNNAMQVESDDYIATNGPLKVGGSCVLSGHNLAKHCLHVVGPNVNKGEDIQLLKSAYENFNQHEVLLAPLLSAGIFGADPIHSLRVCVDTVRTNVYLAVFDKNLYDKLVSSFLEMKSEKQVEQKIAEIPKEEVKPFITESKPSVEQRKQDDKKIKACVEEVTTTLEETKFLTENLLLYIDINGNLHPDSATLVSDIDITFLKKDAPYIVGDVVQEGVLTAVVIPTKKAGGTTEMLAKALRKVPTDNYITTYPGQGLNGYTVEEAKTVLKKCKSAFYILPSIISNEKQEILGTVSWNLREMLAHAEETRKLMPVCVETKAIVSTIQRKYKGIKIQEGVVDYGARFYFYTSKTTVASLINTLNDLNETLVTMPLGYVTHGLNLEEAARYMRSLKVPATVSVSSPDAVTAYNGYLTSSSKTPEEHFIETISLAGSYKDWSYSGQSTQLGIEFLKRGDKSVYYTSNPTTFHLDGEVITFDNLKTLLSLREVRTIKVFTTVDNINLHTQVVDMSMTYGQQFGPTYLDGADVTKIKPHNSHEGKTFYVLPNDDTLRVEAFEYYHTTDPSFLGRYMSALNHTKKWKYPQVNGLTSIKWADNNCYLATALLTLQQIELKFNPPALQDAYYRARAGEAANFCALILAYCNKTVGELGDVRETMSYLFQHANLDSCKRVLNVVCKTCGQQQTTLKGVEAVMYMGTLSYEQFKKGVQIPCTCGKQATKYLVQQESPFVMMSAPPAQYELKHGTFTCASEYTGNYQCGHYKHITSKETLYCIDGALLTKSSEYKGPITDVFYKENSYTTTIKPVTYKLDGVVCTEIDPKLDNYYKKDNSYFTEQPIDLVPNQPYPNASFDNFKFVCDNIKFADDLNQLTGYKKPASRELKVTFFPDLNGDVVAIDYKHYTPSFKKGAKLLHKPIVWHVNNATNKATYKPNTWCIRCLWSTKPVETSNSFDVLKSEDAQGMDNLACEDLKPVSEEVVENPTIQKDVLECNVKTTEVVGDIILKPANNSLKITEEVGHTDLMAAYVDNSSLTIKKPNELSRVLGLKTLATHGLAVVNSVPWDTIANYAKPFLNKVVSTTTNIVTRCLNRVCTNYMPYFFTLLLQLCTFTRSTNSRIKASMPTTIAKNTVKSVGKFCLEASFNYLKSPNFSKLINIIIWFLLLSVCLGSLIYSTAALGVLMSNLGMPSYCTGYREGYLNSTNVTIATYCTGSIPCSVCLSGLDSLDTYPSLETIQITISSFKWDLTAFGLVAEWFLAYILFTRFFYVLGLAAIMQLFFSYFAVHFISNSWLMWLIINLVQMAPISAMVRMYIFFASFYYVWKSYVHVVDGCNSSTCMMCYKRNRATRVECTTIVNGVRRSFYVYANGGKGFCKLHNWNCVNCDTFCAGSTFISDEVARDLSLQFKRPINPTDQSSYIVDSVTVKNGSIHLYFDKAGQKTYERHSLSHFVNLDNLRANNTKGSLPINVIVFDGKSKCEESSAKSASVYYSQLMCQPILLLDQALVSDVGDSAEVAVKMFDAYVNTFSSTFNVPMEKLKTLVATAEAELAKNVSLDNVLSTFISAARQGFVDSDVETKDVVECLKLSHQSDIEVTGDSCNNYMLTYNKVENMTPRDLGACIDCSARHINAQVAKSHNIALIWNVKDFMSLSEQLRKQIRSAAKKNNLPFKLTCATTRQVVNVVTTKIALKGG

SEQ ID NO: 15833 - protein, 1946 aa, Artificial Sequence
  SARS-CoV-2__MT873506.1__non-structural protein 3 (NSP3)
MAPTKVTFGDDTVIEVQGYKSVNITFELDERIDKVLNEKCSAYTVELGTEVNEFACVVADAVIKTLQPVSELLTPLGIDLDEWSMATYYLFDESGEFKLASHMYCSFYPPDEDEEEGDCEEEEFEPSTQYEYGTEDDYQGKPLEFGATSAALQPEEEQEEDWLDDDSQQTVGQQDGSEDNQTTTIQTIVEVQPQLEMELTPVVQTIEVNSFSGYLKLTDNVYIKNADIVEEAKKVKPTVVVNAANVYLKHGGGVAGALNKATNNAMQVESDDYIATNGPLKVGGSCVLSGHNLAKHCLHVVGPNVNKGEDIQLLKSAYENFNQHEVLLAPLLSAGIFGADPIHSLRVCVDTVRTNVYLAVFDKNLYDKLVSSFLEMKSEKQVEQKIAEIPKEEVKPFITESKPSVEQRKQDDKKIKACVEEVTTTLEETKFLTENLLLYIDINGNLHPDSATLVSDIDITFLKKDAPYIVGDVVQEGVLTAVVIPTKKAGGTTEMLAKALRKVPTDNYITTYPGQGLNGYTVEEAKTVLKKCKSAFYILPSIISNEKQEILGTVSWNLREMLAHAEETRKLMPVCVETKAIVSTIQRKYKGIKIQEGVVDYGARFYFYTSKTTVASLINTLNDLNETLVTMPLGYVTHGLNLEEAARYMRSLKVPATVSVSSPDAVTAYNGYLTSSSKTPEEHFIETISLAGSYKDWSYSGQSTQLGIEFLKRGDKSVYYTSNPTTFHLDGEVITFDNLKTLLSLREVRTIKVFTTVDNINLHTQVVDMSMTYGQQFGPTYLDGADVTKIKPHNSHEGKTFYVLPNDDTLRVEAFEYYHTTDPSFLGRYMSALNHTKKWKYPQVNGLTSIKWADNNCYLATALLTLQQIELKFNPPALQDAYYRARAGEAANFCALILAYCNKTVGELGDVRETMSYLFQHANLDSCKRVLNVVCKTCGQQQTTLKGVEAVMYMGTLSYEQFKKGVQIPCTCGKQATKYLVQQESPFVMMSAPPAQYELKHGTFTCASEYTGNYQCGHYKHITSKETLYCIDGALLTKSSEYKGPITDVFYKENSYTTTIKPVTYKLDGVVCTEIDPKLDNYYKKDNSYFTEQPIDLVPNQPYPNASFDNFKFVCDNIKFADDLNQLTGYKKPASRELKVTFFPDLNGDVVAIDYKHYTPSFKKGAKLLHKPIVWHVNNATNKATYKPNTWCIRCLWSTKPVETSNSFDVLKSEDAQGMDNLACEDLKPVSEEVVENPTIQKDVLECNVKTTEVVGDIILKPANNSLKITEEVGHTDLMAAYVDNSSLTIKKPNELSRVLGLKTLATHGLAAVNSVPWDTIANYAKPFLNKVVSTTTNIVTRCLNRVCTNYMPYFFTLLLQLCTFTRSTNSRIKASMPTTIAKNTVKSVGKFCLEASFNYLKSPNFSKLINIIIWFLLLSVCLGSLIYSTAALGVLMSNLGMPSYCTGYREGYLNSTNVTIATYCTGSIPCSVCLSGLDSLDTYPSLETIQITISSFKWDLTAFGLVAEWFLAYILFTRFFYVLGLAAIMQLFFSYFAVHFISNSWLMWLIINLVQMAPISAMVRMYIFFASFYYVWKSYVHVVDGCNSSTCMMCYKRNRATRVECTTIVNGVRRSFYVYANGGKGFCKLHNWNCVNCDTFCAGSTFISDEVARDLSLQFKRPINPTDQSSYIVDSVTVKNGSIHLYFDKAGQKTYERHSLSHFVNLDNLRANNTKGSLPINVIVFDGKSKCEESSAKSASVYYSHLMCQPILLLDQALVSDVGDSAEVAVKMFDAYVNTFSSTFNVPMEKLKTLVATAEAELAKNVSLDNVLSTFISAARQGFVDSDVETKDVVECLKLSHQSDIEVTGDSCNNYMLTYNKVENMTPRDLGACIDCSARHINAQVAKSHNIALIWNVKDFMSLSEQLRKQIRSAAKKNNLPFKLTCATTRQVVNVVTTKIALKGG

SEQ ID NO: 15834 - protein, 1946 aa, Artificial Sequence
  SARS-CoV-2__MT876527.1__non-structural protein 3 (NSP3)
MAPTKVTFGDDTVIEVQGYKSVNITFELDERIDKVLNEKCSAYTVELGTEVNEFACVVADAVIKTLQPVSELLTPLGIDLDEWSMATYYLFDESGEFKLASHMYCSFYPPDEDEEEGDCEEEEFEPSTQYEYGTEDDYQGKPLEFGATSAALQPEEEQEEDWLDDDSQQTVGQQDGSEDNQTTTIQTIVEVQPQLEMELTPVVQTIEVNSFSGYLKLTDNVYIKNADIVEEAKKVKPTVVVNAANVYLKHGGGVAGALNKATNNAMQVESDDYIATNGPLKVGGSCVLSGHNLAKHCLHVVGPNVNKGEDIQLLKSAYENFNQHEVLLAPLLSAGIFGADPIHSLRVCVDTVRTNVYLAVFDKNLYDKLVSSFLEMKSEKQVEQKIAEIPKEEVKPFITESKPSVEQRKQDDKKIKACVEEVTTTLEETKFLTENLLLYIDINGNLHPDSATLVSDIDITFLKKDAPYIVGDVVQEGVLTAVVIPTKKAGGTTEMLAKALRKVPTDNYITTYPGQGLNGYTVEEAKTVLKKCKSAFYILPSIISNEKQEILGTVSWNLREMLAHAEETRKLMPVCVETKAIVSTIQRKYKGIKIQEGVVDYGARFYFYTSKTTVASLINTLNDLNETLVTMPLGYVTHGLNLEEAARYMRSLKVPATVSVSSPDAVTAYNGYLTSSSKTPEEHFIETISLAGSYKDWSYSGQSTQLGIEFLKRGDKSVYYTSNPTTFHLDGEVITFDNLKTLLSLREVRTIKVFTTVDNINLHTQVVDMSMTYGQQFGPTYLDGADVTKIKPHNSHEGKTFYVLPNDDTLRVEAFEYYHTTDPSFLGRYMSALNHTKKWKYPQVNGLTSIKWADNNCYLATALLTLQQIELKFNPPALQDAYYRARAGEAANFCALILAYCNKTVGELGDVRETMSYLFQHANLDSCKRVLNVVCKTCGQQQTTLKGVEAVMYMGTLSYEQFKKGVQIPCTCGKQATKYLVQQESPFVMMSAPPAQYELKHGTFTCASEYTGNYQCGHYKHITSKETLYCIDGALLTKSSEYKGPITDVFYKENSYTTTIKPVTYKLDGVVCTEIDPKLDNYYKKDNSYFTEQPIDLVPNQPYPNASFDNFKFVCDNIKFADDLNQLTGYKKPASRELKVTFFPDLNGDVVAIDYKHYTPSFKKGAKLLHKPIVWHVNNATNKATYKPNTWCIRCLWSTKPVETSNSFDVLKSEDAQGMDNLACEDLKPVSEEVVENPTIQKDVLECNVKTTEVVGDIILKPANNSLKITEEVGHTDLMAAYVDNSSLTIKKPNELSRVLGLKTLATHGLAAVNSVPWDTIANYAKPFLNKVVSTTTNIVTRCLNRVCTNYMPYFFTLLLQLCTFTRSTNSRIKASMPTTIAKNTVKSVGKFCLEASFNYLKSPNFSKLINIIIWFLLLSVCLGSLIYSTAALGVLMSNLGMPSYCTGYREGYLNSTNVTIATYCIGSIPCSVCLSGLDSLDTYPSLETIQITISSFKWDLTAFGLVAEWFLAYILFTRFFYVLGLAAIMQLFFSYFAVHFISNSWLMWLIINLVQMAPISAMVRMYIFFASFYYVWKSYVHVVDGCNSSTCMMCYKRNRATRVECTTIVNGVRRSFYVYANGGKGFCKLHNWNCVNCDTFCAGSTFISDEVARDLSLQFKRPINPTDQSSYIVDSVTVKNGSIHLYFDKAGQKTYERHSLSHFVNLDNLRANNTKGSLPINVIVFDGKSKCEESSAKSASVYYSQLMCQPILLLDQALVSDVGDSAEVAVKMFDAYVNTFSSTFNVPMEKLKTLVATAEAELAKNVSLDNVLSTFISAARQGFVDSDVETKDVVECLKLSHQSDIEVTGDSCNNYMLTYNKVENMTPRDLGACIDCSARHINAQVAKSHNIALIWNVKDFMSLSEQLRKQIRSAAKKNNLPFKLTCATTRQVVNVVTTKIALKGG

SEQ ID NO: 15835 - protein, 1946 aa, Artificial Sequence
  SARS-CoV-2__MT876547.1__non-structural protein 3 (NSP3)
MAPTKVTFGDDTVIEVQGYKSVNITFELDERIDKVLNEKCSAYTVELGTEVNEFACVVADAVIKTLQPVSELLTPLGIDLDEWSMATYYLFDESGEFKLASHMYCSFYPPDEDEEEGDCEEEEFEPSTQYEYGTEDDYQGKPLEFGATSAALQPEEEQEEDWLDDDSQQTVGQQDGSEDNQTTTIQTIVEVQPQLEMELTPVVQTIEVNSFSGYLKLTDNVYIKNADIVEEAKKVKPTVVVNAANVYLKHGGGVAGALNKATNNAMQVESDDYIATNGPLKVGGSCVLSGHNLAKHCLHVVGPNVNKGEDIQLLKSAYENFNQHEVLLAPLLSAGIFGADPIHSLRVCVDTVRTNVYLAVFDKNLYDKLVSSFLEMKSEKQVEQKIAEIPKEEVKPFITESKPSVEQRKQDDKKIKACVEEVTTTLEETKFLTENLLLYIDINGNLHPDSATLVSDIDITFLKKDAPYIVGDVVQEGVLTAVVIPTKKAGGTTEMLAKALRKVPTDNYITTYPGQGLNGYTVEEAKTVLKKCKSAFYILPSIISNEKQEILGTVSWNLREMLAHAEETRKLMPVCVETKAIVSTIQRKYKGIKIQEGVVDYGARFYFYTSKTTVASLINTLNDLNETLVTMPLGYVTHGLNLEEAARYMRSLKVPATVSVSSPDAVTAYNGYLTSSSKTPEEHFIETISLAGSYKDWSYSGQSTQLGIEFLKRGDKSVYYTSNPTTFHLDGEVITFDNLKTLLSLREVRTIKVFTTVDNINLHTQVVDMSMTYGQQFGPTYLDGADVTKIKPHNSHEGKTFYVLPNDDTLRVEAFEYYHTTDPSFLGRYMSALNHTKKWKYPQVNGLTSIKWADNNCYLATALLTLQQIELKFNPPALQDAYYRARAGEAANFCALILAYCNKTVGELGDVRETMSYLFQHANLDSCKRVLNVVCKTCGQQQTTLKGVEAVMYMGTLSYEQFKKGVQIPCTCGKQATKYLVQQESPFVMMSAPPAQYELKHGTFTCASEYTGNYQCGHYKHITSKETLYCIDGALLTKSSEYKGPITDVFYKENSYTTTIKPVTYKLDGVVCTEIDPKLDNYYKKDNSYFTEQPIDLVPNQPYPNASFDNFKFVCDNIKFADDLNQLTGYKKPASRELKVTFFPDLNGDVVAIDYKHYTPSFKKGAKLLHKPIVWHVNNATNKATYKPNTWCIRCLWSTKPVETSNSFDVLKSEDAQGMDNLACEDLKPVSEEVVENPTIQKDVLECNVKTTEVVGDIILKPANNSLKITEEVGHTDLMAAYVDNSSLTIKKPNELSRVLGLKTLATHGLAAVNSVPWDTIANYAKPFLNKVVSTTTNIVTRCLNRVCTNYMPYFFTLLLQLCIFTRSTNSRIKASMPTTIAKNTVKSVGKFCLEASFNYLKSPNFSKLINIIIWFLLLSVCLGSLIYSTAALGVLMSNLGMPSYCTGYREGYLNSTNVTIATYCTGSIPCSVCLSGLDSLDTYPSLETIQITISSFKWDLTAFGLVAEWFLAYILFTRFFYVLGLAAIMQLFFSYFAVHFISNSWLMWLIINLVQMAPISAMVRMYIFFASFYYVWKSYVHVVDGCNSSTCMMCYKRNRATRVECTTIVNGVRRSFYVYANGGKGFCKLHNWNCVNCDTFCAGSTFISDEVARDLSLQFKRPINPTDQSSYIVDSVTVKNGSIHLYFDKAGQKTYERHSLSHFVNLDNLRANNTKGSLPINVIVFDGKSKCEESSAKSASVYYSQLMCQPILLLDQALVSDVGDSAEVAVKMFDAYVNTFSSTFNVPMEKLKTLVATAEAELAKNVSLDNVLSTFISAARQGFVDSDVETKDVVECLKLSHQSDIEVTGDSCNNYMLTYNKVENMTPRDLGACIDCSARHINAQVAKSHNIALIWNVKDFMSLSEQLRKQIRSAAKKNNLPFKLTCATTRQVVNVVTTKIALKGG

SEQ ID NO: 15836 - protein, 1946 aa, Artificial Sequence
  SARS-CoV-2__MT876555.1__non-structural protein 3 (NSP3)
MAPTKVTFGDDTVIEVQGYKSVNITFELDERIDKVLNEKCSAYTVELGTEVNEFACVVADAVIKILQPVSELLTPLGIDLDEWSMATYYLFDESGEFKLASHMYCSFYPPDEDEEEGDCEEEEFEPSTQYEYGTEDDYQGKPLEFGATSAALQPEEEQEEDWLDDDSQQTVGQQDGSEDNQTTTIQTIVEVQPQLEMELTPVVQTIEVNSFSGYLKLTDNVYIKNADIVEEAKKVKPTVVVNAANVYLKHGGGVAGALNKATNNAMQVESDDYIATNGPLKVGGSCVLSGHNLAKHCLHVVGPNVNKGEDIQLLKSAYENFNQHEVLLAPLLSAGIFGADPIHSLRVCVDTVRTNVYLAVFDKNLYDKLVSSFLEMKSEKQVEQKIAEIPKEEVKPFITESKPSVEQRKQDDKKIKACVEEVTTTLEETKFLTENLLLYIDINGNLHPDSATLVSDIDITFLKKDAPYIVGDVVQEGVLTAVVIPTKKAGGTTEMLAKALRKVPTDNYITTYPGQGLNGYTVEEAKTVLKKCKSAFYILPSIISNEKQEILGTVSWNLREMLAHAEETRKLMPVCVETKAIVSTIQRKYKGIKIQEGVVDYGARFYFYTSKTTVASLINTLNDLNETLVTMPLGYVTHGLNLEEAARYMRSLKVPATVSVSSPDAVTAYNGYLTSSSKTPEEHFIETISLAGSYKDWSYSGQSTQLGIEFLKRGDKSVYYTSNPTTFHLDGEVITFDNLKTLLSLREVRTIKVFTTVDNINLHTQVVDMSMTYGQQFGPTYLDGADVTKIKPHNSHEGKTFYVLPNDDTLRVEAFEYYHTTDPSFLGRYMSALNHTKKWKYPQVNGLTSIKWADNNCYLATALLTLQQIELKFNPPALQDAYYRARAGEAANFCALILAYCNKTVGELGDVRETMSYLFQHANLDSCKRVLNVVCKTCGQQQTTLKGVEAVMYMGTLSYEQFKKGVQIPCTCGKQATKYLVQQESPFVMMSAPPAQYELKHGTFTCASEYTGNYQCGHYKHITSKETLYCIDGALLTKSSEYKGPITDVFYKENSYTTTIKPVTYKLDGVVCTEIDPNLDNYYKKDNSYFTEQPIDLVPNQPYPNASFDNFKFVCDNIKFADDLNQLTGYKKPASRELKVTFFPDLNGDVVAIDYKHYTPSFKKGAKLLHKPIVWHVNNATNKATYKPNTWCIRCLWSTKPVETSNSFDVLKSEDAQGMDNLACEDLKPVSEEVVENPTIQKDVLECNVKTTEVVGDIILKPANNSLKITEEVGHTDLMAAYVDNSSLTIKKPNELSRVLGLKTLATHGLAAVNSVPWDTIANYAKPFLNKVVSTTTNIVTRCLNRVCTNYMPYFFTLLLQLCTFTRSTNSRIKASMPTTIAKNTVKSVGKFCLEASFNYLKSPNFSKLINIIIWFLLLSVCLGSLIYSTAALGVLMSNLGMPSYCTGYREGYLNSTNVTIATYCTGSIPCSVCLSGLDSLDTYPSLETIQITISSFKWDLTAFGLVAEWFLAYILFTRFFYVLGLAAIMQLFFSYFAVHFISNSWLMWLIINLVQMAPISAMVRMYIFFASFYYVWKSYVHVVDGCNSSTCMMCYKRNRATRVECTTIVNGVRRSFYVYANGGKGFCKLHNWNCVNCDTFCAGSTFISDEVARDLSLQFKRPINPTDQSSYIVDSVTVKNGSIHLYFDKAGQKTYERHSLSHFVNLDNLRANNTKGSLPINVIVFDGKSKCEESSAKSASVYYSQLMCQPILLLDQALVSDVGDSAEVAVKMFDAYVNTFSSTFNVPMEKLKTLVATAEAELAKNVSLDNVLSTFISAARQGFVDSDVETKDVVECLKLSHQSDIEVTGDSCNNYMLTYNKVENMTPRDLGACIDCSARHINAQVAKSHNIALIWNVKDFMSLSEQLRKQIRSAAKKNNLPFKLTCATTRQVVNVVTTKIALKGG

SEQ ID NO: 15837 - protein, 1946 aa, Artificial Sequence
  SARS-CoV-2__MT876556.1__non-structural protein 3 (NSP3)
MAPTKVTFGDDTVIEVQGYKSVNITFELDARIDKVLNEKCSAYTVELGTEVNEFACVVADAVIKTLQPVSELLTPLGIDLDEWSMATYYLFDESGEFKLASHMYCSFYPPDEDEEEGDCEEEEFEPSTQYEYGTEDDYQGKPLEFGATSAALQPEEEQEEDWLDDDSQQTVGQQDGSEDNQTTTIQTIVEVQPQLEMELTPVVQTIEVNSFSGYLKLTDNVYIKNADIVEEAKKVKPTVVVNAANVYLKHGGGVAGALNKATNNAMQVESDDYIATNGPLKVGGSCVLSGHNLAKHCLHVVGPNVNKGEDIQLLKSAYENFNQHEVLLAPLLSAGIFGADPIHSLRVCVDTVRTNVYLAVFDKNLYDKLVSSFLEMKSEKQVEQKIAEIPKEEVKPFITESKPSVEQRKQDDKKIKACVEEVTTTLEETKFLTENLLLYIDINGNLHPDSATLVSDIDITFLKKDAPYIVGDVVQEGVLTAVVIPTKKAGGTTEMLAKALRKVPTDNYITTYPGQGLNGYTVEEAKTVLKKCKSAFYILPSIISNEKQEILGTVSWNLREMLAHAEETRKLMPVCVETKAIVSTIQRKYKGIKIQEGVVDYGARFYFYTSKTTVASLINTLNDLNETLVTMPLGYVTHGLNLEEAARYMRSLKVPATVSVSSPDAVTAYNGYLTSSSKTPEEHFIETISLAGSYKDWSYSGQSTQLGIEFLKRGDKSVYYTSNPTTFHLDGEVITFDNLKTLLSLREVRTIKVFTTVDNINLHTQVVDMSMTYGQQFGPTYLDGADVTKIKPHNSHEGKTFYVLPNDDTLRVEAFEYYHTTDPSFLGRYMSALNHTKKWKYPQVNGLTSIKWADNNCYLATALLTLQQIELKFNPPALQDAYYRARAGEAANFCALILAYCNKTVGELGDVRETMSYLFQHANLDSCKRVLNVVCKTCGQQQTTLKGVEAVMYMGTLSYEQFKKGVQIPCTCGKQATKYLVQQESPFVMMSAPPAQYELKHGTFTCASEYTGNYQCGHYKHITSKETLYCIDGALLTKSSEYKGPITDVFYKENSYTTTIKPVTYKLDGVVCTEIDPKLDNYYKKDNSYFTEQPIDLVPNQPYPNASFDNFKFVCDNIKFADDLNQLTGYKKPASRELKVTFFPDLNGDVVAIDYKHYTPSFKKGAKLLHKPIVWHVNNATNKATYKPNTWCIRCLWSTKPVETSNSFDVLKSEDAQGMDNLACEDLKPVSEEVVENPTIQKDVLECNVKTTEVVGDIILKPANNSLKITEEVGHTDLMAAYVDNSSLTIKKPNELSRVLGLKTLATHGLAAVNSVPWDTIANYAKPFLNKVVSTTTNIVTRCLNRVCTNYMPYFFTLLLQLCTFTRSTNSRIKASMPTTIAKNTVKSVGKFCLEASFNYLKSPNFSKLINIIIWFLLLSVCLGSLIYSTAALGVLMSNLGMPSYCTGYREGYLNSTNVTIATYCTGSIPCSVCLSGLDSLDTYPSLETIQITISSFKWDLTAFGLVAEWFLAYILFTRFFYVLGLAAIMQLFFSYFAVHFISNSWLMWLIINLVQMAPISAMVRMYIFFASFYYVWKSYVHVVDGCNSSTCMMCYKRNRATRVECTTIVNGVRRSFYVYANGGKGFCKLHNWNCVNCDTFCAGSTFISDEVARDLSLQFKRPINPTDQSSYIVDSVTVKNGSIHLYFDKAGQKTYERHSLSHFVNLDNLRANNTKGSLPINVIVFDGKSKCEESSAKSASVYYSQLMCQPILLLDQALVSDVGDSAEVAVKMFDAYVNTFSSTFNVPMEKLKTLVATAEAELAKNVSLDNVLSTFISAARQGFVDSDVETKDVVECLKLSHQSDIEVTGDSCNNYMLTYNKVENMTPRDLGACIDCSARHINAQVAKSHNIALIWNVKDFMSLSEQLRKQIRSAAKKNNLPFKLTCATTRQVVNVVTTKIALKGG

SEQ ID NO: 15838 - protein, 1946 aa, Artificial Sequence
  SARS-CoV-2__MT876598.1__non-structural protein 3 (NSP3)
MAPTKVTFGDDTVIEVQGYKSVNITFELDERIDKVLNEKCSAYTVELGTEVNEFACVVADAVIKTLQPVSELLTPLGIDLDEWSMATYYLFDESGEFKLASHMYCSFYPPDEDEEEGDCEEEEFEPSTQYEYGTEDDYQGKPLEFGATSAALQPEEEQEEDWLDDDSQQTVGQQDGSEDNQTTTIQTIVEVQPQLEMELTPVVQTIEVNSFSGYLKLTDNVYIKNADIVEEAKKVKPTVVVNAANVYLKHGGGVAGALNKATNNAMQVESDDYIATNGPLKVGGSCVLSGHNLAKHCLHVVGPNVNKGEDIQLLKSAYENFNQHEVLLAPLLSAGIFGADPIHSLRVCVDTVRTNVYLAVFDKNLYDKLVSSFLEMKSEKQVEQKIAEIPKEEVKPFITESKPSVEQRKQDDKKIKACVEEVTTTLEETKFLTENLLLYIDINGNLHPDSATLVSDIDITFLKKDAPYIVGDVVQEGVLTAVVIPTKKAGGTTEMLAKALRKVPTDNYITTYPGQGLNGYTVEEAKTVLKKCKSAFYILPSIISNEKQEILGTVSWNLREMLAHAEETRKLMPVCVETKAIVSTIQRKYKGIKIQEGVVDYGARFYFYTSKTTVASLINTLNDLNETLVTMPLGYVTHGLNLEEAARYMRSLKVPATVSVSSPDAVTAYNGYLTSSSKTPEEHFIETVSLAGSYKDWSYSGQSTQLGIEFLKRGDKSVYYTSNPTTFHLDGEVITFDNLKTLLSLREVRTIKVFTTVDNINLHTQVVDMSMTYGQQFGPTYLDGADVTKIKPHNSHEGKTFYVLPNDDTLRVEAFEYYHTTDPSFLGRYMSALNHTKKWKYPQVNGLTSIKWADNNCYLATALLTLQQIELKFNPPALQDAYYRARAGEAANFCALILAYCNKTVGELGDVRETMSYLFQHANLDSCKRVLNVVCKTCGQQQTTLKGVEAVMYMGTLSYEQFKKGVQIPCTCGKQATKYLVQQESPFVMMSAPPAQYELKHGTFTCASEYTGNYQCGHYKHITSKETLYCIDGALLTKSSEYKGPITDVFYKENSYTTTIKPVTYKLDGVVCTEIDPKLDNYYKKDNSYFTEQPIDLVPNQPYPNASFDNFKFVCDNIKFADDLNQLTGYKKPASRELKVTFFPDLNGDVVAIDYKHYTPSFKKGAKLLHKPIVWHVNNATNKATYKPNTWCIRCLWSTKPVETSNSFDVLKSEDAQGMDNLACEDLKPVSEEVVENPTIQKDVLECNVKTTEVVGDIILKPANNSLKITEEVGHTDLMAAYVDNSSLTIKKPNELSRVLGLKTLATHGLAAVNSVPWDTIANYAKPFLNKVVSTTTNIVTRCLNRVCTNYMPYFFTLLLQLCTFTRSTNSRIKASMPTTIAKNTVKSVGKFCLEASFNYLKSPNFSKLINIIIWFLLLSVCLGSLIYSTAALGVLMSNLGMPSYCTGYREGYLNSTNVTIATYCTGSIPCSVCLSGLDSLDTYPSLETIQITISSFKWDLTAFGLVAEWFLAYILFTRFFYVLGLAAIMQLFFSYFAVHFISNSWLMWLIINLVQMAPISAMVRMYIFFASFYYVWKSYVHVVDGCNSSTCMMCYKRNRATRVECTTIVNGVRRSFYVYANGGKGFCKLHNWNCVNCDTFCAGSTFISDEVARDLSLQFKRPINPTDQSSYIVDSVTVKNGSIHLYFDKAGQKTYERHSLSHFVNLDNLRANNTKGSLPINVIVFDGKSKCEESSAKSASVYYSQLMCQPILLLDQALVSDVGDSAEVAVKMFDAYVNTFSSTFNVPMEKLKTLVATAEAELAKNVSLDNVLSTFISAARQGFVDSDVETKDVVECLKLSHQSDIEVTGDSCNNYMLTYNKVENMTPRDLGACIDCSARHINAQVAKSHNIALIWNVKDFMSLSEQLRKQIRSAAKKNNLPFKLTCATTRQVVNVVTTKIALKGG

SEQ ID NO: 15839 - protein, 1946 aa, Artificial Sequence
  SARS-CoV-2__MT876599.1__non-structural protein 3 (NSP3)
MAPTKVTFGDDTVIEVQGYKSVNITFELDERIDKVLNEKCSAYTVELGTEVNEFACVVADAVIKTLQPVSELLTPLGIDLDEWSMATYYLFDESGEFKLASHMYCSFYPPDEDEEEGDCEEEEFEPSTQYEYGTEDDYQGKPLEFGATSAALQPEEEQEEDWLDDDSQQTVGQQDGSEDNQTTTIQTIVEVQPQLEMELTPVVQTIEVNSFSGYLKLTDNVYIKNADIVEEAKKVKPTVVVNAANVYLKHGGGVAGALNKATNNAMQVESDDYIATNGPLKVGGSCVLSGHNLAKHCLHVVGPNVNKGEDIQLLKSAYENFNQHEVLLAPLLSAGIFGADPIHSLRVCVDTVRTNVYLAVFDKNLYDKLVSSFLEMKSEKQVEQKIAEIPKEEVKPFITESKPSVEQRKQDDKKIKACVEEVTTTLEETKFLTENLLLYIDINGNLHPDSATLVSDIDITFLKKDAPYIVGDVVQEGVLTAVVIPTKKAGGTTEMLAKALRKVPTDNYITTYPGQGLNGYTVEEAKTVLKKCKSAFYILPSIISNEKQEILGTVSWNLREMLAHAEETRKLMPVCVETKAIVSTIQRKYKGIKIQEGVVDYGARFYFYTSKTTVASLINTLNDLNETLVTMPLGYVTHGLNLEEAARYMRSLKVPATVSVSSPDAVTAYNGYLTSSSKTPEEHFIETISLAGSYKDWSYSGQSTQLGIEFLKRGDKSVYYTSNPTTFHLDGEVITFDNLKTLLSLREVRTIKVFTTVDNINLHTQVVDMSMTYAQQFGPTYLDGADVTKIKPHNSHEGKTFYVLPNDDTLRVEAFEYYHTTDPSFLGRYMSALNHTKKWKYPQVNGLTSIKWADNNCYLATALLTLQQIELKFNPPALQDAYYRARAGEAANFCALILAYCNKTVGELGDVRETMSYLFQHANLDSCKRVLNVVCKTCGQQQTTLKGVEAVMYMGTLSYEQFKKGVQIPCTCGKQATKYLVQQESPFVMMSAPPAQYELKHGTFTCASEYTGNYQCGHYKHITSKETLYCIDGALLTKSSEYKGPITDVFYKENSYTTTIKPVTYKLDGVVCTEIDPKLDNYYKKDNSYFTEQPIDLVPNQPYPNASFDNFKFVCDNIKFADDLNQLTGYKKPASRELKVTFFPDLNGDVVAIDYKHYTPSFKKGAKLLHKPIVWHVNNATNKATYKPNTWCIRCLWSTKPVETSNSFDVLKSEDAQGMDNLACEDLKPVSEEVVENPTIQKDVLECNVKTTEVVGDIILKPANNSLKITEEVGHTDLMAAYVDNSSLTIKKPNELSRVLGLKTLATHGLAAVNSVPWDTIANYAKPFLNKVVSTTTNIVTRCLNRVCTNYMPYFFTLLLQLCTFTRSTNSRIKASMPTTIAKNTVKSVGKFCLEASFNYLKSPNFSKLINIIIWFLLLSVCLGSLIYSTAALGVLMSNLGMPSYCTGYREGYLNSTNVTIATYCTGSIPCSVCLSGLDSLDTYPSLETIQITISSFKWDLTAFGLVAEWFLAYILFTRFFYVLGLAAIMQLFFSYFAVHFISNSWLMWLIINLVQMAPISAMVRMYIFFASFYYVWKSYVHVVDGCNSSTCMMCYKRNRATRVECTTIVNGVRRSFYVYANGGKGFCKLHNWNCVNCDTFCAGSTFISDEVARDLSLQFKRPINPTDQSSYIVDSVTVKNGSIHLYFDKAGQKTYERHSLSHFVNLDNLRANNTKGSLPINVIVFDGKSKCEESSAKSASVYYSQLMCQPILLLDQALVSDVGDSAEVAVKMFDAYVNTFSSTFNVPMEKLKTLVATAEAELAKNVSLDNVLATFISAARQGFVDSDVETKDVVECLKLSHQSDIEVTGDSCNNYMLTYNKVENMTPRDLGACIDCSARHINAQVAKSHNIALIWNVKDFMSLSEQLRKQIRSAAKKNNLPFKLTCATTRQVVNVVTTKIALKGG

SEQ ID NO: 15840 - protein, 1946 aa, Artificial Sequence
  SARS-CoV-2__MT876607.1__non-structural protein 3 (NSP3)
MAPTKVTFGDDTVIEVQGYKSVNITFELDERIDKVLNEKCSAYTVELGTEVNEFACVVADAVIKTLQPVSELLTPLGIDLDEWSMATYYLFDESGEFKLASHMYCSFYPPDEDEEEGDCEEEEFEPSTQYEYGTEDDYQGKPLEFGATSAALQPEEEQEEDWLDDDSQQTVGQQDGSEDNQTTTIQTIVEVQPQLEMELTPVVQTIEVNSFSGYLKLTDNVYIKNADIVEEAKKVKPTVVVNAANVYLKHGGGVAGALNKATNNAMQVESDDYIATNGPLKVGGSCVLSGHNLAKHCLHVVGPNVNKGEDIQLLKSAYENFNQHEVLLAPLLSAGIFGADPIHSLRVCVDTVRTNVYLAVFDKNLYDKLVSSFLEMKSEKQVEQKIAEIPKEEVKPFITESKPSVEQRKQDDKKIKACVEEVTTTLEETKFLTENLLLYIDINGNLHPDSATLVSDIDITFLKKDVPYIVGDVVQEGVLTAVVIPTKKAGGTTEMLAKALRKVPTDNYITTYPGQGLNGYTVEEAKTVLKKCKSAFYILPSIISNEKQEILGTVSWNLREMLAHAEETRKLMPVCVETKAIVSTIQRKYKGIKIQEGVVDYGARFYFYTSKTTVASLINTLNDLNETLVTMPLGYVTHGLNLEEAARYMRSLKVPATVSVSSPDAVTAYNGYLTSSSKTPEEHFIETISLAGSYKDWSYSGQSTQLGIEFLKRGDKSVYYTSNPTTFHLDGEVITFDNLKTLLSLREVRTIKVFTTVDNINLHTQVVDMSMTYGQQFGPTYLDGADVTKIKPHNSHEGKTFYVLPNDDTLRVEAFEYYHTTDPSFLGRYMSALNHTKKWKYPQVNGLTSIKWADNNCYLATALLTLQQIELKFNPPALQDAYYRARAGEAANFCALILAYCNKTVGELGDVRETMSYLFQHANLDSCKRVLNVVCKTCGQQQTTLKGVEAVMYMGTLSYEQFKKGVQIPCTCGKQATKYLVQQESPFVMMSAPPAQYELKHGTFTCASEYTGNYQCGHYKHITSKETLYCIDGALLTKSSEYKGPITDVFYKENSYTTTIKPVTYKLDGVVCTEIDPKLDNYYKKDNSYFTEQPIDLVPNQPYPNASFDNFKFVCDNIKFADDLNQLTGYKKPASRELKVTFFPDLNGDVVAIDYKHYTPSFKKGAKLLHKPIVWHVNNATNKATYKPNTWCIRCLWSTKPVETSNSFDVLKSEDAQGMDNLACEDLKPVSEEVVENPTIQKDVLECNVKTTEVVGDIILKPANNSLKITEEVGHTDLMAAYVDNSSLTIKKPNELSRVLGLKTLATHGLAAVNSVPWDTIANYAKPFLNKVVSTTTNIVTRCLNRVCTNYMPYFFTLLLQLCTFTRSTNSRIKASMPTTIAKNTVKSVGKFCLEASFNYLKSPNFSKLINIIIWFLLLSVCLGSLIYSTAALGVLMSNLGMPSYCTGYREGYLNSTNVTIATYCTGSIPCSVCLSGLDSLDTYPSLETIQITISSFKWDLTAFGLVAEWFLAYILFTRFFYVLGLAAIMQLFFSYFAVHFISNSWLMWLIINLVQMAPISAMVRMYIFFASFYYVWKSYVHVVDGCNSSTCMMCYKRNRATRVECTTIVNGVRRSFYVYANGGKGFCKLHNWNCVNCDTFCAGSTFISDEVARDLSLQFKRPINPTDQSSYIVDSVTVKNGSIHLYFDKAGQKTYERHSLSHFVNLDNLRANNTKGSLPINVIVFDGKSKCEESSAKSASVYYSQLMCQPILLLDQALVSDVGDSAEVAVKMFDAYVNTFSSTFNVPMEKLKTLVATAEAELAKNVSLDNVLSTFISAARQGFVDSDVETKDVVECLKLSHQSDIEVTGDSCNNYMLTYNKVENMTPRDLGACIDCSARHINAQVAKSHNIALIWNVKDFMSLSEQLRKQIRSAAKKNNLPFKLTCATTRQVVNVVTTKIALKGG

SEQ ID NO: 15841 - protein, 1946 aa, Artificial Sequence
  SARS-CoV-2__MT877304.1__non-structural protein 3 (NSP3)
MAPTKVTFGDDTVIEVQGYKSVNITFELDERIDKVLNEKCSAYTVELGTEVNEFACVVADAVIKTLQPVSELLTPLGIDLDEWSMATYYLFDESGEFKLASHMYCSFYPPDEDEEEGDCEEEEFEPSTQYEYGTEDDYQGKPLEFGATSAALQPEEEQEEDWLDDDSQQTVGQQDGSEDNQTTTIQTIVEVQPQLEMELTPVVQTIEVNSFSGYLKLTDNVYIKNADIVEEAKKVKPTVVVNAANVYLKHGGGVAGALNKATNNAMQVESDDYIATNGPLKVGGSCVLSGHNLAKHCLHVVGPNVNKGEDIQLLKSAYENFNQHEVLLAPLLSAGIFGADPIHSLRVCVDTVRTNVYLAVFDKNLYDKLVSSFLEMKSEKQVEQKIAEIPKEEVKPFITESKPSVEQRKQDDKKIKACVEEVTTTLEETKFLTENLLLYIDINGNLHPDSATLVSDIDITFLKKDAPYIVGDVVQEGVLTAVVIPTKKAGGTTEMLAKALRKVPTDNYITTYPGQGLNGYTVEEAKTVLKKCKSAFYILPSIISNEKQEILGTVSWNLREMLAHAEETRKLMPVCVETKAIVSTIQRKYKGIKIQEGVVDYGARFYFYTSKTTVASLINTLNDLNETLVTMPLGYVTHGLNLEEAARYMRSLKVPATVSVSSPDAVTAYNGYLTSSSKTPEEHFIETISLAGSYKDWSYSGQSTQLGIEFLKRGDKSVYYTSNPTTFHLDGEVITFDNLKTLLSLREVRTIKVFTTVDNINLHTQVVDMSMTYGQQFGPTYLDGADVTKIKPHNSHEGKTFYVLPNDDTLRVEAFEYYHTTDPSFLGRYMSALNHTKKWKYPQVNGLTSIKWADNNCYLATALLTLQQIELKFNPPALQDAYYRARAGEAANFCALILAYCNKTVGELGDVRETMSYLFQHANLDSCKRVLNVVCKTCGQQQTTLKGVEAVMYMGTLSYEQFKKGVQIPCTCGKQATKYLVQQESPFVMMSAPPAQYELKHGTFTCASEYTGNYQCGHYKHITSKETLYCIDGALLTKSSEYKGPITDVFYKENSYTTTIKPVTYKLDGVVCTEIDPKLDNYYKKDNSYFTEQPIDLVPNQPYPNASFDNFKFVCDNIKFADDLNQLTGYKKPASRELKVTFFPDLNGDVVAIDYKHYTPSFKKGAKLLHKPIVWHVNNATNKATYKPNTWCIRCLWSTKPVETSNSFDVLKSEDAQGMDNLACEDLKPVSEEVVENPTIQKDVLECNVKTTEVVGDIILKPANNSLKITEEVGHTDLMAAYVDNSSLTIKKPNELSRVLGLKTLATHGLAAVNSVPWDTIANYAKPFLNKVVSTTTNIVTRCLNRVCTNYMPYFFTLLLQLCTFTRSTNSRIKASMPTTIAKNTVKSVGKFCLEASFNYLKSPNFSKLINIIIWFLLLSVCLGSLIYSTAALGVLMSNLGMPSYCTGYREGYLNSTNVTIATYCTGSIPCSVCLSGLDSLDTYPSLETIQITISSFKWDLTAFGLVAEWFLAYILFTRFFYVLGLAAIMQLFFSYFAIHFISNSWLMWLIINLVQMAPISAMVRMYIFFASFYYVWKSYVHVVDGCNSSTCMMCYKRNRATRVECTTIVNGVRRSFYVYANGGKGFCKLHNWNCVNCDTFCAGSTFISDEVARDLSLQFKRPINPTDQSSYIVDSVTVKNGSIHLYFDKAGQKTYERHSLSHFVNLDNLRANNTKGSLPINVIVFDGKSKCEESSAKSASVYYSQLMCQPILLLDQALVSDVGDSAEVAVKMFDAYVNTFSSTFNVPMEKLKTLVATAEAELAKNVSLDNVLSTFISAARQGFVDSDVETKDVVECLKLSHQSDIEVTGDSCNNYMLTYNKVENMTPRDLGACIDCSARHINAQVAKSHNIALIWNVKDFMSLSEQLRKQIRSAAKKNNLPFKLTCATTRQVVNVVTTKIALKGG

SEQ ID NO: 15842 - protein, 1946 aa, Artificial Sequence
  SARS-CoV-2__MT877315.1__non-structural protein 3 (NSP3)
MAPTKVTFGDDTVIEVQGYKSVNITFELDERIDKVLNEKCSAYTVELGTEVNEFACVVADAVIKTLQPVSELLTPLGIDLDEWSMATYYLFDESGEFKLASHMYCSFYPPDEDEEEGDCEEEEFEPSTQYEYGTEDDYQGKPLEFGATSAALQPEEEQEEDWLDDDSQQTVGQQDGSEDNQTTTIQTIVEVQPQLEMELTPVVQTIEVNSFSGYLKLTDNVYIKNADIVEEAKKVKPTVVVNAANVYLKHGGGVAGALNKATNNAMQVESDDYIATNGPLKVGGSCVLSGHNLAKHCLHVVGPNVNKGEDIQLLKSAYENFNQHEVLLAPLLSAGIFGADPIHSLRVCVDTVRTNVYLAVFDKNLYDKLVSSFLEMKSEKQVEQKIAEIPKEEVKPFITESKPSVEQRKQDDKKIKACVEEVTTTLEETKFLTENLLLYIDINGNLHPDSATLVSDIDITFLKKDAPYIVGDVVQEGVLTAVVIPTKKAGGTTEMLAKALRKVPTDNYITTYPGQGLNGYTVEEAKTVLKKCKSAFYILPSIISNEKQEILGTVSWNLREMLAHAEETRKLMPVCVETKAIVSTIQRKYKGIKIQEGVVDYGARFYFYTSKTTVASLINTLNDLNETLVTMPLGYVTHGLNLEEAARYMRSLKVPATVSVSSPDAVTAYNGYLTSSSKTPEEHFIETISLAGSYKDWSYSGQSTQLGIEFLKRGDKSVYYTSNPTTFHLDGEVITFDNLKTLLSLREVRTIKVFTTVDNINLHTQVVDMSMTYGQQFGPTYLDGADVTKIKPHNSHEGKTFYVLPNDDTLRVEAFEYYHTTDPSFLGRYMSALNHTKKWKYPQVNGLTSIKWADNNCYLATALLTLQQIELKFNPPALQDAYYRARAGEAANFCALILAYCNKTVGELGDVRETMSYLFQHANLDSCKRVLNVVCKTCGQQQTTLKGVEAVMYMGTLSYEQFKKGVQIPCTCGKQATKYLVQQESPFVMMSAPPAQYELKHGTFTCASEYTGNYQCGHYKHITSKETLYCIDGALLTKSSEYKGPITDVFYKENSYTTTIKPVTYKLDGVVCTEIDPKLDNYYKKDNSYFTEQPIDLVPNQPYPNASFDNFKFVCDNIKFADDLNQLTGYKKPASRELKVTFFPDLNGDVVAIDYKHYTPSFKKGAKLLHKPIVWHVNNATNKATYKPNTWCIRCLWSTKPVETSNSFDVLKSEDAQGMDNLACEDLKPVSEEVVENPTIQKDVLECNVKTTEVVGDIILKPANNSLKITEEVGHTDLMAAYVDNSSLTIKKPNELSRVLGLKTLATHGLAAVNSVPWDTIANYAKPFLNKVVSTTTNIVTRCLNRVCTNYMPYFFTLLLQLCTFTRSTNSRIKASMPTTIAKNTVKSAGKFCLEASFNYLKSPNFSKLINIIIWFLLLSVCLGSLIYSTAALGVLMSNLGMPSYCTGYREGYLNSTNVTIATYCTGSIPCSVCLSGLDSLDTYPSLETIQITISSFKWDLTAFGLVAEWFLAYILFTRFFYVLGLAAIMQLFFSYFAVHFISNSWLMWLIINLVQMAPISAMVRMYIFFASFYYVWKSYVHVVDGCNSSTCMMCYKRNRATRVECTTIVNGVRRSFYVYANGGKGFCKLHNWNCVNCDTFCAGSTFISDEVARDLSLQFKRPINPTDQSSYIVDSVTVKNGSIHLYFDKAGQKTYERHSLSHFVNLDNLRANNTKGSLPINVIVFDGKSKCEESSAKSASVYYSQLMCQPILLLDQALVSDVGDSAEVAVKMFDAYVNTFSSTFNVPMEKLKTLVATAEAELAKNVSLDNVLSTFISAARQGFVDSDVETKDVVECLKLSHQSDIEVTGDSCNNYMLTYNKVENMTPRDLGACIDCSARHINAQVAKSHNIALIWNVKDFMSLSEQLRKQIRSAAKKNNLPFKLTCATTRQVVNVVTTKIALKGG

SEQ ID NO: 15843 - protein, 1946 aa, Artificial Sequence
  SARS-CoV-2__MT877324.1__non-structural protein 3 (NSP3)
MAPTKVTFGDDTVIEVQGYKSVNITFELDERIDKVLNEKCSAYTVELGTEVNEFACVVADAVIKTLQPVSELLTPLGIDLDEWSMATYYLFDESGEFKLASHMYCSFYPPDEDEEEGDCEEEEFEPSTQYEYGTEDDYQGKPLEFGATSAALQPEEEQEEDWLDDDSQQTVGQQDGSEDNQTTTIQTIVEVQPQLEMELTPVVQTIEVNSFSGYLKLTDNVYIKNADIVEEAKKVKPTVVVNAANVYLKHGGGVAGALNKATNNAMQVESDDYIATNGPLKVGGSCVLSGHNLAKHCLHVVGPNVNKGEDIQLLKSAYENFNQHEVLLAPLLSAGIFGADPIHSLRVCVDTVRTNVYLAVFDKNLYDKLVSSFLEMKSEKQVEQKIAEIPKEEVKPFITESKPSVEQRKQDDKKIKACVEEVTTTLEETKFLTENLLLYIDINGNLHPDSATLVSDIDITFLKKDAPYIVGDVVQEGVLTAVVIPTKKAGGTTEMLAKALRKVPTDNYITTYPGQGLNGYTVEEAKTVLKKCKSAFYILPSIISNEKQEILGTVSWNLREMLAHAEETRKLMPVCVETKAIVSTIQRKYKGIKIQEGVVDYGARFYFYTSKTTVASLINTLNDLNETLVTMPLGYVTHGLNLEEAARYMRSLKVPATVSVSSPDAVTAYNGYLTSSSKTPEEHFIETISLAGSYKDWSYSGQSTQLGIEFLKRGDKSVYYTSNPTTFHLDGEVITFDNLKTLLSLREVRTIKVFTTVDNINLHTQVVDMSMTYGQQFGPTYLDGADVTKIKPHNSHEGKTFYVLPNDDTLRVEAFEYYHTTDPSFLGRYMSALNHTKKWKYPQVNGLTSIKWADNNCYLATALLTLQQIELKFNPPALQDAYYRARAGEAANFCALILAYCNKTVGELGDVRETMSYLFQHANLDSCKRVLNVVCKTCGQQQTTLKGVEAVMYMGTLSYEQFKKGVQIPCTCGKQATKYLVQQESPFVMMSAPPAQYELKHGTFTCASEYTGNYQCGHYKHITSKETLYCIDGALLTKSSEYKGPITDVFYKENSYTTTIKPVTYKLDGVVCTEIDPKLDNYYKKDNSYFTEQPIDLVPNQPYSNASFDNFKFVCDNIKFADDLNQLTGYKKPASRELKVTFFPDLNGDVVAIDYKHYTPSFKKGAKLLHKPIVWHVNNATNKATYKPNTWCIRCLWSTKPVETSNSFDVLKSEDAQGMDNLACEDLKPVSEEVVENPTIQKDVLECNVKTTEVVGDIILKPANNSLKITEEVGHTDLMAAYVDNSSLTIKKPNELSRVLGLKTLATHGLAAVNSVPWDTIANYAKPFLNKVVSTTTNIVTRCLNRVCTNYMPYFFTLLLQLCTFTRSTNSRIKASMPTTIAKNTVKSVGKFCLEASFNYLKSPNFSKLINIIIWFLLLSVCLGSLIYSTAALGVLMSNLGMPSYCTGYREGYLNSTNVTIATYCTGSIPCSVCLSGLDSLDTYPSLETIQITISSFKWDLTAFGLVAEWFLAYILFTRFFYVLGLAAIMQLFFSYFAVHFISNSWLMWLIINLVQMAPISAMVRMYIFFASFYYVWKSYVHVVDGCNSSTCMMCYKRNRATRVECTTIVNGVRRSFYVYANGGKGFCKLHNWNCVNCDTFCAGSTFISDEVARDLSLQFKRPINPTDQSSYIVDSVTVKNGSIHLYFDKAGQKTYERHSLSHFVNLDNLRANNTKGSLPINVIVFDGKSKCEESSAKSASVYYSQLMCQPILLLDQALVSDVGDSAEVAVKMFDAYVNTFSSTFNVPMEKLKTLVATAEAELAKNVSLDNVLSTFISAARQGFVDSDVETKDVVECLKLSHQSDIEVTGDSCNNYMLTYNKVENMTPRDLGACIDCSARHINAQVAKSHNIALIWNVKDFMSLSEQLRKQIRSAAKKNNLPFKLTCATTRQVVNVVTTKIALKGG

SEQ ID NO: 15844 - protein, 1946 aa, Artificial Sequence
  SARS-CoV-2__MT877379.1__non-structural protein 3 (NSP3)
MAPTKVTFGDDTVIEVQGYKSVNITFELDERIDKVLNEKCSAYTVELGTEVNEFACVVADAVIKTLQPVSELLTPLGIDLDEWSMATYYLFDESGEFKLASHMYCSFYPPDEDEEEGDCEEEEFEPSTQYEYGTEDDYQGKPLEFGATSAALQPEEEQEEDWLDDDSQQTVGQQDGSEDNQTTTIQTIVEVQPQLEMELTPVVQTIEVNSFSGYLKLTDNVYIKNADIVEEAKKVKPTVVVNAANVYLKHGGGVAGALNKATNNAMQVESDDYIATNGPLKVGGSCVLSGHNLAKHCLHVVGPNVNKGEDIQLLKSAYENFNQHEVLLAPLLSAGIFGADPIHSLRVCVDTVRTNVYLAVFDKNLYDKLVSSFLDMKSEKQVEQKIAEIPKEEVKPFITESKPSVEQRKQDDKKIKACVEEVTTTLEETKFLTENLLLYIDINGNLHPDSATLVSDIDITFLKKDAPYIVGDVVQEGVLTAVVIPTKKAGGTTEMLAKALRKVPTDNYITTYPGQGLNGYTVEEAKTVLKKCKSAFYILPSIISNEKQEILGTVSWNLREMLAHAEETRKLMPVCVETKAIVSTIQRKYKGIKIQEGVVDYGARFYFYTSKTTVASLINTLNDLNETLVTMPLGYVTHGLNLEEAARYMRSLKVPATVSVSSPDAVTAYNGYLTSSSKTPEEHFIETISLAGSYKDWSYSGQSTQLGIEFLKRGDKSVYYTSNPTTFHLDGEVITFDNLKTLLSLREVRTIKVFTTVDNINLHTQVVDMSMTYGQQFGPTYLDGADVTKIKPHNSHEGKTFYVLPNDDTLRVEAFEYYHTTDPSFLGRYMSALNHTKKWKYPQVNGLTSIKWADNNCYLATALLTLQQIELKFNPPALQDAYYRARAGEAANFCALILAYCNKTVGELGDVRETMSYLFQHANLDSCKRVLNVVCKTCGQQQTTLKGVEAVMYMGTLSYEQFKKGVQIPCTCGKQATKYLVQQESPFVMMSAPPAQYELKHGTFTCASEYTGNYQCGHYKHITSKETLYCIDGALLTKSSEYKGPITDVFYKENSYTTTIKPVTYKLDGVVCTEIDPKLDNYYKKDNSYFTEQPIDLVPNQPYPNASFDNFKFVCDNIKFADDLNQLTGYKKPASRELKVTFFPDLNGDVVAIDYKHYTPSFKKGAKLLHKPIVWHVNNATNKATYKPNTWCIRCLWSTKPVETSNSFDVLKSEDAQGMDNLACEDLKPVSEEVVENPTIQKDVLECNVKTTEVVGDIILKPANNRLKITEEVGHTDLMAAYVDNSSLTIKKPNELSRVLGLKTLATHGLAAVNSVPWDTIANYAKPFLNKVVSTTTNIVTRCLNRVCTNYMPYFFTLLLQLCTFTRSTNSRIKASMPTTIAKNTVKSVGKFCLEASFNYLKSPNFSKLINIIIWFLLLSVCLGSLIYSTAALGVLMSNLGMPSYCTGYREGYLNSTNVTIATYCTGSIPCSVCLSGLDSLDTYPSLETIQITISSFKWDLTAFGLVAEWFLAYILFTRFFYVLGLAAIMQLFFSYFAVHFISNSWLMWLIINLVQMAPISAMVRMYIFFASFYYVWKSYVHVVDGCNSSTCMMCYKRNRATRVECTTIVNGVRRSFYVYANGGKGFCKLHNWNCVNCDTFCAGSTFISDEVARDLSLQFKRPINPTDQSSYIVDSVTVKNGSIHLYFDKAGQKTYERHSLSHFVNLDNLRANNTKGSLPINVIVFDGKSKCEESSAKSASVYYSQLMCQPILLLDQALVSDVGDSAEVAVKMFDAYVNTFSSTFNVPMEKLKTLVATAEAELAKNVSLDNVLSTFISAARQGFVDSDVETKDVVECLKLSHQSDIEVTGDSCNNYMLTYNKVENMTPRDLGACIDCSARHINAQVAKSHNIALIWNVKDFMSLSEQLRKQIRSAAKKNNLPFKLTCATTRQVVNVVTTKIALKGG

SEQ ID NO: 15845 - protein, 1946 aa, Artificial Sequence
  SARS-CoV-2__MT877409.1__non-structural protein 3 (NSP3)
MAPTKVTFGDDTVIEVQGYKSVNITFELDERIDKVLNEKCSAYTVELGTEVNEFACVVADAVIKTLQPVSELLTPLGIDLDEWSMATYYLFDESGEFKLASHMYCSFYPPDEDEEEGDCEEEEFEPSTQYEYGTEDDYQGKPLEFGATSAALQPEEEQEEDWLDDDSQQTVGQQDGSEDNQTTTIQTIVEVQPQLEMELTPVVQTIEVNSFSGYLKLTDNVYIKNADIVEEAKKVKPTVVVNAANVYLKHGGGVAGALNKATNNAMQVESDDYIATNGPLKVGGSCVLSGHNLAKHCLHVVGPNVNKGEDIQLLKSAYENFNQHEVLLAPLLSAGIFGADPIHSLRVCVDTVRTNVYLAVFDKNLYDKLVSSFLEMKSEKQVEQKIAEIPKEEVKPFITESKPSVEQRKQDDKKIKACVEEVTTTLEETKFLTENLLLYIDINGNLHPDSATLVSDIDITFLKKDAPYIVGDVVQEGVLTAVVIPTKKAGGTTEMLAKALRKVPTDNYITTYPGQGLNGYTVEEAKTVLKKCKSAFYILPSIISNEKQEILGTVSWNLREMLAHAEETRKLMPVCVETKAIVSTIQRKYKGIKIQEGVVDYGARFYFYTSKTTVASLINTLNDLNETLVTMPLGYVTHGLNLEEAARYMRSLKVPATVSVSSPDAVTAYNGYLTSSSKTPEEHFIETISLAGSYKDWSYSGQSTQLGIEFLKRGDKSVYYTSNPTTFHLDGEVITFDNLKTLLSLREVRTIKVFTTVDNINLHTQVVDMSMTYGQQFGPTYLDGADVTKIKPHNSHEGKTFYVLPNDDTLRVEAFEYYHTTDPSFLGRYMSALNHTKKWKYPQVNGLTSIKWADNNCYLATALLTLQQIELKFNPPALQDAYYRARAGEAANFCALILAYCNKTVGELGDVRETMSYLFQHANLDSCKRVLNVVCKTCGQQQTTLKGVEAVMYMGTLSYEQFKKGVQIPCTCGKQATKYLVQQESPFVMMSAPPAQYELKHGTFTCASEYTGNYQCGHYKHITSKETLYCIDGALLTKSSEYKGPITDVFYKENSYTTTIKPVTYKLDGVVCTEIDPKLDNYYKKDNSYFTEQPIDLVPNQPYPNASFDNFKFVCDNIKFADDLNQLTGYKKPASRELKVTFFPDLNGDVVAIDYKHYTPSFKKGAKLLHKPIVWHVNNATNKATYKPNTWCIRCLWSTKPVETSNSFDVLKSEDAQGMDNLACEDLKPVSEEVVENPTIQKDVLECNVKTTEVVGDIILKPANNRLKITEEVGHTDLMAAYVDNSSLTIKKPNELSRVLGLKTLATHGLAAVNSVPWDTIANYAKPFLNKVVSTTTNIVTRCLNRVCTNYMPYFFTLLLQLCTFTRSTNSRIKASMPTTIAKNTVKSVGKFCLEASFNYLKSPNFSKLINIIIWFLLLSVCLGSLIYSTAALGVLMSNLGMPSYCTGYREGYLNSTNVTIATYCTGSIPCSVCLSGLDSLDTYPSLETIQITISSFKWDLTAFGLVAEWFLAYILFTRFFYVLGLAAIMQLFFSYFAVHFISNSWLMWLIINLVQMAPISAMVRMYIFFASFYYVWKSYVHVVDGCNSSTCMMCYKRNRATRVECTTIVNGVRRSFYVYANGGKGFCKLHNWNCVSCDTFCAGSTFISDEVARDLSLQFKRPINPTDQSSYIVDSVTVKNGSIHLYFDKAGQKTYERHSLSHFVNLDNLRANNTKGSLPINVIVFDGKSKCEESSAKSASVYYSQLMCQPILLLDQALVSDVGDSAEVAVKMFDAYVNTFSSTFNVPMEKLKTLVATAEAELAKNVSLDNVLSTFISAARQGFVDSDVETKDVVECLKLSHQSDIEVTGDSCNNYMLTYNKVENMTPRDLGACIDCSARHINAQVAKSHNIALIWNVKDFMSLSEQLRKQIRSAAKKNNLPFKLTCATTRQVVNVVTTKIALKGG

SEQ ID NO: 15846 - protein, 1946 aa, Artificial Sequence
  SARS-CoV-2__MT872497.1__non-structural protein 3 (NSP3)
MAPTKVTFGDDTVIEVQGYKSVNITFELDERIDKVLNEKCSAYTVELGTEVNEFACVVADAVIKTLQPVSELLTPLGIDLDEWSMATYYLFDESGEFKLASHMYCSFYPPDEDEEEGDCEEEEFEPSTQYEYGTEDDYQGKPLEFGATSAALQPEEEQEEDWLDDDSQQTVGQQDGSEDNQTTTIQTIVEVQPQLEMELTPVVQTIEVNSFSGYLKLTDNVYIKNADIVEEAKKVKPTVVVNAANVYLKHGGGVAGALNKATNNAMQVESDDYIATNGPLKVGGSCVLSGHNLAKHCLHVVGPNVNKGEDIQLLKSAYENFNQHEVLLAPLLSAGIFGADPIHSLRVCVDTVRTNVYLAVFDKNLYDKLVSSFLEMKSEKQVEQKIAEIPKEEVKPFITESKPSVEQRKQDDKKIKACVEEVTTTLEETKFLTENLLLYIDINGNLHPDSATLVSDIDITFLKKDAPYIVGDVVQEGVLTAVVIPTKKAGGTTEMLAKALRKVPTDNYITTYPGQGLNGYTVEEAKTVLKKCKSAFYILPSIISNEKQEILGTVSWNLREMLAHAEETRKLMPVCVETKSIVSTIQRKYKGIKIQEGVVDYGARFYFYTSKTTVASLINTLNDLNETLVTMPLGYVTHGLNLEEAARYMRSLKVPATVSVSSPDAVTAYNGYLTSSSKTPEEHFIETISLAGSYKDWSYSGQSTQLGIEFLKRGDKSVYYTSNPTTFHLDGEVITFDNLKTLLSLREVRTIKVFTTVDNINLHTQVVDMSMTYGQQFGPTYLDGADVTKIKPHNSHEGKTFYVLPNDDTLRVEAFEYYHTTDPSFLGRYMSALNHTKKWKYPQVNGLTSIKWADNNCYLATALLTLQQIELKFNPPALQDAYYRARAGEAANFCALILAYCNKTVGELGDVRETMSYLFQHANLDSCKRVLNVVCKTCGQQQTTLKGVEAVMYMGTLSYEQFKKGVQIPCTCGKQATKYLVQQESPFVMMSAPPAQYELKHGTFTCASEYTGNYQCGHYKHITSKETLYCIDGALLTKSSEYKGPITDVFYKENSYTTTIKPVTYKLDGVVCTEIDPKLDNYYKKDNSYFTEQPIDLVPNQPYPNASFDNFKFVCDNIKFADDLNQLTGYKKPASRELKVTFFPDLNGDVVAIDYKHYTPSFKKGAKLLHKPIVWHVNNATNKATYKPNTWCIRCLWSTKPVETSNSFDVLKSEDAQGMDNLACEDLKPVSEEVVENPTIQKDVLECNVKTTEVVGDIILKPANNSLKITEEVGHTDLMAAYVDNSSLTIKKPNELSRVLGLKTLATHGLAAVNSVPWDTIANYAKPFLNKVVSTTTNIVTRCLNRVCTNYMPYFFTLLLQLCTFTRSTNSRIKASMPTTIAKNTVKSVGKFCLEASFNYLKSPNFSKLINIIIWFLLLSVCLGSLIYSTAALGVLMSNLGMPSYCTGYREGYLNSTNVTIATYCTGSIPCSVCLSGLDSLDTYPSLETIQITISSFKWDLTAFGLVAEWFLAYILFTRFFYVLGLAAIMQLFFSYFAVHFISNSWLMWLIINLVQMAPISAMVRMYIFFASFYYVWKSYVHVVDGCNSSTCMMCYKRNRATRVECTTIVNGVRRSFYVYANGGKGFCKLHNWNCVNCDTFCAGSTFISDEVARDLSLQFKRPINPTDQSSYIVDSVTVKNGSIHLYFDKAGQKTYERHSLSHFVNLDNLRANNTKGSLPINVIVFDGKSKCEESSAKSASVYYSQLMCQPILLLDQALVSDVGDSAEVAVKMFDAYVNTFSSTFNVPMEKLKTLVATAEAELAKNVSLDNVLSTFISAARQGFVDSDVETKDVVECLKLSHQSDIEVTGDSCNNYMLTYNKVENMTPRDLGACIDCSARHINAQVAKSHNIALIWNVKDFMSLSEQLRKQIRSAAKKNNLPFKLTCATTRQVVNVVTTKIALKGG

SEQ ID NO: 15847 - protein, 1946 aa, Artificial Sequence
  SARS-CoV-2__MT873807.1__non-structural protein 3 (NSP3)
MAPTKVTFGDDTVIEVQGYKSVNITFELDERIDKVLNEKCSAYTVELGTEVNEFACVVADAVIKTLQPVSELLTPLGIDLDEWSMATYYLFDESGEFKLASHMYCSFYPPDEDEEEGDCEEEEFEPSTQYEYGTEDDYQGKPLEFGATSAALQPEEEQEEDWLDDDSQQTVGQQDGSEDNQTTTIQTIVEVQPQLEMELTPVVQTIEVNSFSGYLKLTDNVYIKNADIVEEAKKVKPTVVVNAANVYLKHGGGVAGALNKATNNAMQVESDDYIATNGPLKVGGSCVLSGHNLAKHCLHVVGPNVNKGEDIQLLKSAYENFNQHEVLLAPLLSAGIFGADPIHSLRVCVDTVRTNVYLAVFDKNLYDKLVSSFLEMKSEKQVEQKIAEIPKEEVKPFITESKPSVEQRKQDDKKIKACVEEVTTTLEETKFLTENLLLYIDINGNLHPDSATLVSDIDITFLKKDAPYIVGDVVQEGVLTAVVIPTKKAGGTTEMLAKALRKVPTDNYITTYPGQGLNGYTVEEAKTVLKKCKSAFYILPSIISNEKQEILGTVSWNLREMLAHAEETRKLMPVCVETKAIVSTIQRKYKGIKIQEGVVDYGARFYFYTSKTTVASLINTLNDLNETLVTMPLGYVTHGLNLEEAARYMRSLKVPATVSVSSPDAVTAYNGYLTSSSKTPEEHFIETISLAGSYKDWSYSGQSTQLGIEFLKRGDKSVYYISNPTTFHLDGEVITFDNLKTLLSLREVRTIKVFTTVDNINLHTQVVDMSMTYGQQFGPTYLDGADVTKIKPHNSHEGKTFYVLPNDDTLRVEAFEYYHTTDPSFLGRYMSALNHTKKWKYPQVNGLTSIKWADNNCYLATALLTLQQIELKFNPPALQDAYYRARAGEAANFCALILAYCNKTVGELGDVRETMSYLFQHANLDSCKRVLNVVCKTCGQQQTTLKGVEAVMYMGTLSYEQFKKGVQIPCTCGKQATKYLVQQESPFVMMSAPPAQYELKHGTFTCASEYTGNYQCGHYKHITSKETLYCIDGALLTKSSEYKGPITDVFYKENSYTTTIKPVTYKLDGVVCTEIDPKLDNYYKKDNSYFTEQPIDLVPNQPYPNASFDNFKFVCDNIKFADDLNQLTGYKKPASRELKVTFFPDLNGDVVAIDYKHYTPSFKKGAKLLHKPIVWHVNNATNKATYKPNTWCIRCLWSTKPVETSNSFDVLKSEDAQGMDNLACEDLKPVSEEVVENPTIQKDVLECNVKTTEVVGDIILKPANNSLKITEEVGHTDLMAAYVDNSSLTIKKPNELSRVLGLKTLATHGLAAVNSVPWDTIANYAKPFLNKVVSTTTNIVTRCLNRVCTNYMPYFFTLLLQLCTFTRSTNSRIKASMPTTIAKNTVKSVGKFCLEASFNYLKSPNFSKLINIIIWFLLLSVCLGSLIYSTAALGVLMSNLGMPSYCTGYREGYLNSTNVTIATYCTGSIPCSVCLSGLDSLDTYPSLETIQITISSFKWDLTAFGLVAEWFLAYILFTRFFYVLGLAAIMQLFFSYFAVHFISNSWLMWLIINLVQMAPISAMVRMYIFFASFYYVWKSYVHVVDGCNSSTCMMCYKRNRATRVECTTIVNGVRRSFYVYANGGKGFCKLHNWNCVNCDTFCAGSTFISDEVARDLSLQFKRPINPTDQSSYIVDSVTVKNGSIHLYFDKAGQKTYERHSLSHFVNLDNLRANNTKGSLPINVIVFDGKSKCEESSAKSASVYYSQLMCQPILLLDQALVSDVGDSAEVAVKMFDAYVNTFSSTFNVPMEKLKTLVATAEAELAKNVSLDNVLSTFISAARQGFVDSDVETKDVVECLKLSHQSDIEVTGDSCNNYMLTYNKVENMTPRDLGACIDCSARHINAQVAKSHNIALIWNVKDFMSLSEQLRKQIRSAAKKNNLPFKLTCATTRQVVNVVTTKIALKGG

SEQ ID NO: 15848 - protein, 1946 aa, Artificial Sequence
  SARS-CoV-2__MT856452.1__non-structural protein 3 (NSP3)
MAPTKVTFGDDTVIEVQGYKSVNITFELDERIDKVLNEKCSAYTVELGTEVNEFACVVADAVIKTLQPVSELLTPLGIDLDEWSMATYYLFDESGEFKLASHMYCSFYPPDEDEEEGDCEEEEFEPSTQYEYGTEDDYQGKPLEFGATSAALQPEEEQEEDWLDDDSQQTVGQQDGSEDNQTTTIQTIVEVQPQLEMELTPVVQTIEVNSFSGYLKLTDNVYIKNADIVEEAKKVKPTVVVNAANVYLKHGGGVAGALNKATNNAMQVESDDYIATNGPLKVGGSCVLSGHNLAKHCLHVVGPNVNKGEDIQLLKSAYENFNQHEVLLAPLLSAGIFGADPIHSLRVCVDTVRTNVYLAVFDKNLYDKLVSSFLEMKSEKQVEQKIAEIPKEEVKPFITESKPSVEQRKQDDKKIKACVEEVTTTLEETKFLTENLLLYIDINGNLHPDSATLVSDIDITFLRKDAPYIVGDVVQEGVLTAVVIPTKKAGGTTEMLAKALRKVPTDNYITTYPGQGLNGYTVEEAKTVLKKCKSAFYILPSIISNEKQEILGTVSWNLREMLAHAEETRKLMPVCVETKAIVSTIQRKYKGIKIQEGVVDYGARFYFYTSKTTVASLINTLNDLNETLVTMPLGYVTHGLNLEEAARYMRSLKVPATVSVSSPDAVTAYNGYLTSSSKTPEEHFIETISLAGSYKDWSYSGQSTQLGIEFLKRGDKSVYYTSNPTTFHLDGEVITFDNLKTLLSLREVRTIKVFTTVDNINLHTQVVDMSMTYGQQFGPTYLDGADVTKIKPHNSHEGKTFYVLPNDDTLRVEAFEYYHTTDPSFLGRYMSALNHTKKWKYPQVNGLTSIKWADNNCYLATALLTLQQIELKFNPPALQDAYYRARAGEAANFCALILAYCNKTVGELGDVRETMSYLFQHANLDSCKRVLNVVCKTCGQQQTTLKGVEAVMYMGTLSYEQFKKGVQIPCTCGKQATKYLVQQESPFVMMSAPPAQYELKHGTFTCASEYTGNYQCGHYKHITSKETLYCIDGALLTKSSEYKGPITDVFYKENSYTTTIKPVTYKLDGVVCTEIDPKLDNYYKKDNSYFTEQPIDLVPNQPYPNASFDNFKFVCDNIKFADDLNQLTGYKKPASRELKVTFFPDLNGDVVAIDYKHYTPSFKKGAKLLHKPIVWHVNNATNKATYKPNTWCIRCLWSTKPVETSNSFDVLKSEDAQGMDNLACEDLKPVSEEVVENPTIQKDVLECNVKTTEVVGDIILKPANNSLKITEEVGHTDLMAAYVDNSSLTIKKPNELSRVLGLKTLATHGLAAVNSVPWDTIANYAKPFLNKVVSTTTNIVTRCLNRVCTNYMPYFFTLLLQLCTFTRSTNSRIKASMPTTIAKNTVKSVGKFCLEASFNYLKSPNFSKLINIIIWFLLLSVCLGSLIYSTAALGVLMSNLGMPSYCTGYREGYLNSTNVTIATYCTGSIPCSVCLSGLDSLDTYPSLETIQITISSFKWDLTAFGLVAEWFLAYILFTRFFYVLGLAAIMQLFFSYFAVHFISNSWLMWLIINLVQMAPISAMVRMYIFFASFYYVWKSYVHVVDGCNSSTCMMCYKRNRATRVECTTIVNGVRRSFYVYANGGKGFCKLHNWNCVNCDTFCAGSTFISDEVARDLSLQFKRPINPTDQSSYIVDSVTVKNGSIHLYFDKAGQKTYERHSLSHFVNLDNLRANNTKGSLPINVIVFDGKSKCEESSAKSASVYYSQLMCQPILLLDQALVSDVGDSAEVAVKMFDAYVNTFSSTFNVPMEKLKTLVATAEAELAKNVSLDNVLSTFISAARQGFVDSDVETKDVVECLKLSHQSDIEVTGDSCNNYMLTYNKVENMTPRDLGACIDCSARHINAQVAKSHNIALIWNVKDFMSLSEQLRKQIRSAAKKNNLPFKLTCATTRQVVNVVTTKIALKGG

SEQ ID NO: 15849 - protein, 1946 aa, Artificial Sequence
  SARS-CoV-2__MT856453.1__non-structural protein 3 (NSP3)
MAPTKVTFGDDTVIEVQGYKSVNITFELDERIDKVLNEKCSAYTVELGTEVNEFACVVADAVIKTLQPVSELLTPLGIDLDEWSMATYYLFDESGEFKLASHMYCSFYPPDEDEEEGDCEEEEFEPSTQYEYGTEDDYQGKPLEFGATSAALQPEEEQEEDWLDDDSQQTVGQQDGSEDNQTTTIQTIVEVQPQLEMELTPVVQTIEVNSFSGYLKLTDNVYIKNADIVEEAKKVKPTVVVNAANVYLKHGGGVAGALNKATNNAMQVESDDYIATNGPLKVGGSCVLSGHNLAKHCLHVVGPNVNKGEDIQLLKSAYENFNQHEVLLAPLLSAGIFGADPIHSLRVCVDTVRTNVYLAVFDKNLYDKLVSSFLEMKSEKQVEQKIAEIPKEEVKPFITESKPSVEQRKQDDKKIKACVEEVTTTLEETKFLTENLLLYIDINGNLHPDSATLVSDIDITFLKKDAPYIVGDVVQEGVLTAVVIPTKKAGGTTEMLAKALRKVPTDNYITTYPGQGLNGYTVEEAKTVLKKCKSAFYILPSIISNEKQEILGTVSWNLREMLAHAEETRKLMPVCVETKAIVSTIQRKYKGIKIQEGVVDYGARFYFYTSKTTVASLINTLNDLNETLVTMPLGYVTHGLNLEEAARYMRSLKVPATVSVSSPDAVTAYNGYLTSSSKTPEEHFIETISLAGSYKDWSYSGQSTQLGIEFLKRGDKSVYYTSNPTTFHLDGEVITFDNLKTLLSLREVRTIKVFTTVDNINLHTQVVDMSMTYGQQFGPTYLDGADVTKIKPHNSHEGKTFYVLPNDDTLRVEAFEYYHTTDPSFLGRYMSALNHTKKWKYPQVNGLTSIKWADNNCYLATALLTLQQIELKFNPPALQDAYYRARAGEAANFCALILAYCNKTVGELGDVRETMSYLFQHANLDSCKRVLNVVCKTCGQQQTTLKGVEAVMYMGTLSYEQFKKGVQIPCTCGKQATKYLVQQESPFVMMSAPPAQYELKHGTFTCASEYTGNYQCGHYKHITSKETLYCIDGALLTKSSEYKGPITDVFYKENSYTTTIKPVTYKLDGVVCTEIDPKLDNYYKKDNSYFTEQPIDLVPNQPYPNASFDNFKFVCDNIKFADDLNQLTGYKKPASRELKVTFFPDLNGDVVAIDYKHYTPSFKKGAKLLHKPIVWHVNNATNKATYKPNTWCIRCLWSTKPVETSNSFDVLKSEDAQGMDNLACEDLKPVSEEVVENPTIQKDVLECNVKTTEVVGDIILKPANNSLKITEEVGHTDLMAAYVDNSSLTIKKPNELSRVLGLKTLATHGLAAVNSVPWDTIANYAKPFLNKVVSTTTNIVTRCLNRVCTNYMPYFFTLLLQLCTFTRSTNSRIKASMPTTIAKNTVKSVGKFCLEASFNYLKSPNFSKLINIIIWFLLLSVCLGSLIYSTAALGVLMSNLGMPSYCTGYREGYLNSTNVTIATYCTGSIPCSVCLSGLDSLDTYPSLETIQITISSLKWDLTAFGLVAEWFLAYILFTRFFYVLGLAAIMQLFFSYFAVHFISNSWLMWLIINLVQMAPISAMVRMYIFFASFYYVWKSYVHVVDGCNSSTCMMCYKRNRATRVECTTIVNGVRRSFYVYANGGKGFCKLHNWNCVNCDTFCAGSTFISDEVARDLSLQFKRPINPTDQSSYIVDSVTVKNGSIHLYFDKAGQKTYERHSLSHFVNLDNLRANNTKGSLPINVIVFDGKSKCEESSAKSASVYYSQLMCQPILLLDQALVSDVGDSAEVAVKMFDAYVNTFSSTFNVPMEKLKTLVATAEAELAKNVSLDNVLSTFISAARQGFVDSDVETKDVVECLKLSHQSDIEVTGDSCNNYMLTYNKVENMTPRDLGACIDCSARHINAQVAKSHNIALIWNVKDFMSLSEQLRKQIRSAAKKNNLPFKLTCATTRQVVNVVTTKIALKGG

SEQ ID NO: 15850 - protein, 1946 aa, Artificial Sequence
  SARS-CoV-2__MT856456.1__non-structural protein 3 (NSP3)
MAPTKVTFGDDTVIEVQGYKSVNITFELDERIDKVLNEKCSAYTVELGTEVDEFACVVADAVIKTLQPVSELLTPLGIDLDEWSMATYYLFDESGEFKLASHMYCSFYPPDEDEEEGDCEEEEFEPSTQYEYGTEDDYQGKPLEFGATSAALQPEEEQEEDWLDDDSQQTVGQQDGSEDNQTTTIQTIVEVQPQLEMELTPVVQTIEVNSFSGYLKLTDNVYIKNADIVEEAKKVKPTVVVNAANVYLKHGGGVAGALNKATNNAMQVESDDYIATNGPLKVGGSCVLSGHNLAKHCLHVVGPNVNKGEDIQLLKSAYENFNQHEVLLAPLLSAGIFGADPIHSLRVCVDTVRTNVYLAVFDKNLYDKLVSSFLEMKSEKQVEQKIAEIPKEEVKPFITESKPSVEQRKQDDKKIKACVEEVTTTLEETKFLTENLLLYIDINGNLHPDSATLVSDIDITFLKKDAPYIVGDVVQEGVLTAVVIPTKKAGGTTEMLAKALRKVPTDNYITTYPGQGLNGYTVEEAKTVLKKCKSAFYILPSIISNEKQEILGTVSWNLREMLAHAEETRKLMPVCVETKAIVSTIQRKYKGIKIQEGVVDYGARFYFYTSKTTVASLINTLNDLNETLVTMPLGYVTHGLNLEEAARYMRSLKVPATVSVSSPDAVTAYNGYLTSSSKTPEEHFIETILLAGSYKDWSYSGQSTQLGIEFLKRGDKSVYYTSNPTTFHLDGEVITFDNLKTLLSLREVRTIKVFTTVDNINLHTQVVDMSMTYGQQFGPTYLDGADVTKIKPHNSHEGKTFYVLPNDDTLRVEAFEYYHTTDPSFLGRYMSALNHTKKWKYPQVNGLTSIKWADNNCYLATALLTLQQIELKFNPPALQDAYYRARAGEAANFCALILAYCNKTVGELGDVRETMSYLFQHANLDSCKRVLNVVCKTCGQQQTTLKGVEAVMYMGTLSYEQFKKGVQIPCTCGKQATKYLVQQESPFVMMSAPPAQYELKHGTFTCASEYTGNYQCGHYKHITSKETLYCIDGALLTKSSEYKGPITDVFYKENSYTTTIKPVTYKLDGVVCTEIDPKLDNYYKKDNSYFTEQPIDLVPNQPYPNASFDNFKFVCDNIKFADDLNQLTGYKKPASRELKVTFFPDLNGDVVAIDYKHYTPSFKKGAKLLHKPIVWHVNNATNKATYKPNTWCIRCLWSTKPVETSNSFDVLKSEDAQGMDNLACEDLKPVSEEVVENPTIQKDVLECNVKTTEVVGDIILKPANNSLKITEEVGHTDLMAAYVDNSSLTIKKPNELSRVLGLKTLATHGLAAVNSVPWDTIANYAKPFLNKVVSTTTNIVTRCLNRVCTNYMPYFFTLLLQLCTFTRSTNSRIKASMPTTIAKNTVKSVGKFCLEASFNYLKSPNFSKLINIIIWFLLLSVCLGSLIYSTAALGVLMSNLGMPSYCTGYREGYLNSTNVTIATYCTGSIPCSVCLSGLDSLDTYPSLETIQITISSFKWDLTAFGLVAEWFLAYILFTRFFYVLGLAAIMQLFFSYFAVHFISNSWLMWLIINLVQMAPISAMVRMYIFFASFYYVWKSYVHVVDGCNSSTCMMCYKRNRATRVECTTIVNGVRRSFYVYANGGKGFCKLHNWNCVNCDTFCAGSTFISDEVARDLSLQFKRPINPTDQSSYIVDSVTVKNGSIHLYFDKAGQKTYERHSLSHFVNLDNLRANNTKGSLPINVIVFDGKSKCEESSAKSASVYYSQLMCQPILLLDQALVSDVGDSAEVAVKMFDAYVNTFSSTFNVPMEKLKTLVATAEAELAKNVSLDNVLSTFISAARQGFVDSDVETKDVVECLKLSHQSDIEVTGDSCNNYMLTYNKVENMTPRDLGACIDCSARHINAQVAKSHNIALIWNVKDFMSLSEQLRKQIRSAAKKNNLPFKLTCATTRQVVNVVTTKIALKGG

SEQ ID NO: 15851 - protein, 1946 aa, Artificial Sequence
  SARS-CoV-2__MT856680.1__non-structural protein 3 (NSP3)
MAPTKVTFGDDTVIEVQGYKSVNITFELDERIDKVLNEKCSAYTVELGTEVNEFACVVADAVIKTLQPVSELLTPLGIDLDEWSMATYYLFDESGEFKLASHMYCSFYPPDEDEEEGDCEEEEFEPSTQYEYGTEDDYQGKPLEFGATSAALQPEEEQEEDWLDDDSQQTVGQQDGSEDNQTTTIQTIVEVQPQLEMELTPVVQTIEVNSFSGYLKLTDNVYIKNADIVEEAKKVKPTVVVNAANVYLKHGGGVAGALNKATNNAMQVESDDYIATNGPLKVGGSCVLSGHNLAKHCLHVVGPNVNKGEDIQLLKSAYENFNQHEVLLAPLLSAGIFGADPIHSLRVCVDTVRTNVYLAVFDKNLYDKLVSSFLEMKSEKQVEQKIAEIPKEEVKPFITESKPSVEQRKQDDKKIKACVEEVTTTLEETKFLTENLLLYIDINGNLHPDSATLVSDIDITFLKKDAPYIVGDVVQEGVLTAVVIPTKKAGGTTEMLAKALRKVPTDNYITTYPGQGLNGYTVEEAKTVLKKCKSAFYILPSIISNEKQEILGTVSWNLREMLAHAEETRKLMPVCVETKAIVSTIQRKYKGIKIQEGVVDYGARFYFYTSKTTVASLINTLNDLNETLVTMPLGYVTHGLNLEEAARYMRSLKVPATVSVSSPDAVTAYNGYLTSSSKTPEEHFIETISLAGSYKDWSYSGQSTQLGIEFLKRGDKSVYYTSNPTTFHLDGEVITFDNLKTLLSLREVRTIKVFTTVDNINLHTQVVDMSMTYGQQFGPTYLDGADVTKIKPHNSHEGKTFYVLPNDDTLRVEAFEYYHTTDPSFLGRYMSALNHTKKWKYPQVNGLTSIKWADNNCYLATALLTLQQIELKFNPPALQDAYYRARAGEAANFCALILAYCNKTVGELGDVRETMSYLFQHANLDSCKRVLNVVCKTCGQQQTTLKGVEAVMYMGTLSYEQFKKGVQIPCTCGKQATKYLVQQESPFVMMSAPPAQYELKHGTFTCASEYTGNYQCGHYKHITSKETLYCIDGALLTKSSEYKGPITDVFYKENSYTTTIKPVTYKLDGVVCTEIDPKLDNYYKKDNSYFTEQPIDLVPNQPYPNASFDNFKFVCDNIKFADDLNQLTGYKKPASRELKVTFFPDLNGDVVAIDYKHYTPSFKKGAKLLHKPIVWHVNNATNKATYKPNTWCIRCLWSTKPVETSNSFDVLKSEDAQGMDNLACEDLKPVSEEVVENPTIQKDVLECNVKTTEVVGDIILKPANNSLKITEEVGHTDLMAAYVDNSSLTIKKPNELSRVLGLKTLATHGLAAVNSVPWDTIANYAKPFLNKVVSTTTNIVTRCLNRVCTNYMPYFFTLLLQLCTFTRSTNSRIKASMPTTIAKNTVKSVGKFCLEASFNYLKSPNFSKLINIIIWFLLLSVCLGSLIYSTAALGVLMSNLGMPSYCTGYREGYLNSTNVTIATYCTGSIPCSVCLSGLDSLDTYPSLETIQITISSFKWDLTAFGLVAEWFLAYILFTRFFYVLGLAAIMQLFFSYFAVHFISNSWLMWLIINLVQMAPISAMVRMYIFFASFYYVWKSYVHVVDGCNSSTCMMCYKRNRATRVECTTIVNGVRRSFYVYANGGKGFCKLHNWNCVNCDTFCAGSTFISDEVARDLSLQFKRPINPTDQSSYIVDSVTVKNGSIHLYFDKAGQKTYERHSLSHFVNLDNLRANNTKGSLPINVIVFDGKSKCEESSAKSASVYYSQLMCQPILLLDQALVSDVGDSAEVAVKMFDAYVNTFSSTFNVPIEKLKTLVATAEAELAKNVSLDNVLSTFISAARQGFVDSDVETKDVVECLKLSHQSDIEVTGDSCNNYMLTYNKVENMTPRDLGACIDCSARHINAQVAKSHNIALIWNVKDFMSLSEQLRKQIRSAAKKNNLPFKLTCATTRQVVNVVTTKIALKGG

SEQ ID NO: 15852 - protein, 1946 aa, Artificial Sequence
  SARS-CoV-2__MT856685.1__non-structural protein 3 (NSP3)
MAPTKVTFGDDTVIEVQGYKSVNITFELDERIDKVLNEKCSAYTVELGTEVNEFACVVADAVIKTLQPVSELLTPLGIDLDEWSMATYYLFDESGEFKLASHMYCSFYPPDEDEEEGDCEEEEFEPSTQYEYGTEDDYQGKPLEFGATSAALQPEEEQEEDWLDDDSQQTVGQQDGSEDNQTTTIQTIVEVQPQLEMELTPVVQTIEVNSFSGYLKLTDNVYIKNADIVEEAKKVKPTVVVNAANVYLKHGGGVAGALNKATNNAMQVESDDYIATNGPLKVGGSCVLSGHNLAKHCLHVVGPNVNKGEDIQLLKSAYENFNQHEVLLAPLLSAGIFGADPIHSLRVCVDTVRTNVYLAVFDKNLYDKLVSSFLEMKSEKQVEQKIAEIPKEEVKPFITESKPSVEQRKQDDKKIKACVEEVTTTLEETKFLTENLLLYIDINGNLHPDSATLVSDIDITFLKKDAPYIVGDVVQEGVLTAVVIPTKKAGGTTEMLAKALRKVPTDNYITTYPGQGLNGYTVEEAKTVLKKCKSAFYILPSIISNEKQEILGTVSWNLREMLAHAEETRKLMPVCVETKAIVSTIQRKYKGIKIQEGVVDYGARFYFYTSKTTVASLINTLNDLNETLVTMPLGYVTHGLNLEEAARYMRSLKVPATVSVSSPDAVTAYNGYLTSSSKTPEEHFIETISLAGSYKDWSYSGQSTQLGIEFLKRGDKSVYYTSNPTTFHLDGEVITFDNLKTLLSLREVRTIKVFTTVDNINLHTQVVDMSMTYGQQFGPTYLDGADVTKIKPHNSHEGKTFYVLPNDDTLRVEAFEYYHTTDPSFLGRYMSALNHTKKWKYPQVNGLTSIKWADNNCYLATALLTLQQIELKFNPPALQDAYYRARAGEAANFCALILAYCNKTVGELGDVRETMSYLFQHANLDSCKRVLNVVCKTCGQQQTTLKGVEAVMYMGTLSYEQFKKGVQIPCTCGKQATKYLVQQESPFVMMSAPPAQYELKHGTFTCASEYTGNYQCGHYKHITSKETLYCIDGALLTKSSEYKGPITDVFYKENSYTTTIKPVTYKLDGVVCTEIDPKLDNYYKKDNSYFTEQPIDLVPNQPYPNASFDNFKFVCDNIKFADDLNQLTGYKKPASRELKVTFFPDLNGDVVAIDYKHYTPSFKKGAKLLHKPIVWHVNNATNKATYKPNTWCIRCLWSTKPVETSNSFDVLKSEDAQGMDNLACEDLKPVSEEVVENPTIQKDVLECNVKTTEVVGDIILKPANNSLKITEEVGHTDLMAAYVDNSSLTIKKPNELSRVLGLKTLATHGLAAVNSVPWDTIANYAKLFLNKVVSTTTNIVTRCLNRVCTNYMPYFFTLLLQLCTFTRSTNSRIKASMPTTIAKNTVKSVGKFCLEASFNYLKSPNFSKLINIIIWFLLLSVCLGSLIYSTAALGVLMSNLGMPSYCTGYREGYLNSTNVTIATYCTGSIPCSVCLSGLDSLDTYPSLETIQITISSFKWDLTAFGLVAEWFLAYILFTRFFYVLGLAAIMQLFFSYFAVHFISNSWLMWLIINLVQMAPISAMVRMYIFFASFYYVWKSYVHVVDGCNSSTCMMCYKRNRATRVECTTIVNGVRRSFYVYANGGKGFCKLHNWNCVNCDTFCAGSTFISDEVARDLSLQFKRPINPTDQSSYIVDSVTVKNGSIHLYFDKAGQKTYERHSLSHFVNLDNLRANNTKGSLPINVIVFDGKSKCEESSAKSASVYYSQLMCQPILLLDQALVSDVGDSAEVAVKMFDAYVNTFSSTFNVPMEKLKTLVATAEAELAKNVSLDNVLSTFISAARQGFVDSDVETKDVVECLKLSHQSDIEVTGDSCNNYMLTYNKVENMTPRDLGACIDCSARHINAQVAKSHNIALIWNVKDFMSLSEQLRKQIRSAAKKNNLPFKLTCATTRQVVNVVTTKIALKGG

SEQ ID NO: 15853 - protein, 1946 aa, Artificial Sequence
  SARS-CoV-2__MT846005.1__non-structural protein 3 (NSP3)
MAPTKVTFGDDTVIEVQGYKSVNITFELDERIDKVLNEKCSAYTVELGTEVNEFACVVADAVIKTLQPVSELLTPLGIDLDEWSMATYYLFDESGEFKLASHMYCSFYPLDEDEEEGDCEEEEFEPSTQYEYGTEDDYQGKPLEFGATSAALQPEEEQEEDWLDDDSQQTVGQQDGSEDNQTTTIQTIVEVQPQLEMELTPVVQTIEVNSFSGYLKLTDNVYIKNADIVEEAKKVKPTVVVNAANVYLKHGGGVAGALNKATNNAMQVESDDYIATNGPLKVGGSCVLSGHNLAKHFLHVVGPNVNKGEDIQLLKSAYENFNQHEVLLAPLLSAGIFGADPIHSLRVCVDTVRTNVYLAVFDKNLYDKLVSSFLEMKSEKQVEQKIAEIPKEEVKPFITESKPSVEQRKQDDKKIKACVEEVTTTLEETKFLTENLLLYIDINGNLHPDSATLVSDIDITFLKKDAPYIVGDVVQEGVLTAVVIPTKKAGGTTEMLAKALRKVPTDNYITTYPGQGLNGYTVEEAKTVLKKCKSAFYILPSIISNEKQEILGTVSWNLREMLAHAEETRKLMPVCVETKAIVSTIQRKYKGIKIQEGVVDYGARFYFYTSKTTVASLINTLNDLNETLVTMPLGYVTHGLNLEEAARYMRSLKVPATVSVSSPDAVTAYNGYLTSSSKTPEEHFIETISLAGSYKDWSYSGQSTQLGIEFLKRGDKSVYYTSNPTTFHLDGEVITFDNLKTLLSLREVRTIKVFTTVDNINLHTQVVDMSMTYGQQFGPTYLDGADVTKIKPHNSHEGKTFYVLPNDDTLRVEAFEYYHTTDPSFLGRYMSALNHTKKWKYPQVNGLTSIKWADNNCYLATALLTLQQIELKFNPPALQDAYYRARAGEAANFCALILAYCNKTVGELGDVRETMSYLFQHANLDSCKRVLNVVCKTCGQQQTTLKGVEAVMYMGTLSYEQFKKGVQIPCTCGKQATKYLVQQESPFVMMSAPPAQYELKHGTFTCASEYTGNYQCGHYKHITSKETLYCIDGALLTKSSEYKGPITDVFYKENSYTTTIKPVTYKLDGVVCTEIDPKLDNYYKKDNSYFTEQPIDLVPNQPYPNASFDNFKFVCDNIKFADDLNQLTGYKKPASRELKVTFFPDLNGDVVAIDYKHYTPSFKKGAKLLHKPIVWHVNNATNKATYKPNTWCIRCLWSTKPVETSNSFDVLKSEDAQGMDNLACEDLKPVSEEVVENPTIQKDVLECNVKTTEVVGDIILKPANNSLKITEEVGHTDLMAAYVDNSSLTIKKPNELSRVLGLKTLATHGLAAVNSVPWDTIANYAKPFLNKVVSTTTNIVTRCLNRVCTNYMPYFFTLLLQLCTFTRSTNSRIKASMPTTIAKNTVKSVGKFCLEASFNYLKSPNFSKLINIIIWFLLLSVCLGSLIYSTAALGVLMSNLGMPSYCTGYREGYLNSTNVTIATYCTGSIPCSVCLSGLDSLDTYPSLETIQITISSFKWDLTAFGLVAEWFLAYILFTRFFYVLGLAAIMQLFFSYFAVHFISNSWLMWLIINLVQMAPISAMVRMYIFFASFYYVWKSYVHVVDGCNSSTCMMCYKRNRATRVECTTIVNGVRRSFYVYANGGKGFCKLHNWNCVNCDTFCAGSTFISDEVARDLSLQFKRPINPTDQSSYIVDSVTVKNGSIHLYFDKAGQKTYERHSLSHFVNLDNLRANNTKGSLPINVIVFDGKSKCEESSAKSASVYYSQLMCQPILLLDQALVSDVGDSAEVAVKMFDAYVNTFSSTFNVPMEKLKTLVATAEAELAKNVSLDNVLSTFISAARQGFVDSDVETKDVVECLKLSHQSDIEVTGDSCNNYMLTYNKVENMTPRDLGACIDCSARHINAQVAKSHNIALIWNVKDFMSLSEQLRKQIRSAAKKNNLPFKLTCATTRQVVNVVTTKIALKGG

SEQ ID NO: 15854 - protein, 1946 aa, Artificial Sequence
  SARS-CoV-2__MT846006.1__non-structural protein 3 (NSP3)
MAPTKVTFGDDTVIEVQGYKSVNITFELDERIDKVLNEKCSAYTVELGTEVNEFACVVADAVIKTLQPVSELLTPLGIDLDEWSMATYYLFDESGEFKLASHMYCSFYPPDEDEEEGDCEEEEFEPSTQYEYGTEDDYQGKPLEFGATSAALQPEEEQEEDWLDDDSQQTVGQQDGSEDNQTTTIQTIVEVQPQLEMELTPVVQTIEVNSFSGYLKLTDNVYIKNADIVEEAKKVKPTVVVNAANVYLKHGGGVAGALNKATNNAMQVESDDYIATNGPLKVGGSCVLSGHNLAKHCLHVVGPNVNKGEDIQLLKSAYENFNQHEVLLAPLLSAGIFGADPIHSLRVCVDTVRTNVYLAVFDKNLYDKLVSSFLEMKSEKQVEQKIAEIPKEEVKPFITESKPSVEQRKQDDKKIKACVEEVTTTLEETKFLTENLLLYIDINGNLHPDSATLVSDIDITFLKKDAPYIVGDVVQEGVLTAVVIPTKKAGGTTEMLAKALRKVPTDNYITTYPGQGLNGYTVEEAKTVLKKCKSAFYILPSIISNEKQEILGTVSWNLREMLAHAEETRKLMPVCVETKAIVSTIQRKYKGIKIQEGVVDYGARFYFYTSKTTVASLINTLNDLNETLVTMPLGYVTHGLNLEEAARYMRSLKVPATVSVSSPDAVTAYNGYLTSSSKTPEEHFIETISLAGSYKDWSYSGQSTQLGIEFLKRGDKSVYYTSNPTTFHLDGEVITFDNLKTLLSLREVRTIKVFTTVDNINLHTQVVDMSMTYGQQFGPTYLDGADVTKIKPHNSHEGKTFYVLPNDDTLRVEAFEYYHTTDPSFLGRYMSALNHTKKWKYPQVNGLTSIKWADNNCYLATALLTLQQIELKFNPPALQDAYYRARAGEAANFCALILAYCNKTVGELGDVRETMSYLFQHANLDSCKRVLNVVCKTCGQQQTTLKGVEAVMYMGTLSYEQFKKGVQIPCTCGKQATKYLVQQESPFVMMSAPPAQYELKHGTFTCASEYTGNYQCGHYKHITSKETLYCIDGALLTKSSEYKGPITDVFYKENSYTTTIKPVTYKLDGVVCTEIDPKLDNYYKKDNSYFTEQPIDLVPNQPYPNASFDNFKFVCDNIKFADDLNQLTGYKKPASRELKVTFFPDLNGDVVAIDYKHYTPSFKKGAKLLHKPIVWHVNNATNKATYKPNTWCIRCLWSTKPVETSNSFDVLKSEDAQGMDNLACEDLKPVSEEVVENPTIQKDVLECNVKTTEVVGDIILKPANNSLKITEEVGHTDLMAAYVDNSSLTIKKPNELSRVLGLKTLATHGLAAVNSVPWDTIANYAKPFLNKVVSTTTNIVTRCLNRVCTNYMPYFFTLLLQLCTFTRSTNSRIKASMPTTIAKNTVKSVGKFCLEASFNYLKSPNFSKLINIIIWFLLLSVCLGSLIYSTAALGVLMSNLGMPSYCTGYREGYLNSTNVTIATYCTGSIPCSVCLSGLDSLDTYPSLETIQITISSFKWDLTAFGLVAEWFLAYILFTRFFYVLGLAAIMQLFFSYFAVHFISNSWLMWLIINLVQMAPISAMVRMYIFFASFYYVWKSYVHVVDGCNSSTCMMCYKRNRATRVECTTIVNGVRRSFYVYANGGKGFCKLHNWNCVNCDTFCAGSTFISDEVARDLSLQFKRPINPTDQSSYIVDSVTVKNGSIHLYFDKAGQKTYERHSLSHFVNLDNLRANNTKGSLPINVIVFDGKSKCEESSAKSASVYYSQLMCQPILLLDQALVSDVGDSAEVAVKMFDAYVNTFSSTFNVPMEKLKTLVATAEAELAKNVSLDNVLSTFISAARQGFVDSDVETKDVVECLKLSHQSDIEVTGDSCNNYMLTYNKVENMTPRDLGACIDCSARHINAQVAKSHNIALIWNVKDFMSLSEQLRKQIRSAAKKNNLPFKLTCATTRQVVNVVTTKVALKGG

SEQ ID NO: 15855 - protein, 1946 aa, Artificial Sequence
  SARS-CoV-2__MT846012.1__non-structural protein 3 (NSP3)
MAPTKVTFGDDTVIEVQGYKSVNITFELDERIDKVLNEKCSAYTVELGTEVNEFACVVADAVIKTLQPVSELLTPLGIDLDEWSMATYYLFDESGEFKLASHMYCSFYPPDEDEEEGDCEEEEFEPSTQYEYGTEDDYQGKPLEFGATSAALQLEEEQEEDWLDDDSQQTVGQQDGSEDNHTTTIQTIVEVQPQLEMELTPVVQTIEVNSFSGYLKLTDNVYIKNADIVEEAKKVKPTVVVNAANVYLKHGGGVAGALNKATNNAMQVESDDYIATNGPLKVGGSCVLSGHNLAKHCLHVVGPNVNKGEDIQLLKSAYENFNQHEVLLAPLLSAGIFGADPIHSLRVCVDTVRTNVYLAVFDKNLYDKLVSSFLEMKSEKQVEQKIAEIPKEEVKPFITESKPSVEQRKQDDKKIKACVEEVTTTLEETKFLTENLLLYIDINGNLHPDSATLVSDIDITFLKKDAPYIVGDVVQEGVLTAVVIPTKKAGGTTEMLAKALRKVPTDNYITTYPGQGLNGYTVEEAKTVLKKCKSAFYILPSIISNEKQEILGTVSWNLREMLAHAEETRKLMPVCVETKAIVSTIQRKYKGIKIQEGVVDYGARFYFYTSKTTVASLINTLNDLNETLVTMPLGYVTHGLNLEEAARYMRSLKVPATVSVSSPDAVTAYNGYLTSSSKTPEEHFIETISLAGSYKDWSYSGQSTQLGIEFLKRGDKSVYYTSNPTTFHLDGEVITFDNLKTLLSLREVRTIKVFTTVDNINLHTQVVDMSMTYGQQFGPTYLDGADVTKIKPHNSHEGKTFYVLPNDDTLRVEAFEYYHTTDPSFLGRYMSALNHTKKWKYPQVNGLTSIKWADNNCYLATALLTLQQIELKFNPPALQDAYYRARAGEAANFCALILAYCNKTVGELGDVRETMSYLFQHANLDSCKRVLNVVCKTCGQQQTTLKGVEAVMYMGTLSYEQFKKGVQIPCTCGKQATKYLVQQESPFVMMSAPPAQYELKHGTFTCASEYTGNYQCGHYKHITSKETLYCIDGALLTKSSEYKGPITDVFYKENSYTTTIKPVTYKLDGVVCTEIDPKLDNYYKKDNSYFTEQPIDLVPNQPYPNASFDNFKFVCDNIKFADDLNQLTGYKKPASRELKVTFFPDLNGDVVAIDYKHYTPSFKKGAKLLHKPIVWHVNNATNKATYKPNTWCIRCLWSTKPVETSNSFDVLKSEDAQGMDNLACEDLKPVSEEVVENPTIQKDVLECNVKTTEVVGDIILKPANNSLKITEEVGHTDLMAAYVDNSSLTIKKPNELSRVLGLKTLATHGLAAVNSVPWDTIANYAKPFLNKVVSTTTNIVTRCLNRVCTNYMPYFFTLLLQLCTFTRSTNSRIKASMPTTIAKNTVKSVGKFCLEASFNYLKSPNFSKLINIIIWFLLLSVCLGSLIYSTAALGVLMSNLGMPSYCTGYREGYLNSTNVTIATYCTGSIPCSVCLSGLDSLDTYPSLETIQITISSFKWDLTAFGLVAEWFLAYILFTRFFYVLGLAAIMQLFFSYFAVHFISNSWLMWLIINLVQMAPISAMVRMYIFFASFYYVWKSYVHVVDGCNSSTCMMCYKRNRATRVECTTIVNGVRRSFYVYANGGKGFCKLHNWNCVNCDTFCAGSTFISDEVARDLSLQFKRPINPTDQSSYIVDSVTVKNGSIHLYFDKAGQKTYERHSLSHFVNLDNLRANNTKGSLPINVIVFDGKSKCEESSAKSASVYYSQLMCQPILLLDQALVSDVGDSAEVAVKMFDAYVNTFSSTFNVPMEKLKTLVATAEAELAKNVSLDNVLSTFISAARQGFVDSDVETKDVVECLKLSHQSDIEVTGDSCNNYMLTYNKVENMTPRDLGACIDCSARHINAQVAKSHNIALIWNVKDFMSLSEQLRKQIRSAAKKNNLPFKLTCATTRQVVNVVTTKIALKGG

SEQ ID NO: 15856 - protein, 1946 aa, Artificial Sequence
  SARS-CoV-2__MT846413.1__non-structural protein 3 (NSP3)
MAPTKVTFGDDTVIEVQGYKSVNITFELDERIDKVLNEKCSAYTVELGTEVNEFACVVADAVIKTLQPVSELLTPLGIDLDEWSMATYYLFDESGEFKLASHMYCSFYPPDEDEEEGDCEEEEFEPSTQYEYGTEDDYQGKPLEFGATSAALQPEEEQEEDWLDDDSQQTVGQQDGSEDNQTTTIQTIVEVQPQLEMELTPVVQTIEVNSFSGYLKLTDNVYIKNADIVEEAKKVKPTVVVNAANVYLKHGGGVAGALNKATNNAMQVESDDYIATNGPLKVGGSCVLSGHNLAKHCLHVVGPNVNKGEDIQLLKSAYENFNQHEVLLAPLLSAGIFGADPIHSLRVCVDTVRTNVYLAVFDKNLYDKLVSSFLEMKSEKQVEQKIAEIPKEEVKPFITESKPSVEQRKQDDKKIKACVEEVTTTLEETKFLTENLLLYIDINGNLHPDSATLVSDIDITFLKKDAPYIAGDVVQEGVLTAVVIPTKKAGGTTEMLAKALRKVPTDNYITTYPGQGLNGYTVEEAKTVLKKCKSAFYILPSIISNEKQEILGTVSWNLREMLAHAEETRKLMPVCVETKAIVSTIQRKYKGIKIQEGVVDYGARFYFYTSKTTVASLINTLNDLNETLVTMPLGYVTHGLNLEEAARYMRSLKVPATVSVSSPDAVTAYNGYLTSSSKTPEEHFIETISLAGSYKDWSYSGQSTQLGIEFLKRGDKSVYYTSNPTTFHLDGEVITFDNLKTLLSLREVRTIKVFTTVDNINLHTQVVDMSMTYGQQFGPTYLDGADVTKIKPHNSHEGKTFYVLPNDDTLRVEAFEYYHTTDPSFLGRYMSALNHTKKWKYPQVNGLTSIKWADNNCYLATALLTLQQIELKFNPPALQDAYYRARAGEAANFCALILAYCNKTVGELGDVRETMSYLFQHANLDSCKRVLNVVCKTCGQQQTTLKGVEAVMYMGTLSYEQFKKGVQIPCTCGKQATKYLVQQESPFVMMSAPPAQYELKHGTFTCASEYTGNYQCGHYKHITSKETLYCIDGALLTKSSEYKGPITDVFYKENSYTTTIKPVTYKLDGVVCTEIDPKLDNYYKKDNSYFTEQPIDLVPNQPYPNASFDNFKFVCDNIKFADDLNQLTGYKKPASRELKVTFFPDLNGDVVAIDYKHYTPSFKKGAKLLHKPIVWHVNNATNKATYKPNTWCIRCLWSTKPVETSNSFDVLKSEDAQGMDNLACEDLKPVSEEVVENPTIQKDVLECNVKTTEVVGDIILKPANNSLKITEEVGHTDLMAAYVDNSSLTIKKPNELSRVLGLKTLATHGLAAVNSVPWDTIANYAKPFLNKVVSTTTNIVTRCLNRVCTNYMPYFFTLLLQLCTFTRSTNSRIKASMPTTIAKNTVKSVGKFCLEASFNYLKSPNFSKLINIIIWFLLLSVCLGSLIYSTAALGVLMSNLGMPSYCTGYREGYLNSTNVTIATYCTGSIPCSVCLSGLDSLDTYPSLETIQITISSFKWDLTAFGLVAEWFLAYILFTRFFYVLGLAAIMQLFFSYFAVHFISNSWLMWLIINLVQMAPISAMVRMYIFFASFYYVWKSYVHVVDGCNSSTCMMCYKRNRATRVECTTIVNGVRRSFYVYANGGKGFCKLHNWNCVNCDTFCAGSTFISDEVARDLSLQFKRPINPTDQSSYIVDSVTVKNGSIHLYFDKAGQKTYERHSLSHFVNLDNLRANNTKGSLPINVIVFDGKSKCEESSAKSASVYYSQLMCQPILLLDQALVSDVGDSAEVAVKMFDAYVNTFSSTFNVPMEKLKTLVATAEAELAKNVSLDNVLSTFISAARQGFVDSDVETKDVVECLKLSHQSDIEVTGDSCNNYMLTYNKVENMTPRDLGACIDCSARHINAQVAKSHNIALIWNVKDFMSLSEQLRKQIRSAAKKNNLPFKLTCATTRQVVNVVTTKIALKGG

SEQ ID NO: 15857 - protein, 1946 aa, Artificial Sequence
  SARS-CoV-2__MT846428.1__non-structural protein 3 (NSP3)
MAPTKVTFGDDTVIEVQGYKSVNITFELDERIDKVLNEKCSAYTVELGTEVNEFACVVADAVIKTLQPVSELLTPLGIDLDEWSMATYYLFDESGEFKLASHMYCSFYPPDEDEEEGDCEEEEFEPSTQYEYGTEDDYQGKPLEFGATSAALQPEEEQEEDWLDDDSQQTVGQQDGSEDNQTTTIQTIVEVQPQLEMELTPVVQTIEVNSFSGYLKLTDNVYIKNADIVEEAKKVKPTVVVNAANVYLKHGGGVAGALNKATNNAMQVESDDYIATNGPLKVGGSCVLSGHNLAKHCLHVVGPNVNKGEDIQLLKSAYENFNQHEVLLAPLLSAGIFGADPIHSLRVCVDTVRTNVYLAVFDKNLYDKLVSSFLEMKSEKQVEQKIAEIPKEEVKPFITESKPSVEQRKQDDKKIKACVEEVTTTLEETKFLTENLLLYIDINGNLHPDSATLVSDIDITFLKKDAPYIVGDVVQEGVLTAVVIPTKKAGGTTEMLAKALRKVPTDNYITTYPGQGLNGYTVEEAKTVLKKCKSAFYILPSIISNEKQEILGTVSWNLREMLAHAEETRKLMPVCVETKAIVSTIQRKYKGIKIQEGVVDYGARFYFYTSKTTVASLINTLNDLNETLVTMPLGYVTHGLNLEEAARYMRSLKVPATVSVSSPDAVTAYNGYLTSSSKTPEEHFIETISLAGSYKDWSYSGQSTQLGIEFLKRGDKSVYYTSNPTTFHLDGEVITFDNLKTLLSLREVRTIKVFTTVDNINLHTQVVDMSMTYGQQFGPTYLDGADVTKIKPHNSHEGKTFYVLPNDDTLRVEAFEYYHTTDPSFLGRYMSALNHTKKWKYPQVNGLTSIKWADNNCYLATALLTLQQIELKFNPPALQDAYYRARAGEAANFCALILAYCNKTVGELGDVRETMSYLFQHANLDSCKRVLNVVCKTCGQQQTTLKGVEAVMYMGTLSYEQFKKGVQIPCTCGKQATKYLVQQESPFVMMSAPPAQYELKHGTFTCASEYTGNYQCGHYKHITSKETLYCIDGALLTKSSEYKGPITDVFYKENSYTTTIKPVTYKLDGVVCTEIDPKLDNYYKKDNSYFTEQPIDLVPNQPYPNASFDNFKFVCDNIKFADDLNQLTGYKKPASRELKVTFFPDLNGDVVAIDYKHYTPSFKKGAKLLHKPIVWHVNNATNKATYKPNTWCTRCLWSTKPVETSNSFDVLKSEDAQGMDNLACEDLKPVSEEVVENPTIQKDVLECNVKTTEVVGDIILKPANNSLKITEEVGHTDLMAAYVDNSSLTIKKPNELSRVLGLKTLATHGLAAVNSVPWDTIANYAKPFLNKVVSTTTNIVTRCLNRVCTNYMPYFFTLLLQLCTFTRSTNSRIKASMPTTIAKNTVKSVGKFCLEASFNYLKSPNFSKLINIIIWFLLLSVCLGSLIYSTAALGVLMSNLGMPSYCTGYREGYLNSTNVTIATYCTGSIPCSVCLSGLDSLDTYPSLETIQITISSFKWDLTAFGLVAEWFLAYILFTRFFYVLGLAAIMQLFFSYFAVHFISNSWLMWLIINLVQMAPISAMVRMYIFFASFYYVWKSYVHVVDGCNSSTCMMCYKRNRATRVECTTIVNGVRRSFYVYANGGKGFCKLHNWNCVNCDTFCAGSTFISDEVARDLSLQFKRPINPTDQSSYIVDSVTVKNGSIHLYFDKAGQKTYERHSLSHFVNLDNLRANNTKGSLPINVIVFDGKSKCEESSAKSASVYYSQLMCQPILLLDQALVSDVGDSAEVAVKMFDAYVNTFSSTFNVPMEKLKTLVATAEAELAKNVSLDNVLSTFISAARQGFVDSDVETKDVVECLKLSHQSDIEVTGDSCNNYMLTYNKVENMTPRDLGACIDCSARHINAQVAKSHNIALIWNVKDFMSLSEQLRKQIRSAAKKNNLPFKLTCATTRQVVNVVTTKIALKGG

SEQ ID NO: 15858 - protein, 1946 aa, Artificial Sequence
  SARS-CoV-2__MT846430.1__non-structural protein 3 (NSP3)
MAPTKVTFGDDTVIEVQGYKSVNITFELDERIDKVLNEKCSAYTVELGTEVNEFACVVADAVIKTLQPVSELLTPLGIDLDEWSMATYYLFDESGEFKLASHMYCSFYPPDEDEEEGDCEEEEFEPSTQYEYGTEDDYQGKPLEFGATSAALQPEEEQEEDWLDDDSQQTVGQQDGSEDNQTTTIQTIVEVQPQLEMELTPVVQTIEVNSFSGYLKLTDNVYIKNADIVEEAKKVKPTVVVNAANVYLKHGGGVAGALNKATNNAMQVESDDYIATNGPLKVGGSCVLSGHNLAKHCLHVVGPNVNKGEDIQLLKSAYENFNQHEVLLAPLLSAGIFGADPIHSLRVCVDTVRTNVYLAVFDKNLYDKLVSSFLEMKSEKQVEQKIAEIPKEEVKPFITESKPSVEQRKQDDKKIKACVEEVTTTLEEIKFLTENLLLYIDINGNLHPDSATLVSDIDITFLKKDAPYIVGDVVQEGVLTAVVIPTKKAGGTTEMLAKALRKVPTDNYITTYPGQGLNGYTVEEAKTVLKKCKSAFYILPSIISNEKQEILGTVSWNLREMLAHAEETRKLMPVCVETKAIVSTIQRKYKGIKIQEGVVDYGARFYFYTSKTTVASLINTLNDLNETLVTMPLGYVTHGLNLEEAARYMRSLKVPATVSVSSPDAVTAYNGYLTSSSKTPEEHFIETISLAGSYKDWSYSGQSTQLGIEFLKRGDKSVYYTSNPTTFHLDGEVITFDNLKTLLSLREVRTIKVFTTVDNINLHTQVVDMSMTYGQQFGPTYLDGADVTKIKPHNSHEGKTFYVLPNDDTLRVEAFEYYHTTDPSFLGRYMSALNHTKKWKYPQVNGLTSIKWADNNCYLATALLTLQQIELKFNPPALQDAYYRARAGEAANFCALILAYCNKTVGELGDVRETMSYLFQHANLDSCKRVLNVVCKTCGQQQTTLKGVEAVMYMGTLSYEQFKKGVQIPCTCGKQATKYLVQQESPFVMMSAPPAQYELKHGTFTCASEYTGNYQCGHYKHITSKETLYCIDGALLTKSSEYKGPITDVFYKENSYTTTIKPVTYKLDGVVCTEIDPKLDNYYKKDNSYFTEQPIDLVPNQPYPNASFDNFKFVCDNIKFADDLNQLTGYKKPASRELKVTFFPDLNGDVVAIDYKHYTPSFKKGAKLLHKPIVWHVNNATNKATYKPNTWCIRCLWSTKPVETSNSFDVLKSEDAQGMDNLACEDLKPVSEEVVENPTIQKDVLECNVKTTEVVGDIILKPANNSLKITEEVGHIDLMAAYVDNSSLTIKKPNELSRVLGLKTLATHGLAAVNSVPWDTIANYAKPFLNKVVSTTTNIVTRCLNRVCTNYMPYFFTLLLQLCTFTRSTNSRIKASMPTTIAKNTVKSVGKFCLEASFNYLKSPNFSKLINIIIWFLLLSVCLGSLIYSTAALGVLMSNLGMPSYCTGYREGYLNSTNVTIATYCTGSIPCSVCLSGLDSLDTYPSLETIQITISSFKWDLTAFGLVAEWFLAYILFTRFFYVLGLAAIMQLFFSYFAVHFISNSWLMWLIINLVQMAPISAMVRMYIFFASFYYVWKSYVHVVDGCNSSTCMMCYKRNRATRVECTTIVNGVRRSFYVYANGGKGFCKLHNWNCVNCDTFCAGSTFISDEVARDLSLQFKRPINPTDQSSYIVDSVTVKNGSIHLYFDKAGQKTYERHSLSHFVNLDNLRANNTKGSLPINVIVFDGKSKCEESSAKSASVYYSQLMCQPILLLDQALVSDVGDSAEVAVKMFDAYVNTFSSTFNVPMEKLKTLVATAEAELAKNVSLDNVLSTFISAARQGFVDSDVETKDVVECLKLSHQSDIEVTGDSCNNYMLTYNKVENMTPRDLGACIDCSARHINAQVAKSHNIALIWNVKDFMSLSEQLRKQIRSAAKKNNLPFKLTCATTRQVVNVVTTKIALKGG

SEQ ID NO: 15859 - protein, 1946 aa, Artificial Sequence
  SARS-CoV-2__MT846469.1__non-structural protein 3 (NSP3)
MAPTKVTFGDDTVIEVQGYKSVNITFELDERIDKVLNEKCSAYTVELGTEVNEFACVVADAVIKTLQPVSELLTPLGIDLDEWSMATYYLFDESGEFKLASHMYCSFYPPDEDEEEGDCEEEEFEPSTQYEYGTEDDYQGKPLEFGATSAALQPEEEQEEDWLDDDSQQTVGQQDGSEDNQTTTIQTIVEVQPQLEMELTPVVQTIEVNSFSGYLKLTDNVYIKNADIVEEAKKVKPTVVVNAANVYLKHGGGVAGALNKATNNAMQVESDDYIATNGPLKVGGSCVLSGHNLAKHCLHVVGPNVNKGEDIQLLKSAYENFNQHEVLLAPLLSAGIFGADPIHSLRVCVDTVRTNVYLAVFDKNLYDKLVSSFLEMKSEKQVEQKIAEIPKEEVKPFITESKPSVEQRKQDDKKIKACVEEVTTTLEETKFLTENLLLYIDINGNLHPDSATLVSDIDITFLKKDAPYIVGDVVQEGVLTAVVIPTKKAGGTTEMLAKALRKVPTDNYITTYPGQGLNGYTVEEAKTVLKKCKSAFYILPSIISNEKQEILGTVSWSLREMLAHAEETRKLMPVCVETKAIVSTIQRKYKGIKIQEGVVDYGARFYFYTSKTTVASLINTLNDLNETLVTMPLGYVTHGLNLEEAARYMRSLKVPATVSVSSPDAVTAYNGYLTSSSKTPEEHFIETISLAGSYKDWSYSGQSTQLGIEFLKRGDKSVYYTSNPTTFHLDGEVITFDNLKTLLSLREVRTIKVFTTVDNINLHTQVVDMSMTYGQQFGPTYLDGADVTKIKPHNSHEGKTFYVLPNDDTLRVEAFEYYHTTDPSFLGRYMSALNHTKKWKYPQVNGLTSIKWADNNCYLATALLTLQQIELKFNPPALQDAYYRARAGEAANFCALILAYCNKTVGELGDVRETMSYLFQHANLDSCKRVLNVVCKTCGQQQTTLKGVEAVMYMGTLSYEQFKKGVQIPCTCGKQATKYLVQQESPFVMMSAPPAQYELKHGTFTCASEYTGNYQCGHYKHITSKETLYCIDGALLTKSSEYKGPITDVFYKENSYTTTIKPVTYKLDGVVCTEIDPKLDNYYKKDNSYFTEQPIDLVPNQPYPNASFDNFKFVCDNIKFADDLNQLTGYKKPASRELKVTFFPDLNGDVVAIDYKHYTPSFKKGAKLLHKPIVWHVNNATNKATYKPNTWCIRCLWSTKPVETSNSFDVLKSEDAQGMDNLACEDLKPVSEEVVENPTIQKDVLECNVKTTEVVGDIILKPANNSLKITEEVGHTDLMAAYVDNSSLTIKKPNELSRVLGLKTLATHGLAAVNSVPWDTIANYAKPFLNKVVSTTTNIVTRCLNRVCTNYMPYFFTLLLQLCTFTRSTNSRIKASMPTTIAKNTVKSVGKFCLEASFNYLKSPNFSKLINIIIWFLLLSVCLGSLIYSTAALGVLMSNLGMPSYCTGYREGYLNSTNVTIATYCIGSIPCSVCLSGLDSLDTYPSLETIQITISSFKWDLTAFGLVAEWFLAYILFTRFFYVLGLAAIMQLFFSYFAVHFISNSWLMWLIINLVQMAPISAMVRMYIFFASFYYVWKSYVHVVDGCNSSTCMMCYKRNRATRVECTTIVNGVRRSFYVYANGGKGFCKLHNWNCVNCDTFCAGSTFISDEVARDLSLQFKRPINPTDQSSYIVDSVTVKNGSIHLYFDKAGQKTYERHSLSHFVNLDNLRANNTKGSLPINVIVFDGKSKCEESSAKSASVYYSQLMCQPILLLDQALVSDVGDSAEVAVKMFDAYVNTFSSTFNVPMEKLKTLVATAEAELAKNVSLDNVLSTFISAARQGFVDSDVETKDVVECLKLSHQSDIEVTGDSCNNYMLTYNKVENMTPRDLGACIDCSARHINAQVAKSHNIALIWNVKDFMSLSEQLRKQIRSAAKKNNLPFKLTCATTRQVVNVVTTKIALKGG

SEQ ID NO: 15860 - protein, 1946 aa, Artificial Sequence
  SARS-CoV-2__MT846483.1__non-structural protein 3 (NSP3)
MAPTKVTFGDDTVIEVQGYKSVNITFELDERIDKVLNEKCSAYTVELGTEVNEFACVVADAVIKTLQPVSELLTPLGIDLDEWSMATYYLFDESGEFKLASHMYCSFYPPDEDEEEGDCEEEEFEPSTQYEYGTEDDYQGKPLEFGATSAALQPEEEQEEDWLDDDSQQTVGQQDGSEDNQTTTIQTIVEVQPQLEMELTPVVQTIEVNSFSGYLKLTDNVYIKNADIVEEVKKVKPTVVVNAANVYLKHGGGVAGALNKATNNAMQVESDDYIATNGPLKVGGSCVLSGHNLAKHCLHVVGPNVNKGEDIQLLKSAYENFNQHEVLLAPLLSAGIFGADPIHSLRVCVDTVRTNVYLAVFDKNLYDKLVSSFLEMKSEKQVEQKIAEIPKEEVKPFITESKPSVEQRKQDDKKIKACVEEVTTTLEETKFLTENLLLYIDINGNLHPDSATLVSDIDITFLKKDAPYIVGDVVQEGVLTAVVIPTKKAGGTTEMLAKALRKVPTDNYITTYPGQGLNGYTVEEAKTVLKKCKSAFYILPSIISNEKQEILGTVSWNLREMLAHAEETRKLMPVCVETKAIVSTIQRKYKGIKIQEGVVDYGARFYFYTSKTTVASLINTLNDLNETLVTMPLGYVTHGLNLEEAARYMRSLKVPATVSVSSPDAVTAYNGYLTSSSKTPEEHFIETISLAGSYKDWSYSGQSTQLGIEFLKRGDKSVYYTSNPTTFHLDGEVITFDNLKTLLSLREVRTIKVFTTVDNINLHTQVVDMSMTYGQQFGPTYLDGADVTKIKPHNSHEGKTFYVLPNDDTLRVEAFEYYHTTDPSFLGRYMSALNHTKKWKYPQVNGLTSIKWADNNCYLATALLTLQQIELKFNPPALQDAYYRARAGEAANFCALILAYCNKTVGELGDVRETMSYLFQHANLDSCKRVLNVVCKTCGQQQITLKGVEAVMYMGTLSYEQFKKGVQIPCTCGKQATKYLVQQESPFVMMSAPPAQYELKHGTFTCASEYTGNYQCGHYKHITSKETLYCIDGALLTKSSEYKGPITDVFYKENSYTTTIKPVTYKLDGVVCTEIDPKLDNYYKKDNSYFTEQPIDLVPNQPYPNASFDNFKFVCDNIKFADDLNQLTGYKKPASRELKVTFFPDLNGDVVAIDYKHYTPSFKKGAKLLHKPIVWHVNNATNKATYKPNTWCIRCLWSTKPVETSNSFDVLKSEDAQGMDNLACEDLKPVSEEVVENPTIQKDVLECNVKTTEVVGDIILKPANNSLKITEEVGHTDLMAAYVDNSSLTIKKPNELSRVLGLKTLATHGLAAVNSVPWDTIANYAKPFLNKVVSTTTNIVTRCLNRVCTNYMPYFFTLLLQLCTFTRSTNSRIKASMPTTIAKNTVKSVGKFCLEASFNYLKSPNFSKLINIIIWFLLLSVCLGSLIYSTAALGVLMSNLGMPSYCTGYREGYLNSTNVTIATYCTGSIPCSVCLSGLDSLDTYPSLETIQITISSFKWDLTAFGLVAEWFLAYILFTRFFYVLGLAAIMQLFFSYFAVHFISNSWLMWLIINLVQMAPISAMVRMYIFFASFYYVWKSYVHVVDGCNSSTCMMCYKRNRATRVECTTIVNGVRRSFYVYANGGKGFCKLHNWNCVNCDTFCAGSTFISDEVARDLSLQFKRPINPTDQSSYIVDSVTVKNGSIHLYFDKAGQKTYERHSLSHFVNLDNLRANNTKGSLPINVIVFDGKSKCEESSAKSASVYYSQLMCQPILLLDQALVSDVGDSAEVAVKMFDAYVNTFSSTFNVPMEKLKTLVATAEAELAKNVSLDNVLSTFISAARQGFVDSDVETKDVVECLKLSHQSDIEVTGDSCNNYMLTYNKVENMTPRDLGACIDCSARHINAQVAKSHNIALIWNVKDFMSLSEQLRKQIRSAAKKNNLPFKLTCATTRQVVNVVTTKIALKGG

SEQ ID NO: 15861 - protein, 1946 aa, Artificial Sequence
  SARS-CoV-2__MT846505.1__non-structural protein 3 (NSP3)
MAPTKVTFGDDTVIEVQGYKSVNITFELDERIDKVLNEKCSAYTVELGTEVNEFACVVADAVIKTLQPVSELLTPLGIDLDEWSMATYYLFDESGEFKLASHMYCSFYPPDEDEEEGDCEEEEFEPSTQYEYGTEDDYQGKPLEFGATSAALQPEEEQEEDWLDDDSQQTVGQQDGSEDNQTTTIQTIVEVQPQLEMELTPVVQTIEVNSFSGYLKLTDNVYIKNADIVEEAKKVKPTVVVNAANVYLKHGGGVAGALNKATNNAMQVESDDYIATNGPLKVGGSCVLSGHNLAKHCLHVVGPNVNKGEDIQLLKSAYENFNQHEVLLAPLLSAGIFGADPIHSLRVCVDTVRTNVYLAVFDKNLYDKLVSSFLEMKSEKQVEQKIAEIPKEEVKPFITESKPSVEQRKQDDKKIKACVEEVTTTLEETKFLTENLLLYIDINGNLHPDSATLVSDIDITFLKKDAPYIVGDVVQEGVLTAVVIPTKKAGGTTEMLAKALRKVPTDNYITTYPGQGLNGYTVEEAKTVLKKCKSAFYILPSIISNEKQEILGTVSWNLREMLAHAEETRKLMPVCVETKAIVSTIQRKYKGIKIQEGVVDYGARFYFYTSKTTVASLINTLNDLNETLVTMPLGYVTHGLNLEEAARYMRSLKVPATVSVSSPDAVTAYNGYLTSSSKTPEEHFIETISLAGSYKDWSYSGQSTQLGIEFLKRGDKSVYYTSNPTTFHLDGEVITFDNLKTLLSLREVRTIKVFTTVDNINLHTQVVDMSMTYGQQFGPTYLDGADVTKIKPHNSHEGKTFYVLPNDDTLRVEAFEYYHTTDPSFLGRYMSALNHTKKWKYPQVNGLTSIKWADNNCYLATVLLTLQQIELKFNPPALQDAYYRARAGEAANFCALILAYCNKTVGELGDVRETMSYLFQHANLDSCKRVLNVVCKTCGQQQTTLKGVEAVMYMGTLSYEQFKKGVQIPCTCGKQATKYLVQQESPFVMMSAPPAQYELKHGTFTCASEYTGNYQCGHYKHITSKETLYCIDGALLTKSSEYKGPITDVFYKENSYTTTIKPVTYKLDGVVCTEIDPKLDNYYKKDNSYFTEQPIDLVPNQPYPNASFDNFKFVCDNIKFADDLNQLTGYKKPASRELKVTFFPDLNGDVVAIDYKHYTPSFKKGAKLLHKPIVWHVNNATNKATYKPNTWCIRCLWSTKPVETSNSFDVLKSEDAQGMDNLACEDLKPVSEEVVENPTIQKDVLECNVKTTEVVGDIILKPANNSLKITEEVGHTDLMAAYVDNSSLTIKKPNELSRVLGLKTLATHGLAAVNSVPWDTIANYAKPFLNKVVSTTTNIVTRCLNRVCTNYMPYFFTLLLQLCTFTRSTNSRIKASMPTTIAKNTVKSVGKFCLEASFNYLKSPNFSKLINIIIWFLLLSVCLGSLIYSTAALGVLMSNLGMPSYCTGYREGYLNSTNVTIATYCTGSIPCSVCLSGLDSLDTYPSLETIQITISSFKWDLTAFGLVAEWFLAYILFTRFFYVLGLAAIMQLFFSYFAVHFISNSWLMWLIINLVQMAPISAMVRMYIFFASFYYVWKSYVHVVDGCNSSTCMMCYKRNRATRVECTTIVNGVRRSFYVYANGGKGFCKLHNWNCVNCDTFCAGSTFISDEVARDLSLQFKRPINPTDQSSYIVDSVTVKNGSIHLYFDKAGQKTYERHSLSHFVNLDNLRANNTKGSLPINVIVFDGKSKCEESSAKSASVYYSQLMCQPILLLDQALVSDVGDSAEVAVKMFDAYVNTFSSTFNVPMEKLKTLVATAEAELAKNVSLDNVLSTFISAARQGFVDSDVETKDVVECLKLSHQSDIEVTGDSCNNYMLTYNKVENMTPRDLGACIDCSARHINAQVAKSHNIALIWNVKDFMSLSEQLRKQIRSAAKKNNLPFKLTCATTRQVVNVVTTKIALKGG

SEQ ID NO: 15862 - protein, 1946 aa, Artificial Sequence
  SARS-CoV-2__MT846507.1__non-structural protein 3 (NSP3)
MAPTKVTFGDDTVIEVQGYKSVNITFELDERIDKVLNEKCSAYTVELGTEVNEFACVVADAVIKTLQPVSELLTPLGIDLDEWSMATYYLFDESGEFKLASHMYCSFYPPDEDEEEGDCEEEEFEPSTQYEYGTEDDYQGKPLEFGATSAALQPEEEQEEDWLDDDSQQTVGQQDGSEDNQTTTIQTIVEVQPQLEMELTPVVQTIEVNSFSGYLKLTDNVYIKNADIVEEAKKVKPTVVVNAANVYLKHGGGVAGALNKATNNAMQVESDDYIATNGPLKVGGSCVLSGHNLAKHCLHVVGPNVNKGEDIQLLKSAYENFNQHEVLLAPLLSAGIFGADPIHSLRVCVDTVRTNVYLAVFDKNLYDKLVSSFLEMKSEKQVEQNIAEIPKEEVKPFITESKPSVEQRKQDDKKIKACVEEVTTTLEETKFLTENLLLYIDINGNLHPDSATLVSDIDITFLKKDAPYIVGDVVQEGVLTAVVIPTKKAGGTTEMLAKALRKVSTDNYITTYPGQGLNGYTVEEAKTVLKKCKSAFYILPSIISNEKQEILGTVSWNLREMLAHAEETRKLMPVCVETKAIVSTIQRKYKGIKIQEGVVDYGARFYFYTSKTTVASLINTLNDLNETLVTMPLGYVTHGLNLEEAARYMRSLKVPATVSVSSPDAVTAYNGYLTSSSKTPEEHFIETISLAGSYKDWSYSGQSTQLGIEFLKRGDKSVYYTSNPTTFHLDGEVITFDNLKTLLSLREVRTIKVFTTVDNINLHTQVVDMSMTYGQQFGPTYLDGADVTKIKPHNSHEGKTFYVLPNDDTLRVEAFEYYHTTDPSFLGRYMSALNHTKKWKYPQVNGLTSIKWADNNCYLATALLTLQQIELKFNPPALQDAYYRARAGEAANFCALILAYCNKTVGELGDVRETMSYLFQHANLDSCKRVLNVVCKTCGQQQTTLKGVEAVMYMGTLSYEQFKKGVQIPCTCGKQATKYLVQQESSFVMMSAPPAQYELKHGTFTCASEYTGNYQCGHYKHITSKETLYCIDGALLTKSSEYKGPITDVFYKENSYTTTIKPVTYKLDGVVCTEIDPKLDNYYKKDNSYFTEQPIDLVPNQPYPNASFDNFKFVCDNIKFADDLNQLTGYKKPASRELKVTFFPDLNGDVVAIDYKHYTPSFKKGAKLLHKPIVWHVNNATNKATYKPNTWCIRCLWSTKPVETSNSFDVLKSEDAQGMDNLACEDLKPVSEEVVENPTIQKDVLECNVKTTEVVGDIILKPANNSLKITEEVGHTDLMAAYVDNSSLTIKKPNELSRVLGLKTLATHGLAAVNSVPWDTIANYAKPFLNKVVSTTTNIVTRCLNRVCTNYMPYFFTLLLQLCTFTRSTNSRIKASMPTTIAKNTVKSVGKFCLEASFNYLKSPNFSKLINIIIWFLLLSVCLGSLIYSTAALGVLMSNLGMPSYCTGYREGYLNSTNVTIATYCTGSIPCSVCLSGLDSLDTYPSLETIQITISSFKWDLTAFGLVAEWFLAYILFTRFFYVLGLAAIMQLFFSYFAVHFISNSWLMWLIINLVQMAPISAMVRMYIFFASFYYVWKSYVHVVDGCNSSTCMMCYKRNRATRVECTTIVNGVRRSFYVYANGGKGFCKLHNWNCVNCDTFCAGSTFISDEVARDLSLQFKRPINPTDQSSYIVDSVTVKNGSIHLYFDKAGQKTYERHSLSHFVNFDNLRANNTKGSLPINVIVFDGKSKCEESSAKSASVYYSQLMCQPILLLDQALVSDVGDSAEVAVKMFDAYVNTFSSTFNVPMEKLKTLVATAEAELAKNVSLDNVLSTFISAARQGFVDSDVETKDVVECLKLSHQSDIEVTGDSCNNYMLTYNKVENMTPRDLGACIDCSARHINAQVAKSHNIALIWNVKDFMSLSEQLRKQIRSAAKKNNLPFKLTCATTRQVVNVVTTKIALKGG

SEQ ID NO: 15863 - protein, 1946 aa, Artificial Sequence
  SARS-CoV-2__MT846513.1__non-structural protein 3 (NSP3)
MAPTKVTFGDDTVIEVQGYKSVNITFELDERIDKVLNEKCSAYTVELGTEVNEFACVVADAVIKTLQPVSELLTPLGIDLDEWSMATYYLFDESGEFKLASHMYCSFYPPDEDEEEGDCEEEEFEPSTQYEYGTEDDYQGKPLEFGATSAALQPEEEQEEDWLDDDSQQTVGQQDGSEDNQTTTIQTIVEVQPQLEMELTPVVQTIEVNSFSGYLKLTDNVYIKNADIVEEAKKVKPTVVVNAANVYLKHGGGVAGALNKATNNAMQVESDDYIATNGPLKVGGSCVLSGHNLAKHCLHVVGPNVNKGEDIQLLKSAYENFNQHEVLLAPLLSAGIFGADPIHSLRVCVDTVRTNVYLAVFDKNLYDKLVSSFLEMKSEKQVEQKIAEIPKEEVKPFITESKPSVEQRKQDDKKIKACVEEVTTTLEETKFLTENLLLYIDINGNLHPDSATLVSDIDITFLKKDAPYIVGDVVQEGVLTAVVIPTKKAGGTTEMLAKALRKVPTDNYITTYPGQGLNGYTVEEAKTVLKKCKSAFYILPSIISNEKQEILGTVSWNLREMLTHAEETRKLMPVCVETKAIVSTIQRKYKGIKIQEGVVDYGARFYFYTSKTTVASLINTLNDLNETLVTMPLGYVTHGLNLEEAARYMRSLKVPATVSVSSPDAVTAYNGYLTSSSKTPEEHFIETISLAGSYKDWSYSGQSTQLGIEFLKRGDKSVYYTSNPTTFHLDGEVITFDNLKTLLSLREVRTIKVFTTVDNINLHTQVVDMSMTYGQQFGPTYLDGADVTKIKPHNSHEGKTFYVLPNDDTLRVEAFEYYHTTDPSFLGRYMSALNHTKKWKYPQVNGLTSIKWADNNCYLATALLTLQQIELKFNPPALQDAYYRARAGEAANFCALILAYCNKTVGELGDVRETMSYLFQHANLDSCKRVLNVVCKTCGQQQTTLKGVEAVMYMGTLSYEQFKKGVQIPCTCGKQATKYLVQQESPFVMMSAPPAQYELKHGTFTCASEYTGNYQCGHYKHITSKETLYCIDGALLTKSSEYKGPITDVFYKENSYTTTIKPVTYKLDGVVCTEIDPKLDNYYKKDNSYFTEQPIDLVPNQPYPNASFDNFKFVCDNIKFADDLNQLTGYKKPASRELKVTFFPDLNGDVVAIDYKHYTPSFKKGAKLLHKPIVWHVNNATNKATYKPNTWCIRCLWSTKPVETSNSFDVLKSEDAQGMDNLACEDLKPVSEEVVENPTIQKDVLECNVKTTEVVGDIILKPANNSLKITEEVGHTDLMAAYVDNSSLTIKKPNELSRVLGLKTLATHGLAAVNSVPWDTIANYAKPFLNKVVSTTTNIVTRCLNRVCTNYMPYFFTLLLQLCTFTRSTNSRIKASMPTTIAKNTVKSVGKFCLEASFNYLKSPNFSKLINIIIWFLLLSVCLGSLIYSTAALGVLMSNLGMPSYCTGYREGYLNSTNVTIATYCTGSIPCSVCLSGLDSLDTYPSLETIQITISSFKWDLTAFGLVAEWFLAYILFTRFFYVLGLAAIMQLFFSYFAVHFISNSWLMWLIINLVQMAPISAMVRMYIFFASFYYVWKSYVHVVDGCNSSTCMMCYKRNRATRVECTTIVNGVRRSFYVYANGGKGFCKLHNWNCVNCDTFYAGSTFISDEVARDLSLQFKRPINPTDQSSYIVDSVTVKNGSIHLYFDKAGQKTYERHSLSHFVNLDNLRANNTKGSLPINVIVFDGKSKCEESSAKSASVYYSQLMCQPILLLDQALVSDVGDSAEVAVKMFDAYVNTFSSTFNVPMEKLKTLVATAEAELAKNVSLDNVLSTFISAARQGFVDSDVETKDVVECLKLSHQSDIEVTGDSCNNYMLTYNKVENMTPRDLGACIDCSARHINAQVAKSHNIALIWNVKDFMSLSEQLRKQIRSAAKKNNLPFKLTCATTRQVVNVVTTKIALKGG

SEQ ID NO: 15864 - protein, 1946 aa, Artificial Sequence
  SARS-CoV-2__MT846520.1__non-structural protein 3 (NSP3)
MAPTKVTFGDDTVIEVQGYKSVNITFELDERIDKVLNEKCSAYTVELGTEVNEFACVVADAVIKTLQPVSELLTPLGIDLDEWSMATYYLFDESGEFKLASHMYCSFYPPDEDEEEGDCEEEEFEPSTQYEYGTEDDYQGKPLEFGATSAALQPEEEQEEDWLDDDSQQTVGQQDGSEDNQTTTIQTIVEVQPQLEMELTPVVQTIEVNSFSGYLKLTDNVYIKNADIVEEAKKVKPTVVVNAANVYLKHGGGVAGALNKATNNAMQVESDDYIATNGPLKVGGSCVLSGHNLAKHCLHVVGPNVNKGEDIQLLKSAYENFNQHEVLLAPLLSAGIFGADPIHSLRVCVDTVRTNVYLAVFDKNLYDKLVSSFLEMKSEKQVEQKIAEIPKEEVKPFITESKPSVEQRKQDDKKIKACVEEVTTTLEETKFLTENLLLYIDINGNLHPDSATLVSDIDITFLKKDAPYIVGDVVQEGVLTAVVIPTKKAGGTTEMLAKALRKVPTDNYITTYPGQGLNGYTVEEAKTVLKKCKSAFYILPSIISNEKQEILGTVSWNLREMLAHAEETRKLMPVCVETKAIVSTIQRKYKGIKIQEGVVDYGARFYFYTSKTTVASLINTLNDLNETLVTMPLGYVTHGLNLEEAARYMRSLKVPATVSVSSPDAVTAYNGYLTSSSKTPEEHFIETISLAGSYKDWSYSGQSTQLGIEFLKRGDKSVYYTSNPTTFHLDGEVITFDNLKTLLSLREVRTIKVFTTVDNINLHTQVVDMSMTYGQQFGPTYLDGADVTKIKPHNSHEGKTFYVLPNDDTLRVEAFEYYHTTDPSFLGRYMSALNHTKKWKYPQVNGLTSIKWADNNCYLATALLTLQQIELKFNPPALQDAYYRARAGEAANFCALILAYCNKTVGELGDVRETMSYLFQHANLDSCKRVLNVVCKTCGQQQTTLKGVEAVMYMGTLSYEQFKKGVQIPCTCGKQATKYLVQQESPFVMMSAPPAQYELKHGTFTCASEYTGNYQCGHYKHITSKETLYCIDGALLTKSSEYKGPITDVFYKENSYTTTIKPVTYKLDGVVCTEIDPKLDNYYKKDNSYFTEQPIDLVPNQPYPNASFDNFKFVCDNIKFADDLNQLTGYKKPASRELKVTFFPDLNGDVVAIDYKHYTPSFKKGAKLLHKPIVWHVNNATNKATYKPNTWCIRCLWSTKPVETSNSFDVLKSEDAQGMDNLACEDLKPVSEEVVENPTIQKDVLECNVKTTEVVGDIILKPANNSLKITEEVGHTDLMAAYVDNSSLTIKKPNELSRVLGLKTLATHGLAAVNSVPWDTIANYAKPFLNKVVSTTTNIVTRCLNRVCTNYMPYFFTLLLQLCTFTRSTNSRIKASMPTTIVKNTVKSVGKFCLEASFNYLKSPNFSKLINIIIWFLLLSVCLGSLIYSTAALGVLMSNLGMPSYCTGYREGYLNSTNVTIATYCTGSIPCSVCLSGLDSLDTYPSLETIQITISSFKWDLTAFGLVAEWFLAYILFTRFFYVLGLAAIMQLFFSYFAVHFISNSWLMWLIINLVQMAPISAMVRMYIFFASFYYVWKSYVHVVDGCNSSTCMMCYKRNRATRVECTTIVNGVRRSFYVYANGGKGFCKLHNWNCVNCDTFCAGSTFISDEVARDLSLQFKRPINPTDQSSYIVDSVTVKNGSIHLYFDKAGQKTYERHSLSHFVNLDNLRANNTKGSLPINVIVFDGKSKCEESSAKSASVYYSQLMCQPILLLDQALVSDVGDSAEVAVKMFDAYVNTFSSTFNVPMEKLKTLVATAEAELAKNVSLDNVLSTFISAARQGFVDSDVETKDVVECLKLSHQSDIEVTGDSCNNYMLTYNKVENMTPRDLGACIDCSARHINAQVAKSHNIALIWNVKDFMSLSEQLRKQIRSAAKKNNLPFKLTCATTRQVVNVVTTKIALKGG

SEQ ID NO: 15865 - protein, 1946 aa, Artificial Sequence
  SARS-CoV-2__MT846521.1__non-structural protein 3 (NSP3)
MAPTKVTFGDDTVIEVQGYKSVNITFELDERIDKVLNEKCSAYTVELGTEVNEFACVVADAVIKTLQPVSELLTPLGIDLDEWSMATYYLFDESGEFKLASHMYCSFYPPDEDEEEGDCEEEEFEPSTQYEYGTEDDYQGKPLEFGATSAALQPEEEQEEDWLDDDSQQTVGQQDGSEDNQTTTIQTIVEVQPQLEMELTPVVQTIEVNSFSGYLKLTDNVYIKNADIVEEAKKVKPTVVVNAANVYLKHGGGVAGALNKATNNAMQVESDDYIATNGPLKVGGSCVLSGHNLAKHCLHVVGPNVNKGEDIQLLKSAYENFNQHEVLLAPLLSAGIFGADPIHSLRVCVDTVRTNVYLAVFDKNLYDKLVSSFLEMKSEKQVEQKIAEIPKEEVKPFITESKPSVEQRKQDDKKIKACVEEVTTTLEETKFLTENLLLYIDINGNLHPDSATLVSDIDITFLKKDAPYIVGDVVQEGVLTAVVIPTKKAGGTTEMLAKALRKVPTDNYITTYPGQGLNGYTVEEAKTVLKKCKSAFYILPSIISNEKQEILGTVSWNLREMLTHAEETRKLMPVCVETKAIVSTIQRKYKGIKIQEGVVDYGARFYFYTSKTTVASLINTLNDLNETLVTMPLGYVTHGLNLEEAARYMRSLKVPATVSVSSPDAVTAYNGYLTSSSKTPEEHFIETISLAGSYKDWSYSGQSTQLGIEFLKRGDKSVYYTSNPTTFHLDGEVITFDNLKTILSLREVRTIKVFTTVDNINLHTQVVDMSMTYGQQFGPTYLDGADVTKIKPHNSHEGKTFYVLPNDDTLRVEAFEYYHTTDPSFLGRYMSALNHTKKWKYPQVNGLTSIKWADNNCYLATALLTLQQIELKFNPPALQDAYYRARAGEAANFCALILAYCNKTVGELGDVRETMSYLFQHANLDSCKRVLNVVCKTCGQQQTTLKGVEAVMYMGTLSYEQFKKGVQIPCTCGKQATKYLVQQESPFVMMSAPPAQYELKHGTFTCASEYTGNYQCGHYKHITSKETLYCIDGALLTKSSEYKGPITDVFYKENSYTTTIKPVTYKLDGVVCTEIDPKLDNYYKKDNSYFTEQPIDLVPNQPYPNASFDNFKFVCDNIKFADDLNQLTGYKKPASRELKVTFFPDLNGDVVAIDYKHYTPSFKKGAKLLHKPIVWHVNNATNKATYKPNTWCIRCLWSTKPVETSNSFDVLKSEDAQGMDNLACEDLKPVSEEVVENPTIQKDVLECNVKTTEVVGDIILKPANNSLKITEEVGHTDLMAAYVDNSSLTIKKPNELSRVLGLKTLATHGLAAVNSVPWDTIANYAKPFLNKVVSTTTNIVTRCLNRVCTNYMPYFFTLLLQLCTFTRSTNSRIKASMPTTIAKNTVKSVGKFCLEASFNYLKSPNFSKLINIIIWFLLLSVCLGSLIYSTAALGVLMSNLGMPSYCTGYREGYLNSTNVTIATYCTGSIPCSVCLSGLDSLDTYPSLETIQITISSFKWDLTAFGLVAEWFLAYILFTRFFYVLGLAAIMQLFFSYFAVHFISNSWLMWLIINLVQMAPISAMVRMYIFFASFYYVWKSYVHVVDGCNSSTCMMCYKRNRATRVECTTIVNGVRRSFYVYANGGKGFCKLHNWNCVNCDTFCAGSTFISDEVARDLSLQFKRPINPTDQSSYIVDSVTVKNGSIHLYFDKAGQKTYERHSLSHFVNLDNLRANNTKGSLPINVIVFDGKSKCEESSAKSASVYYSQLMCQPILLLDQALVSDVGDSAEVAVKMFDAYVNTFSSTFNVPMEKLKTLVATAEAELAKNVSLDNVLSTFISAARQGFVDSDVETKDVVECLKLSHQSDIEVTGDSCNNYMLTYNKVENMTPRDLGACIDCSARHINAQVAKSHNIALIWNVKDFMSLSEQLRKQIRSAAKKNNLPFKLTCATTRQVVNVVTTKIALKGG

SEQ ID NO: 15866 - protein, 1946 aa, Artificial Sequence
  SARS-CoV-2__MT846527.1__non-structural protein 3 (NSP3)
MAPTKVTFGDDTVIEVQGYKSVNITFELDERIDKVLNEKCSAYTVELGTEVNEFACVVVDAVIKTLQPVSELLTPLGIDLDEWSMATYYLFDESGEFKLASHMYCSFYPPDEDEEEGDCEEEEFEPSTQYEYGTEDDYQGKPLEFGATSAALQPEEEQEEDWLDDDSQQTVGQQDGSEDNQTTTIQTIVEVQPQLEMELTPVVQTIEVNSFSGYLKLTDNVYIKNADIVEEAKKVKPTVVVNAANVYLKHGGGVAGALNKATNNAMQVESDDYIATNGPLKVGGSCVLSGHNLAKHCLHVVGPNVNKGEDIQLLKSAYENFNQHEVLLAPLLSAGIFGADPIHSLRVCVDTVRTNVYLAVFDKNLYDKLVSSFLEMKSEKQVEQKIAEIPKEEVKPFITESKPSVEQRKQDDKKIKACVEEVTTTLEETKFLTENLLLYIDINGNLHPDSATLVSDIDITFLKKDAPYIVGDVVQEGVLTAVVIPTKKAGGTTEMLAKALRKVPTDNYITTYPGQGLNGYTVEEAKTVLKKCKSAFYILPSIISNEKQEILGTVSWNLREMLAHAEETRKLMPVCVETKAIVSTIQRKYKGIKIQEGVVDYGARFYFYTSKTTVASLINTLNDLNETLVTMPLGYVTHGLNLEEAARYMRSLKVPATVSVSSPDAVTAYNGYLTSSSKTPEEHFIETISLAGSYKDWSYSGQSTQLGIEFLKRGDKSVYYTSNPTTFHLDGEVITFDNLKTLLSLREVRTIKVFTTVDNINLHTQVVDMSMTYGQQFGPTYLDGADVTKIKPHNSHEGKTFYVLPNDDTLRVEAFEYYHTTDPSFLGRYMSALNHTKKWKYPQVNGLTSIKWADNNCYLATALLTLQQIELKFNPPALQDAYYRARAGEAANFCALILAYCNKTVGELGDVRETMSYLFQHANLDSCKRVLNVVCKTCGQQQTTLKGVEAVMYMGTLSYEQFKKGVQIPCTCGKQATKYLVQQESPFVMMSAPPAQYELKHGTFTCASEYTGNYQCGHYKHITSKETLYCIDGALLTKSSEYKGPITDVFYKENSYTTTIKPVTYKLDGVVCTEIDPKLDNYYKKDNSYFTEQPIDLVPNQPYPNASFDNFKFVCDNIKFADDLNQLTGYKKPASRELKVTFFPDLNGDVVAIDYKHYTPSFKKGAKLLHKPIVWHVNNATNKATYKPNTWCIRCLWSTKPVETSNSFDVLKSEDAQGMDNLACEDLKPVSEEVVENPTIQKDVLECNVKTTEVVGDIILKPANNSLKITEEVGHTDLMAAYVDNSSLTIKKPNELSRVLGLKTLATHGLAAVNSVPWDTIANYAKPFLNKVVSTTTNIVTRCLNRVCTNYMPYFFTLLLQLCTFTRSTNSRIKASMPTTIAKNTVKSVGKFCLEASFNYLKSPNFSKLINIIIWFLLLSVCLGSLIYSTAALGVLMSNLGMPSYCTGYREGYLNSTNVTIATYCTGSIPCSVCLSGLDSLDTYPSLETIQITISSFKWDLTAFGLVAEWFLAYILFTRFFYVLGLAAIMQLFFSYFAVHFISNSWLMWLIINLVQMAPISAMVRMYIFFASFYYVWKSYVHVVDGCNSSTCMMCYKRNRATRVECTTIVNGVRRSFYVYANGGKGFCKLHNWNCVNCDTFCAGSTFISDEVARDLSLQFKRPINPTDQSSYIVDSVTVKNGSIHLYFDKAGQKTYERHSLSHFVNLDNLRANNTKGSLPINVIVFDGKSKCEESSAKSASVYYSQLMCQPILLLDQALVSDVGDSAEVAVKMFDAYVNTFSSTFNVPMEKLKTLVATAEAELAKNVSLDNVLSTFISAARQGFVDSDVETKDVVECLKLSHQSDIEVTGDSCNNYMLTYNKVENMTPRDLGACIDCSARHINAQVAKSHNIALIWNVKDFMSLSEQLRKQIRSAAKKNNLPFKLTCATTRQVVNVVTTKIALKGG

SEQ ID NO: 15867 - protein, 1946 aa, Artificial Sequence
  SARS-CoV-2__MT846547.1__non-structural protein 3 (NSP3)
MAPTKVTFGDDTVIEVQGYKSVNITFELDERIDKVLNEKCSAYTVELGTEVNEFACVVADAVIKTLQPVSELLTSLGIDLDEWSMATYYLFDESGEFKLASHMYCSFYPPDEDEEEGDCEEEEFEPSTQYEYGTEDDYQGKPLEFGATSAALQPEEEQEEDWLDDDSQQTVGQQDGSEDNQTTTIQTIVEVQPQLEMELTPVVQTIEVNSFSGYLKLTDNVYIKNADIVEEAKKVKPTVVVNAANVYLKHGGGVAGALNKATNNAMQVESDDYIATNGPLKVGGSCVLSGHNLAKHCLHVVGPNVNKGEDIQLLKSAYENFNQHEVLLAPLLSAGIFGADPIHSLRVCVDTVRTNVYLAVFDKNLYDKLVSSFLEMKSEKQVEQKIAEIPKEEVKPFITESKPSVEQRKQDDKKIKACVEEVTTTLEETKFLTENLLLYIDINGNLHPDSATLVSDIDITFLKKDVPYIVGDVVQEGVLTAVVIPTKKAGGTTEMLAKALRKVPTDNYITTYPGQGLNGYTVEEAKTVLKKCKSAFYILPSIISNEKQEILGTVSWNLREMLAHAEETRKLMPVCVETKAIVSTIQRKYKGIKIQEGVVDYGARFYFYTSKTTVASLINTLNDLNETLVTMPLGYVTHGLNLEEAARYMRSLKVPATVSVSSPDAVTAYNGYLTSSSKTPEEHFIETISLAGSYKDWSYSGQSTQLGIEFLKRGDKSVYYTSNPTTFHLDGEVITFDNLKTLLALREVRTIKVFTTVDNINLHTQVVDMSMTYGQQFGPTYLDGADVTKIKPHNSHEGKTFYVLPNDDTLRVEAFEYYHTTDPSFLGRYMSALNHTKKWKYPQVNGLTSIKWADNNCYLATALLTLQQIELKFNPPALQDAYYRARAGEAANFCALILAYCNKTVGELGDVRETMSYLFQHANLDSCKRVLNVVCKTCGQQQTTLKGVEAVMYMGTLSYEQFKKGVQIPCTCGKQATKYLVQQESPFVMMSAPPAQYELKHGTFTCASEYTGNYQCGHYKHITSKETLYCIDGALLTKSSEYKGPITDVFYKENSYTTTIKPVTYKLDGVVCTEIDPKLDNYYKKDNSYFTEQPIDLVPNQPYPNASFDNFKFVCDNIKFADDLNQLTGYKKPASRELKVTFFPDLNGDVVAIDYKHYTPSFKKGAKLLHKPIVWHVNNATNKATYKPNTWCIRCLWSTKPVETSNSFDVLKSEDAQGMDNLACEDLKPVSEEVVENPTIQKDVLECNVKTTEVVGDIILKPANNSLKITEEVGHTDLMAAYVDNSSLTIKKPNELSRVLGLKTLATHGLAAVNSVPWDTIANYAKPFLNKVVSTTTNIVTRCLNRVCTNYMPYFFTLLLQLCTFTRSTNSRIKASMPTTIAKNTVKSVGKFCLEASFNYLKSPNFSKLINIIIWFLLLSVCLGSLIYSTAALGVLMSNLGMPSYCTGYREGYLNSTNVTIAIYCTGSIPCSVCLSGLDSLDTYPSLETIQITISSFKWDLTAFGLVAEWFLAYILFTRFFYVLGLAAIMQLFFSYFAVHFISNSWLMWLIINLVQMAPISAMVRMYIFFASFYYVWKSYVHVVDGCNSSTCMMCYKRNRATRVECTTIVNGVRRSFYVYANGGKGFCKLHNWNCVNCDTFCAGSTFISDEVARDLSLQFKRPINPTDQSSYIVDSVTVKNGSIHLYFDKAGQKTYERHSLSHFVNLDNLRANNTKGSLPINVIVFDGKSKCEESSAKSASVYYSQLMCQPILLLDQALVSDVGDSAEVAVKMFDAYVNTFSSTFNVPMEKLKTLVATAEAELAKNVSLDNVLSTFISAARQGFVDSDVETKDVVECLKLSHQSDIEVTGDSCNNYMLTYNKVENMTPRDLGACIDCSARHINAQVAKSHNIALIWNVKDFMSLSEQLRKQIRSAAKKNNLPFKLTCATTRQVVNVVTTKIALKGG

SEQ ID NO: 15868 - protein, 1946 aa, Artificial Sequence
  SARS-CoV-2__MT846554.1__non-structural protein 3 (NSP3)
MAPTKVTFGDDTVIEVQGYKSVNITFELDERIDKVLNEKCSAYTVELGTEVNEFACVVADAVIKTLQPVSELLTPLGIDLDEWSMATYYLFDESGEFKLASHMYCSFYPPDEDEEEGDCEEEEFEPSTQYEYGTEDDYQGKPLEFGATSAALQPEEEQEEDWLDDDSQQTVGQQDGSEDNQTTTIQTIVEVQPQLEMELTPVVQTIEVNSFSGYLKLTDNVYIKNADIVEEAKKVKPTVVVNAANVYLKHGGGVAGALNKATNNAMQVESDDYIATNGPLKVGGSCVLSGHNLAKHCLHVVGPNVNKGEDIQLLKSAYENFNQHEVLLAPLLSAGIFGADPIHSLRVCVDTVRTNVYLAVFDKNLYDKLVSSFLEMKSEKQVEQNIAEIPKEEVKPFITESKPSVEQRKQDDKKIKACVEEVTTTLEETKFLTENLLLYIDINGNLHPDSATLVSDIDITFLKKDAPYIVGDVVQEGVLTAVVIPTKKAGGTTEMLAKALRKVSTDNYITTYPGQGLNGYTVEEAKTVLKKCKSAFYILPSIISNEKQEILGTVSWNLREMLAHAEETRKLMPVCVETKAIVSTIQRKYKGIKIQEGVVDYGARFYFYTSKTTVASLINTLNDLNETLVTMPLGYVTHGLNLEEAARYMRSLKVPATVSVSSPDAVTAYNGYLTSSSKTPEEHFIETISLAGSYKDWSYSGQSTQLGIEFLKRGDKSVYYTSNPTTFHLDGEVITFDNLKTLLSLREVKTIKVFTTVDNINLHTQVVDMSMTYGQQFGPTYLDGADVTKIKPHNSHEGKTFYVLPNDDTLRVEAFEYYHTTDPSFLGRYMSALNHTKKWKYPQVNGLTSIKWADNNCYLATALLTLQQIELKFNPPALQDAYYRARAGEAANFCALILAYCNKTVGELGDVRETMSYLFQHANLDSCKRVLNVVCKTCGQQQTTLKGVEAVMYMGTLSYEQFKKGVQIPCTCGKQATKYLVQQESSFVMMSAPPAQYELKHGTFTCASEYTGNYQCGHYKHITSKETLYCIDGALLTKSSEYKGPITDVFYKENSYTTTIKPVTYKLDGVVCTEIDPKLDNYYKKDNSYFTEQPIDLVPNQPYPNASFDNFKFVCDNIKFADDLNQLTGYKKPASRELKVTFFPDLNGDVVAIDYKHYTPSFKKGAKLLHKPIVWHVNNATNKATYKPNTWCIRCLWSTKPVETSNSFDVLKSEDAQGMDNLACEDLKPVSEEVVENPTIQKDVLECNVKTTEVVGDIILKPANNSLKITEEVGHTDLMAAYVDNSSLTIKKPNELSRVLGLKTLATHGLAAVNSVPWDTIANYAKPFLNKVVSTTTNIVTRCLNRVCTNYMPYFFTLLLQLCTFTRSTNSRIKASMPTTIAKNTVKSVGKFCLEASFNYLKSPNFSKLINIIIWFLLLSVCLGSLIYSTAALGVLMSNLGMPSYCTGYREGYLNSTNVTIATYCTGSIPCSVCLSGLDSLDTYPSLETIQITISSFKWDLTAFGLVAEWFLAYILFTRFFYVLGLAAIMQLFFSYFAVHFISNSWLMWLIINLVQMAPISAMVRMYIFFASFYYVWKSYVHVVDGCNSSTCMMCYKRNRATRVECTTIVNGVRRSFYVYANGGKGFCKLHNWNCVNCDTFCAGSTFISDEVARDLSLQFKRPINPTDQSSYIVDSVTVKNGSIHLYFDKAGQKTYERHSLSHFVNFDNLRANNTKGSLPINVIVFDGKSKCEESSAKSASVYYSQLMCQPILLLDQALVSDVGDSAEVAVKMFDAYVNTFSSTFNVPMEKLKTLVATAEAELAKNVSLDNVLSTFISAARQGFVDSDVETKDVVECLKLSHQSDIEVTGDSCNNYMLTYNKVENMTPRDLGACIDCSARHINAQVAKSHNIALIWNVKDFMSLSEQLRKQIRSAAKKNNLPFKLTCATTRQVVNVVTTKIALKGG

SEQ ID NO: 15869 - protein, 1946 aa, Artificial Sequence
  SARS-CoV-2__MT846555.1__non-structural protein 3 (NSP3)
MAPTKVTFGDDTVIEVQGYKSVNITFELDERIDKVLNEKCSAYTVELGTEVNEFACVVADAVIKTLQPVSELLTSLGIDLDEWSMATYYLFDESGEFKLASHMYCSFYPPDEDEEEGDCEEEEFEPSTQYEYGTEDDYQGKPLEFGATSAALQPEEEQEEDWLDDDSQQTVGQQDGSEDNQTTTIQTIVEVQPQLEMELTPVVQTIEVNSFSGYLKLTDNVYIKNADIVEEAKKVKPTVVVNAANVYLKHGGGVAGALNKATNNAMQVESDDYIATNGPLKVGGSCVLSGHNLAKHCLHVVGPNVNKGEDIQLLKSAYENFNQHEVLLAPLLSAGIFGADPIHSLRVCVDTVRTNVYLAVFDKNLYDKLVSSFLEMKSEKQVEQKIAEIPKEEVKPFITESKPSVEQRKQDDKKIKACVEEVTTTLEETKFLTENLLLYIDINGNLHPDSATLVSDIDITFLKKDAPYIVGDVVQEGVLTAVVIPTKKAGGTTEMLAKALRKVPTDNYITTYPGQGLNGYTVEEAKTVLKKCKSAFYILPSIISNEKQEILGTVSWNLREMLAHAEETRKLMPVCVETKAIVSTIQRKYKGIKIQEGVVDYGARFYFYTSKTTVASLINTLNDLNETLVTMPLGYVTHGLNLEEAARYMRSLKVPATVSVSSPDAVTAYNGYLTSSSKTPEEHFIETISLAGSYKDWSYSGQSTQLGIEFLKRGDKSVYYTSNPTTFHLDGEVITFDNLKTLLALREVRTIKVFTTVDNINLHTQVVDMSMTYGQQFGPTYLDGADVTKIKPHNSHEGKTFYVLPNDDTLRVEAFEYYHTTDPSFLGRYMSALNHTKKWKYPQVNGLTSIKWADNNCYLATALLTLQQIELKFNPPALQDAYYRARAGEAANFCALILAYCNKTVGELGDVRETMSYLFQHANLDSCKRVLNVVCKTCGQQQTTLKGVEAVMYMGTLSYEQFKKGVQIPCTCGKQATKYLVQQESPFVMMSAPPAQYELKHGTFTCASEYTGNYQCGHYKHITSKETLYCIDGALLTKSSEYKGPITDVFYKENSYTTTIKPVTYKLDGVVCTEIDPKLDNYYKKDNSYFTEQPIDLVPNQPYPNASFDNFKFVCDNIKFADDLNQLTGYKKPASRELKVTFFPDLNGDVVAIDYKHYTPSFKKGAKLLHKPIVWHVNNATNKATYKPNTWCIRCLWSTKPVETSNSFDVLKSEDAQGMDNLACEDLKPVSEEVVENPTIQKDVLECNVKTTEVVGDIILKPANNSLKITEEVGHTDLMAAYVDNSSLTIKKPNELSRVLGLKTLATHGLAAVNSVPWDTIANYAKPFLNKVVSTTTNIVTRCLNRVCTNYMPYFFTLLLQLCTFTRSTNSRIKASMPTTIAKNTVKSVGKFCLEASFNYLKSPNFSKLINIIIWFLLLSVCLGSLIYSTAALGVLMSNLGMPSYCTGYREGYLNSTNVTIAIYCTGSIPCSVCLSGLDSLDTYPSLETIQITISSFKWDLTAFGLVAEWFLAYILFTRFFYVLGLAAIMQLFFSYFAVHFISNSWLMWLIINLVQMAPISAMVRMYIFFASFYYVWKSYVHVVDGCNSSTCMMCYKRNRATRVECTTIVNGVRRSFYVYANGGKGFCKLHNWNCVNCDTFCAGSTFISDEVARDLSLQFKRPINPTDQSSYIVDSVTVKNGSIHLYFDKAGQKTYERHSLSHFVNLDNLRANNTKGSLPINVIVFDGKSKCEESSAKSASVYYSQLMCQPILLLDQALVSDVGDSAEVAVKMFDAYVNTFSSTFNVPMEKLKTLVATAEAELAKNVSLDNVLSTFISAARQGFVDSDVETKDVVECLKLSHQSDIEVTGDSCNNYMLTYNKVENMTPRDLGACIDCSARHINAQVAKSHNIALIWNVKDFMSLSEQLRKQIRSAAKKNNLPFKLTCATTRQVVNVVTTKIALKGG

SEQ ID NO: 15870 - protein, 1946 aa, Artificial Sequence
  SARS-CoV-2__MT846556.1__non-structural protein 3 (NSP3)
MAPTKVTFGDDTVIEVQGYKSVNITFELDERIDKVLNEKCSAYTVELGTEVNEFACVVADAVIKTLQPVSELLTPLGIDLDEWSMATYYLFDESGEFKLASHMYCSFYPPDEDEEEGDCEEEEFEPSTQYEYGTEDDYQGKPLEFGATSAALQPEEEQEEDWLDDDSQQTVGQQDGSEDNQTTTIQTIVEVQPQLEMELTPVVQTIEVNSFSGYLKLTDNVYIKNADIVEEAKKVKPTVVVNAANVYLKHGGGVAGALNKATNNAMQVESDDYIATNGPLKVGGSCVLSGHNLAKHCLHVVGPNVNKGEDIQLLKSAYENFNQHEVLLAPLLSAGIFGADPIHSLRVCVDTVRTNVYLAVFDKNLYDKLVSSFLEMKSEKQVEQKIAEIPKEEVKPFITESKPSVEQRKQDDKKIKACVEEVTTTLEETKFLTENLLLYIDINGNLHPDSATLVSDIDITFLKKDAPYIVGDVVQEGVLTAVVIPTKKAGGTTEMLAKALRKVPTDNYITTYPGQGLNGYTVEEAKTVLKKCKSAFYILPSIISNEKQEILGTVSWNLREMLAHAEETRKLMPVCVETKAIVSTIQRKYKGIKIQEGVVDYGARFYFYTSKTTVASLINTLNDLNETLVTMPLGYVTHGLNLEEAARYMRSLKVPATVSVSSPDAVTAYNGYLTSSSKTPEEHFIETISLAGSYKDWSYSGQSTQLGIEFLKRGDKSVYYTSNPTTFHLDGEVITFDNLKTLLSLREVRTIKVFTTVDNINLHTQVVDMSMTYGQQFGPTYLDGADVTKIKPHNSHEGKTFYVLPNDDTLRVEAFEYYHTTDPSFLGRYMSALNHTKKWKYPQVNGLTSIKWADNNCYLATALLTLQQIELKFNPPALQDAYYRARAGEAANFCALILAYCNKTVGELGDVRETMSYLFQHANLDSCKRVLNVVCKTCGQQQTTLKGVEAVMYMGTLSYEQFKKGVQIPCTCGKQATKYLVQQESPFVMMSAPPAQYELKHGTFTCASEYTGNYQCGHYKHITSKETLYCIDGALLTKSSEYKGPITDVFYKENSYTTTIKPVTYKLDGVVCTEIDPKLDNYYKKDNSYFTEQPIDLVPNQPYPNASFDNFKFVCDNIKFADDLNQLTGYKKPASRELKVTFFPDLNGDVVAIDYKHYTPSFKKGAKLLHKPIVWHVNNATNKATYKPNTWCIRCLWSTKPVETSNSFDVLKSEDAQGMDNLACEDLKPVSEEVVENPTIQKDVLECNVKTTEVVGDIILKPANNSLKITEEVGHTDLMAAYVDNSSLTIKKPNELSRVLGLKTLATHGLAAVNSVPWDTIANYAKPFLNKVVGTTTNIVTRCLNRVCTNYMPYFFTLLLQLCTFTRSTNSRIKASMPTTIAKNTVKSVGKFCLEASFNYLKSPNFSKLINIIIWFLLLSVCLGSLIYSTAALGVLMSNLGMPSYCTGYREGYLNSTNVTIATYCTGSIPCSVCLSGLDSLDTYPSLETIQITISSFKWDLTAFGLVAEWFLAYILFTRFFYVLGLAAIMQLFFSYFAVHFISNSWLMWLIINLVQMAPISAMVRMYIFFASFYYVWKSYVHVVDGCNSSTCMMCYKRNRATRVECTTIVNGVRRSFYVYANGGKGFCKLHNWNCVNCDTFCAGSTFISDEVARDLSLQFKRPINPTDQSSYIVDSVTVKNGSIHLYFDKAGQKTYERHSLSHFVNLDNLRANNTKGSLPINVIVFDGKSKCEESSAKSASVYYSQLMCQPILLLDQALVSDVGDSAEVAVKMFDAYVNTFSSTFNVPMEKLKTLVATAEAELAKNVSLDNVLSTFISAARQGFVDSDVETKDVVECLKLSHQSDIEVTGDSCNNYMLTYNKVENMTPRDLGACIDCSARHINAQVAKSHNIALIWNVKDFMSLSEQLRKQIRSAAKKNNLPFKLTCATTRQVVNVVTTKIALKGG

SEQ ID NO: 15871 - protein, 1946 aa, Artificial Sequence
  SARS-CoV-2__MT846557.1__non-structural protein 3 (NSP3)
MAPTKVTFGDDTVIEVQGYKSVNITFELDERIDKVLNEKCSAYTVELGTEVNEFACVVADAVIKTLQPVSELLTPLGIDLDEWSMATYYLFDESGEFKLASHMYCSFYPPDEDEEEGDCEEEEFEPSTQYEYGTEDDYQGKPLEFGATSAALQPEEEQEEDWLDDDSQQTVGQQDGSEDNQTTTIQTIVEVQPQLEMELTPVVQTIEVNSFSGYLKLTDNVYIKNADIVEEAKKVKPTVVVNAANVYLKHGGGVAGALNKATNNAMQVESDDYIATNGPLKVGGSCVLSGHNLAKHCLHVVGPNVNKGEDIQLLKSAYENFNQHEVLLAPLLSAGIFGADPIHSLRVCVDTVRTNVYLAVFDKNLYDKLVSSFLEMKSEKQVEQKIAEIPKEEVKPFITESKPSVEQRKQDDKKIKACVEEVTTTLEETKFLTENLLLYIDINGNLHPDSATLVSDIDITFLKKDAPYIVGDVVQEGVLTAVVIPTKKAGGTTEMLAKALRKVPTYNYITTYPGQGLNGYTVEEAKTVLKKCKSAFYILPSIISNEKQEILGTVSWNLREMLAHAEETRKLMPVCVETKAIVSTIQRKYKGIKIQEGVVDYGARFYFYTSKTTVASLINTLNDLNETLVTMPLGYVTHGLNLEEAARYMRSLKVPATVSVSSPDAVTAYNGYLTSSSKTPEEHFIETISLAGSYKDWSYSGQSTQLGIEFLKRGDKSVYYTSNPTTFHLDGEVITFDNLKTLLSLREVRTIKVFTTVDNINLHTQVVDMSMTYGQQFGPTYLDGADVTKIKPHNSHEGKTFYVLPNDDTLRVEAFEYYHTTDPSFLGRYMSALNHTKKWKYPQVNGLTSIKWADNNCYLATALLTLQQIELKFNPPALQDAYYRARAGEAANFCALILAYCNKTVGELGDVRETMSYLFQHANLDSCKRVLNVVCKTCGQQQTTLKGVEAVMYMGTLSYEQFKKGVQIPCTCGKQATKYLVQQESPFVMMSAPPAQYELKHGTFTCASEYTGNYQCGHYKHITSKETLYCIDGALLTKSSEYKGPITDVFYKENSYTTTIKPVTYKLDGVVCTEIDPKLDNYYKKDNSYFTEQPIDLVPNQPYPNASFDNFKFVCDNIKFADDLNQLTGYKKPASRELKVTFFPDLNGDVVAIDYKHYTPSFKKGAKLLHKPIVWHVNNATNKATYKPNTWCIRCLWSTKPVETSNSFDVLKSEDAQGMDNLACEDLKPVSEEVVENPTIQKDVLECNVKTTEVVGDIILKPANNSLKITEEVGHTDLMAAYVDNSSLTIKKPNELSRVLGLKTLATHGLAAVNSVPWDTIANYAKPFLNKVVSTTTNIVTRCLNRVCTNYMPYFFTLLLQLCTFTRSTNSRIKASMPTTIAKNTVKSVGKFCLEASFNYLKSPNFSKLINIIIWFLLLSVCLGSLIYSTAALGVLMSNLGMPSYCTGYREGYLNSTNVTIATYCTGSIPCSVCLSGLDSLDTYPSLETIQITISSFKWDLTAFGLVAEWFLAYILFTRFFYVLGLAAIMQLFFSYFAVHFISNSWLMWLIINLVQMAPISAMVRMYIFFASFYYVWKSYVHVVDGCNSSTCMMCYKRNRATRVECTTIVNGVRRSFYVYANGGKGFCKLHNWNCVNCDTFCAGSTFISDEVARDLSLQFKRPINPTDQSSYIVDSVTVKNGSIHLYFDKAGQKTYERHSLSHFVNLDNLRANNTKGSLPINVIVFDGKSKCEESSAKSASVYYSQLMCQPILLLDQALVSDVGDSAEVAVKMFDAYVNTFSSTFNVPMEKLKTLVATAEAELAKNVSLDNVLSTFISAARQGFVDSDVETKDVVECLKLSHQSDIEVTGDSCNNYMLTYNKVENMTPRDLGACIDCSARHINAQVAKSHNIALIWNVKDFMSLSEQLRKQIRSAAKKNNLPFKLTCATTRQVVNVVTTKIALKGG

SEQ ID NO: 15872 - protein, 1946 aa, Artificial Sequence
  SARS-CoV-2__MT846558.1__non-structural protein 3 (NSP3)
MAPTKVTFGDDTVIEVQGYKSVNITFELDERIDKVLNEKCSAYTVELGTEVNEFACVVADAVIKTLQPVSELLTPLGIDLDEWSMATYYLFDESGEFKLASHMYCSFYPPDEDEEEGDCEEEEFEPSTQYEYGTEDDYQGKPLEFGATSAALQPEEEQEEDWLDDDSQQTVGQQDGSEDNQTTTIQTIVEVQPQLEMELTPVVQTIEVNSFSGYLKLTDNVYIKNADIVEEAKKVKPTVVVNAANVYLKHGGGVAGALNKATNNAMQVESDDYIATNGPLKVGGSCVLSGHNLAKHCLHVVGPNVNKGEDIQLLKSAYENFNQHEVLLAPLLSAGIFGADPIHSLRVCVDTVRTNVYLAVFDKNLYDKLVSSFLEMKSEKQVEQNIAEIPKEEVKPFITESKPSVEQRKQDDKKIKACVEEVTTTLEETKFLTENLLLYIDINGNLHPDSATLVSDIDITFLKKDAPYIVGDVVQEGVLTAVVIPTKKAGGTTEMLAKALRKVSTDNYITTYPGQGLNGYTVEEAKTVLKKCKSAFYILPSIISNEKQEILGTVSWNLREMLAHAEETRKLMPVCVETKAIVSTIQRKYKGIKIQEGVVDYGARFYFYTSKTTVASLINTLNDLNETLVTMPLGYVTHGLNLEEAARYMRSLKVPATVSVSSPDAVTAYNGYLTSSSKTPEEHFIETISLAGSYKDWSYSGQSTQLGIEFLKRGDKSVYYTSNPTTFHLDGEVITFDNLKTLLSLREVRTIKVFTTVDNINLHTQVVDMSMTYGQQFGPTYLDGADVTKIKPHNSHEGKTFYVLPNDDTLRVEAFEYYHTTDPSFLGRYMSALNHTKKWKYPQVNGLTSIKWADNNCYLATALLTLQQIELKFNPPALQDAYYRARAGEAANFCALILAYCNKTVGELGDVRETMSYLFQHANLDSCKRVLNVVCKTCGLQQTTLKGVEAVMYMGTLSYEQFKKGVQIPCTCGKQATKYLVQQESSFVMMSAPPAQYELKHGTFTCASEYTGNYQCGHYKHITSKETLYCIDGALLTKSSEYKGPITDVFYKENSYTTTIKPVTYKLDGVVCTEIDPKLDNYYKKDNSYFTEQPIDLVPNQPYPNASFDNFKFVCDNIKFADDLNQLTGYKKPASRELKVTFFPDLNGDVVAIDYKHYTPSFKKGAKLLHKPIVWHVNNATNKATYKPNTWCIRCLWSTKPVETSNSFDVLKSEDAQGMDNLACEDLKPVSEEVVENPTIQKDVLECNVKTTEVVGDIILKPANNSLKITEEVGHTDLMAAYVDNSSLTIKKPNELSRVLGLKTLATHGLAAVNSVPWDTIANYAKPFLNKVVSTTTNIVTRCLNRVCTNYMPYFFTLLLQLCTFTRSTNSRIKASMPTTIAKNTVKSVGKFCLEASFNYLKSPNFSKLINIIIWFLLLSVCLGSLIYSTAALGVLMSNLGMPSYCTGYREGYLNSTNVTIATYCTGSIPCSVCLSGLDSLDTYPSLETIQITISSFKWDLTAFGLVAEWFLAYILFTRFFYVLGLAAIMQLFFSYFAVHFISNSWLMWLIINLVQMAPISAMVRMYIFFASFYYVWKSYVHVVDGCNSSTCMMCYKRNRATRVECTTIVNGVRRSFYVYANGGKGFCKLHNWNCVNCDTFCAGSTFISDEVARDLSLQFKRPINPTDQSSYIVDSVTVKNGSIHLYFDKAGQKTYERHSLSHFVNFDNLRANNTKGSLPINVIVFDGKSKCEESSAKSASVYYSQLMCQPILLLDQALVSDVGDSAEVAVKMFDAYVNTFSSTFNVPMEKLKTLVATAEAELAKNVSLDNVLSTFISAARQGFVDSDVETKDVVECLKLSHQSDIEVTGDSCNNYMLTYNKVENMTPRDLGACIDCSARHINAQVAKSHNIALIWNVKDFMSLSEQLRKQIRSAAKKNNLPFKLTCATTRQVVNVVTTKIALKGG

SEQ ID NO: 15873 - protein, 1946 aa, Artificial Sequence
  SARS-CoV-2__MT846565.1__non-structural protein 3 (NSP3)
MAPTKVTFGDDTVIEVQGYKSVNITFELDERIDKVLNEKCSAYTVELGTEVNEFACVVADAVIKTLQPVSELLTPLGIDLDEWSMATYYLFDESGEFKLASHMYCSFYPPDEDEEEGDCEEEEFEPSTQYEYGTEDDYQGKPLEFGATSAALQPEEEQEEDWLDDDSQQTVGQQDGSEDNQTTTIQTIVEVQPQLEMELTPVVQTIEVNSFSGYLKLTDNVYIKNADIVEEAKKVKPTVVVNAANVYLKHGGGVAGALNKATNNAMQVESDDYIATNGPLKVGGSCVLSGHNLAKHCLHVVGPNVNKGEDIQLLKSAYENFNQHEVLLAPLLSAGIFGADPIHSLRVCVDTVCTNVYLAVFDKNLYDKLVSSFLEMKSEKQVEQKIAEIPKEEVKPFITESKPSVEQRKQDDKKIKACVEEVTTTLEETKFLTENLLLYIDINGNLHPDSATLVSDIDITFLKKDAPYIVGDVVQEGVLTAVVIPTKKAGGTTEMLAKALRKVPTDNYITTYPGQGLNGYTVEEAKTVLKKCKSAFYILPSIISNEKQEILGTVSWNLREMLAHAEETRKLMPVCVETKAIVSTIQRKYKGIKIQEGVVDYGARFYFYTSKTTVASLINTLNDLNETLVTMPLGYVTHGLNLEEAARYMRSLKVPATVSVSSPDAVTAYNGYLTSSSKTPEEHFIETISLAGSYKDWSYSGQSTQLGIEFLKRGDKSVYYTSNPTTFHLDGEVITFDNLKTLLSLREVRTIKVFTTVDNINLHTQVVDMSMTYGQQFGPTYLDGADVTKIKPHNSHEGKTFYVLPNDDTLRVEAFEYYHTTDPSFLGRYMSALNHTKKWKYPQVNGLTSIKWADNNCYLATALLTLQQIELKFNPPALQDAYYRARAGEAANFCALILAYCNKTVGELGDVRETMSYLFQHANLDSCKRVLNVVCKTCGQQQTTLKGVEAVMYMGTLSYEQFKKGVQIPCTCGKQATKYLVQQESPFVMMSAPPAQYELKHGTFTCASEYTGNYQCGHYKHITSKETLYCIDGALLTKSSEYKGPITDVFYKENSYTTTIKPVTYKLDGVVCTEIDPKLDNYYKKDNSYFTEQPIDLVPNQPYPNASFDNFKFVCDNIKFADDLNQLTGYKKPASRELKVTFFPDLNGDVVAIDYKHYTPSFKKGAKLLHKPIVWHVNNATNKATYKPNTWCIRCLWSTKPVETSNSFDVLKSEDAQGMDNLACEDLKPVSEEVVENPTIQKDVLECNVKTTEVVGDIILKPANNSLKITEEVGHTDLMAAYVDNSSLTIKKPNELSRVLGLKTLATHGLAAVNSVPWDTIANYAKPFLNKVVSTTTNIVTRCLNRVCTNYMPYFFTLLLQLCTFTRSTNSRIKASMPTTIAKNTVKSVGKFCLEASFNYLKSPNFSKLINIIIWFLLLSVCLGSLIYSTAALGVLMSNLGMPSYCTGYREGYLNSTNVTIATYCTGSIPCSVCLSGLDSLDTYPSLETIQITISSFKWDLTAFGLVAEWFLAYILFTRFFYVLGLAAIMQLFFSYFAVHFISNSWLMWLIINLVQMAPISAMVRMYIFFASFYYVWKSYVHVVDGCNSSTCMMCYKRNRATRVECTTIVNGVRRSFYVYANGGKGFCKLHNWNCVNCDTFCAGSTFISDEVARDLSLQFKRPINPTDQSSYIVDSVTVKNGSIHLYFDKAGQKTYERHSLSHFVNLDNLRANNTKGSLPINVIVFDGKSKCEESSAKSASVYYSQLMCQPILLLDQALVSDVGDSAEVAVKMFDAYVNTFSSTFNVPMEKLKTLVATAEAELAKNVSLDNVLSTFISAARQGFVDSDVETKDVVECLKLSHQSDIEVTGDSCNNYMLTYNKVENMTPRDLGACIDCSARHINAQVAKSHNIALIWNVKDFMSLSEQLRKQIRSAAKKNNLPFKLTCATTRQVVNVVTTKIALKGG

SEQ ID NO: 15874 - protein, 1946 aa, Artificial Sequence
  SARS-CoV-2__MT846623.1__non-structural protein 3 (NSP3)
MAPTKVTFGDDTVIEVQGYKSVNITFELDERIDKVLNEKCSAYTVELGTEVNEFACVVADAVIKTLQPVSELLTPLGIDLDEWSMATYYLFDESGEFKLASHMYCSFYPPDEDEEEGDCEEEEFEPSTQYEYGTEDDYQGKPLEFGATSAALQLEEEQEEDWLDDDSQQTVGQQDGSEDNQTTTIQTIVEVQPQLEMELTPVVQTIEVNSFSGYLKLTDNVYIKNADIVEEAKKVKPTVVVNAANVYLKHGGGVAGALNKATNNAMQVESDDYIATNGPLKVGGSCVLSGHNLAKHCLHVVGPNVNKGEDIQLLKSAYENFNQHEVLLAPLLSAGIFGADPIHSLRVCVDTVRTNVYLAVFDKNLYDKLVSSFLEMKSEKQVEQKIAEIPKEEVKPFITESKPSVEQRKQDDKKIKACVEEVTTTLEETKFLTENLLLYIDINGNLHPDSATLVSDIDITFLKKDAPYIVGDVVQEGVLTAVVIPTKKAGGTTEMLAKALRKVPTDNYITTYPGQGLNGYTVEEAKTVLKKCKSAFYILPSIISNEKQEILGTVSWNLREMLAHAEETRKLMPVCVETKAIVSTIQRKYKGIKIQEGVVDYGARFYFYTSKTTVASLINTLNDLNETLVTMPLGYVTHGLNLEEAARYMRSLKVPATVSVSSPDAVTAYNGYLTSSSKTPEEHFIETISLAGSYKDWSYSGQSTQLGIEFLKRGDKSVYYTSNPTTFHLDGEVITFDNLKTLLSLREVRTIKVFTTVDNINLHTQVVDMSMTYGQQFGPTYLDGADVTKIKPHNSHEGKTFYVLPNDDTLRVEAFEYYHTTDPSFLGRYMSALNHTKKWKYPQVNGLTSIKWADNNCYLATALLTLQQIELKFNPPALQDAYYRARAGEAANFCALILAYCNKTVGELGDVRETMSYLFQHANLDSCKRVLNVVCKTCGQQQTTLKGVEAVMYMGTLSYEQFKKGVQIPCTCGKQATKYLVQQESPFVMMSAPPAQYELKHGTFTCASEYTGNYQCGHYKHITSKETLYCIDGALLTKSSEYKGPITDVFYKENSYTTTIKPVTYKLDGVVCTEIDPKLDNYYKKDNSYFTEQPIDLVPNQPYPNASFDNFKFVCDNIKFADDLNQLTGYKKPASRELKVTFFPDLNGDVVAIDYKHYTPSFKKGAKLLHKPIVWHVNNATNKATYKPNTWCIRCLWSTKPVETSNSFDVLKSEDAQGMDNLACEDLKPVSEEVVENPTIQKDVLECNVKTTEVVGDIILKPANNSLKITEEVGHTDLMAAYVDNSSLTIKKPNELSRVLGLKTLATHGLAAVNSVPWDTIANYAKPFLNKVVSITTNIVTRCLNRVCTNYMPYFFTLLLQLCTFTRSTNSRIKASMPTTIAKNTVKSVGKFCLEASFNYLKSPNFSKLINIIIWFLLLSVCLGSLIYSTAALGVLMSNLGMPSYCTGYREGYLNSTNVTIATYCTGSIPCSVCLSGLDSLDTYPSLETIQITISSFKWDLTAFGLVAEWFLAYILFTRFFYVLGLAAIMQLFFSYFAVHFISNSWLMWLIINLVQMAPISAMVRMYIFFASFYYVWKSYVHVVDGCNSSTCMMCYKRNRATRVECTTIVNGVRRSFYVYANGGKGFCKLHNWNCVNCDTFCAGSTFISDEVARDLSLQFKRPINPTDQSSYIVDSVTVKNGSIHLYFDKAGQKTYERHSLSHFVNLDNLRANNTKGSLPINVIVFDGKSKCEESSAKSASVYYSQLMCQPILLLDQALVSDVGDSAEVAVKMFDAYVNTFSSTFNVPMEKLKTLVATAEAELAKNVSLDNVLSTFISAARQGFVDSDVETKDVVECLKLSHQSDIEVTGDSCNNYMLTYNKVENMTPRDLGACIDCSARHINAQVAKSHNIALIWNVKDFMSLSEQLRKQIRSAAKKNNLPFKLTCATTRQVVNVVTTKIALKGG

SEQ ID NO: 15875 - protein, 1946 aa, Artificial Sequence
  SARS-CoV-2__MT846644.1__non-structural protein 3 (NSP3)
MAPTKVTFGDDTVIEVQGYKSVNITFELDERIDKVLNEKCSAYTVELGTEVNEFACVVADAVIKTLQPVSELLTPLGIDLDEWSMATYYLFDESGDFKLASHMYCSFYPPDEDEEEGDCEEEEFEPSTQYEYGTEDDYQGKPLEFGATSAALQPEEEQEEDWLDDDSQQTVGQQDGSEDNQTTTIQTIVEVQPQLEMELTPVVQTIEVNSFSGYLKLTDNVYIKNADIVEEAKKVKPTVVVNAANVYLKHGGGVAGALNKATNNAMQVESDDYIATNGPLKVGGSCVLSGHNLAKHCLHVVGPNVNKGEDIQLLKSAYENFNQHEVLLAPLLSAGIFGADPIHSLRVCVDTVRTNVYLAVFDKNLYDKLVSSFLEMKSEKQVEQKIAEIPKEEVKPFITESKPSVEQRKQDDKKIKACVEEVTTTLEETKFLTENLLLYIDINGNLHPDSATLVSDIDITFLKKDAPYIVGDVVQEGVLTAVVIPTKKAGGTTEMLAKALRKVPTDNYITTYPGQGLNGYTVEEAKTVLKKCKSAFYILPSIISNEKQEILGTVSWNLREMLAHAEETRKLMPVCVETKAIVSTIQRKYKGIKIQEGVVDYGARFYFYTSKTTVASLINTLNDLNETLVTMPLGYVTHGLNLEEAARYMRSLKVPATVSVSSPDAVTAYNGYLTSSSKTPEEHFIETISLAGSYKDWSYSGQSTQLGIEFLKRGDKSVYYTSNPTTFHLDGEVITFDNLKTLLSLREVRTIKVFTTVDNINLHTQVVDMSMTYGQQFGPTYLDGADVTKIKPHNSHEGKTFYVLPNDDTLRVEAFEYYHTTDPSFLGRYMSALNHTKKWKYPQVNGLTSIKWADNNCYLATALLTLQQIELKFNPPALQDAYYRARAGEAANFCALILAYCNKTVGELGDVRETMSYLFQHANLDSCKRVLNVVCKTCGQQQTTLKGVEAVMYMGTLSYEQFKKGVQIPCTCGKQATKYLVQQESPFVMMSAPPAQYELKHGTFTCASEYTGNYQCGHYKHITSKETLYCIDGALLTKSSEYKGPITDVFYKENSYTTTIKPVTYKLDGVVCTEIDPKLDNYYKKDNSYFTEQPIDLVPNQPYPNASFDNFKFVCDNIKFADDLNQLTGYKKPASRELKVTFFPDLNGDVVAIDYKHYTPSFKKGAKLLHKPIVWHVNNATNKATYKPNTWCIRCLWSTKPVETSNSFDVLKSEDAQGMDNLACEDLKPVSEEVVENPTIQKDVLECNVKTTEVVGDIILKPANNSLKITEEVGHTDLMAAYVDNSSLTIKKPNELSRVLGLKTLATHGLAAVNSVPWDTIANYAKPFLNKVVSTTTNIVTRCLNRVCTNYMPYFFTLLLQLCTFTRSTNSRIKASMPTTIAKNTVKSVGKFCLEASFNYLKSPNFSKLINIIIWFLLLSVCLGSLIYSTAALGVLMSNLGMPSYCTGYREGYLNSTNVTIATYCTGSIPCSVCLSGLDSLDTYPSLETIQITISSFKWDLTAFGLVAEWFLAYILFTRFFYVLGLAAIMQLFFSYFAVHFISNSWLMWLIINLVQMAPISAMVRMYIFFASFYYVWKSYVHVVDGCNSSTCMMCYKRNRATRVECTTIVNGVRRSFYVYANGGKGFCKLHNWNCVNCDTFCAGSTFISDEVARDLSLQFKRPINPTDQSSYIVDSVTVKNGSIHLYFDKAGQKTYERHSLSHFVNLDNLRANNTKGSLPINVIVFDGKSKCEESSAKSASVYYSQLMCQPILLLDQALVSDVGDSAEVAVKMFDAYVNTFSSTFNVPMEKLKTLVATAEAELAKNVSLDNVLSTFISAARQGFVDSDVETKDVVECLKLSHQSDIEVTGDSCNNYMLTYNKVENMTPRDLGACIDCSARHINAQVAKSHNIALIWNVKDFMSLSEQLRKQIRSAAKKNNLPFKLTCATTRQVVNVVTTKIALKGG

SEQ ID NO: 15876 - protein, 1946 aa, Artificial Sequence
  SARS-CoV-2__MT846686.1__non-structural protein 3 (NSP3)
MAPTKVTFGDDTVIEVQGYKSVNITFELDERIDKVLNEKCSAYTVELGTEVNEFACVVADAVIKTLQPVSELLTPLGIDLDEWSMATYYLFDESGEFKLASHMYCSFYPPDEDEEEGDCEEEEFEPSTQYEYGTEDDYQGKPLEFGATSAALQPEEEQEEDWLDDDSQQTVGQQDGSEDNQTTTIQTIVEVQPQLEMELTPVVQTIEVNSFSGYLKLTDNVYIKNADIVEEAKKVKPTVVVNAANVYLKHGGGVAGALNKATNNAMQVESDDYIATNGPLKVGGSCVLSGHNLAKHCLHVVGPNVNKGEDIQLLKSAYENFNQHEVLLAPLLSAGIFGADPIHSLRVCVDTVRTNVYLAVFDKNLYDKLVSSFLEMKSEKQVEQKIAEIPKEEVKPFITESKPSVEQRKQDDKKIKACVEEVTTTLEETKFLTENLLLYIDINGNLHPDSATLVSDIDITFLKKDAPYIVGDVVQEGVLTAVVIPTKKAGGTTEMLAKALRKVPTDNYITTYPGQGLNGYTVEEAKTVLKKCKSAFYILPSIISNEKQEILGTVSWNLREMLAHAEETRKLMPVCVETKAIVSTIQRKYKGIKIQEGVVDYGARFYFYTSKTTVASLINTLNDLNETLVTMPLGYVTHGLNLEEAARYMRSLKVPATVSVSSPDAVTAYNGYLTSSSKTPEEHFIETISLAGSYKDWSYSGQSTQLGIEFLKRGDKSVYYTSNPTTFHLDGEVITFDNLKTLLSLREVRTIKVFTTVDNINLHTQVVDMSMTYGQQFGPTYLDGADVTKIKPHNSHEGKTFYVLPNDDTLRVEAFEYYHTTDPSFLGRYMSALNHTKKWKYPQVNGLTSIKWADNNCYLATALLTLQQIELKFNPPALQDAYYRARAGEAANFCALILAYCNKTVGELGDVRETMSYLFQHANLDSCKRVLNVVCKTCGQQQTTLKGVEAVMYMGTLSYEQFKKGVQIPCTCGKQATKYLVQQESPFVMMSAPPAQYELKHGTFTCASEYTGNYQCGHYKHITSKETLYCIDGALLTKSSEYKGPITDVFYKENSYTTTIKPVTYKLDGVVCTEIDPKLDNYYKKDNSYFTEQPIDLVPNQPYPNASFDNFKFVCDNIKFADDLNQLTGYKKPASRELKVTFFPDLNGDVVAIDYKHYTPSFKKGAKLLHKPIVWHVNNATNKATYKPNTWCIRCLWSTKPVETSNSFDVLKSEDAQGMDNLACEDLKPVSEEVVENPTIQKDVLECNVKTTEVVGDIILKPANNSLKITEEVGHTDLMAAYVDNSSLTIKKPNELSRVLGLKTLATHGLAAVNSVPWDTIANYAKPFLNKVVSTTTNIVTRCLNRVCTNYMPYFFTLLLQLCTFTRSTNSRIKASMPTTIAKNTVKSVGKFCLEASFNYLKSPNFSKLINIIIWFLLLSVCLGSLIYSTAALGVLMSNLGMPSYCTGYREGYLNSTNVTIATYCTGSIPCSVCLSGLDSLDTYPSLETIQITISSFKWDLTAFGLVAEWFLAYILFTRFFYVLGLAAIMQLFFSYFAVHFISNSWLMWLIINLVQMAPISAMVRMYIFFASFYYVWKSYVHVVDGCNSSTCMMCYKRNRATRVECTTIVNGVKRSFYVYANGGKGFCKLHNWNCVNCDTFCAGSTFISDEVARDLSLQFKRPINPTDQSSYIVDSVTVKNGSIHLYFDKAGQKTYERHSLSHFVNLDNLRANNTKGSLPINVIVFDGKSKCEESSAKSASVYYSQLMCQPILLLDQALVSDVGDSAEVAVKMFDAYVNTFSSTFNVPMEKLKTLVATAEAELAKNVSLDNVLSTFISAARQGFVDSDVETKDVVECLKLSHQSDIEVTGDSCNNYMLTYNKVENMTPRDLGACIDCSARHINAQVAKSHNIALIWNVKDFMSLSEQLRKQIRSAAKKNNLPFKLTCATTRQVVNVVTTKIALKGG

SEQ ID NO: 15877 - protein, 1946 aa, Artificial Sequence
  SARS-CoV-2__MT847211.1__non-structural protein 3 (NSP3)
MAPTKVTFGDDTVIEVQGYKSVNITFELDERIDKVLNEKCSAYTVELGTEVNEFACVVADAVIKTLQPVSELLTPLGIDLDEWSMATYYLFDESGEFKLASHMYCSFYPPDEDEEEGDCEEEEFEPSTQYEYGTEDDYQGKPLEFGATSAALQPEEEQEEDWLDDDSQQTVGQQDGSEDNQTTTIQTIVEVQPQLEMELTPVVQTIEVNSFSGYLKLTDNVYIKNADIVEEAKKVKPTVVVNAANVYLKHGGGVAGALNKATNNAMQVESDDYIATNGPLKVGGSCVLSGHNLAKHCLHVVGPNVNKGEDIQLLKSAYENFNQHEVLLAPLLSAGIFGADPIHSLRVCVDTVRTNVYLAVFDKNLYDKLVSSFLEMKSEKQVEQKIAEIPKEEVKPFITESKPSVEQRKQDDKKIKACVEEVTTTLEETKFLTENLLLYIDINGNLHPDSATLVSDIDITFLKKDAPYIVGDVVQEGVLTAVVIPTKKAGGTTEMLAKALRKVPTDNYITTYPGQGLNGYTVEEAKTVLKKCKSAFYILPSIISNEKQEILGTVSWNLREMLAHAEETRKLMPVCVETKAIVSTIQRKYKGIKIQEGVVDYGARFYFYTSKTTVASLINTLNDLNETLVTMPLGYVTHGLNLEEAARYMRSLKVPATVSVSSPDAVTAYNGYLTSSSKTPEEHFIETISLAGSYKDWSYSGQSTQLGIEFLKRGDKSVYYTSNPTTFHLDGEVITFDNLKTLLSLREVRTIKVFTTVDNINLHTQVVDMSMTYGQQFGPTYLDGADVTKIKPHNSHEGKTFYVLPNDDTLRVEAFEYYHTTDPSFLGRYMSALNHTKKWKYPQVNGLTSIKWADNNCYLATALLTLQQIELKFNPPALQDAYYRARAGEAANFCALILAYCNKTVGELGDVRETMSYLFQHANLDSCKRVLNVVCKTCGQQQTTLKGVEAVMYMGTLSYEQFKKGVQIPCTCGKQATKYLVQQESPFVMMSAPPAQYELKHGTFTCASEYTGNYQCGHYKHITSKETLYCIDGALLTKSSEYKGPITDVFYKENSYTTTIKPVTYKLDGVVCTEIDPKLDNYYKKDNSYFTEQPIDLVPNQPYPNASFDNFKFVCDNIKFADDLNQLTGYKKPASRELKVTFFPDLNGDVVAIDYKHYTPSFKKGAKLLHKPIVWHVNNATNKATYKPNTWCIRCLWSTKPVETSNSFDVLKSEDAQGMDNLACEDLKPVSEEVVENPTIQKDVLECNVKTTEVVGDIILKPANNSLKITEEVGHTDLMAAYVDNSSLTIKKPNELSRVLGLKTLATHGLAAVNSVPWDTIANYAKPFLNKVVSTTTNIVTWCLNRVCTNYMPYFFTLLLQLCTFTRSTNSRIKASMPTTIAKNTVKSVGKFCLEASFNYLKSPNFSKLINIIIWFLLLSVCLGSLIYSTAALGVLMSNLGMPSYCTGYREGYLNSTNVTIATYCTGSIPCSVCLSGLDSLDTYPSLETIQITISSFKWDLTAFGLVAEWFLAYILFTRFFYVLGLAAIMQLFFSYFAVHFISNSWLMWLIINLVQMAPISAMVRMYIFFASFYYVWKSYVHVVDGCNSSTCMMCYKRNRATRVECTTIVNGVRRSFYVYANGGKGFCKLHNWNCVNCDTFCAGSTFISDEVARDLSLQFKRPINPTDQSSYIVDSVTVKNGSIHLYFDKAGQKTYERHSLSHFVNLDNLRANNTKGSLPINVIVFDGKSKCEESSAKSASVYYSQLMCQPILLLDQALVSDVGDSAEVAVKMFDAYVNTFSSTFNVPMEKLKTLVATAEAELAKNVSLDNVLSTFISAARQGFVDSDVETKDVVECLKLSHQSDIEVTGDSCNNYMLTYNKVENMTPRDLGACIDCSARHINAQVAKSHNIALIWNVKDFMSLSEQLRKQIRSAAKKNNLPFKLTCATTRQVVNVVTTKIALKGG

SEQ ID NO: 15878 - protein, 1946 aa, Artificial Sequence
  SARS-CoV-2__MT847217.1__non-structural protein 3 (NSP3)
MAPTKVTFGDDTVIEVQGYKSVNITFELDERIDKVLNEKCSAYTVELGTEVNEFACVVADAVIKTLQPVSELLTPLGIDLDEWSMATYYLFDESGEFKLASHMYCSFYPPDEDEEEGDCEEEEFEPSTQYEYGTEDDYQGKPLEFGATSAALQPEEEQEEDWLDDDSQQTVGQQDGIEDNQTTTIQTIVEVQPQLEMELTPVVQTIEVNSFSGYLKLTDNVYIKNADIVEEAKKVKPTVVVNAANVYLKHGGGVAGALNKATNNAMQVESDDYIATNGPLKVGGSCVLSGHNLAKHCLHVVGPNVNKGEDIQLLKSAYENFNQHEVLLAPLLSAGIFGADPIHSLRVCVDTVRTNVYLAVFDKNLYDKLVSSFLEMKSEKQVEQKIAEIPKEEVKPFITESKPSVEQRKQDDKKIKACVEEVTTTLEETKFLTENLLLYIDINGNLHPDSATLVSDIDITFLKKDAPYIVGDVVQEGVLTAVVIPTKKAGGTTEMLAKALRKVPTDNYITTYPGQGLNGYTVEEAKTVLKKCKSAFYILPSIISNEKQEILGTVSWNLREMLAHAEETRKLMPVCVETKAIVSTIQRKYKGIKIQEGVVDYGARFYFYTSKTTVASLINTLNDLNETLVTMPLGYVTHGLNLEEAARYMRSLKVPATVSVSSPDAVTAYNGYLTSSSKTPEEHFIETISLAGSYKDWSYSGQSTQLGIEFLKRGDKSVYYTSNPTTFHLDGEVITFDNLKTLLSLREVRTIKVFTTVDNINLHTQVVDMSMTYGQQFGPTYLDGADVTKIKPHNSHEGKTFYVLPNDDTLRVEAFEYYHTTDPSFLGRYMSALNHTKKWKYPQVNGLTSIKWADNNCYLATALLTLQQIELKFNPPALQDAYYRARAGEAANFCALILAYCNKTVGELGDVRETMSYLFQHANLDSCKRVLNVVCKTCGQQQTTLKGVEAVMYMGTLSYEQFKKGVQIPCTCGKQATKYLVQQESPFVMMSAPPAQYELKHGTFTCASEYTGNYQCGHYKHITSKETLYCIDGALLTKSSEYKGPITDVFYKENSYTTTIKPVTYKLDGVVCTEIDPKLDNYYKKDNSYFTEQPIDLVPNQPYPNASFDNFKFVCDNIKFADDLNQLTGYKKPASRELKVTFFPDLNGDVVAIDYKHYTPSFKKGAKLLHKPIVWHVNNATNKATYKPNTWCIRCLWSTKPVETSNSFDVLKSEDAQGMDNLACEDLKPVSEEVVENPTIQKDVLECNVKTTEVVGDIILKPANNSLKITEEVGHTDLMAAYVDNSSLTIKKPNELSRVLGLKTLATHGLAAVNSVPWDTIANYAKPFLNKVVSTTTNIVTRCLNRVCTNYMPYFFTLLLQLCTFTRSTNSRIKASMPTTIAKNTVKSVGKFCLEASFNYLKSPNFSKLINIIIWFLLLSVCLGSLIYSTAALGVLMSNLGMPSYCTGYREGYLNSTNVTIATYCTGSIPCSVCLSGLDSLDTYPSLETIQITISSFKWDLTAFGLVAEWFLAYILFTRFFYVLGLAAIMQLFFSYFAVHFISNSWLMWLIINLVQMAPISAMVRMYIFFASFYYVWKSYVHVVDGCNSSTCMMCYKRNRATRVECTTIVNGVRRSFYVYANGGKGFCKLHNWNCVNCDTFCAGSTFISDEVARDLSLQFKRPINPTDQSSYIVDSVTVKNGSIHLYFDKAGQKTYERHSLSHFVNLDNLRANNTKGSLPINVIVFDGKSKCEESSAKSASVYYSQLMCQPILLLDQALVSDVGDSAEVAVKMFDAYVNTFSSTFNVPMEKLKTLVATAEAELAKNVSLDNVLSTFISAARQGFVDSDVETKDVVECLKLSHQSDIEVTGDSCNNYMLTYNKVENMTPRDLGACIDCSARHINAQVAKSHNIALIWNVKDFMSLSEQLRKQIRSAAKKNNLPFKLTCATTRQVVNVVTTKIALKGG

SEQ ID NO: 15879 - protein, 1946 aa, Artificial Sequence
  SARS-CoV-2__MT847218.1__non-structural protein 3 (NSP3)
MAPTKVTFGDDTVIEVQGYKSVNITFELDERIDKVLNEKCSAYTVELGTEVNEFACVVADAVIKTLQPVSELLTPLGIDLDEWSMATYYLFDESGEFKLASHMYCSFYPPDEDEEEGDCEEEEFEPSTQYEYGTEDDYQGKPLEFGATSAAPQPEEEQEEDWLDDDSQQTVGQQDGSEDNQTTTIQTIVEVQPQLEMELTPVVQTIEVNSFSGYLKLTDNVYIKNADIVEEAKKVKPTVVVNAANVYLKHGGGVAGALNKATNNAMQVESDDYIATNGPLKVGGSCVLSGHNLAKHCLHVVGPNVNKGEDIQLLKSAYENFNQHEVLLAPLLSAGIFGADPIHSLRVCVDTVRTNVYLAVFDKNLYDKLVSSFLEMKSEKQVEQKIAEIPKEEVKPFITESKPSVEQRKQDDKKIKACVEEVTTTLEETKFLTENLLLYIDINGNLHPDSATLVSDIDITFLKKDAPYIVGDVVQEGVLTAVVIPTKKAGGTTEMLAKALRKVPTDNYITTYPGQGLNGYTVEEAKTVLKKCKSAFYILPSIISNEKQEILGTVSWNLREMLAHAEETRKLMPVCVETKAIVSTIQRKYKGIKIQEGVVDYGARFYFYTSKTTVASLINTLNDLNETLVTMPLGYVTHGLNLEEAARYMRSLKVPATVSVSSPDAVTAYNGYLTSSSKTPEEHFIETISLAGSYKDWSYSGQSTQLGIEFLKRGDKSVYYTSNPTTFHLDGEVITFDNLKTLLSLREVRTIKVFTTVDNINLHTQVVDMSMTYGQQFGPTYLDGADVTKIKPHNSHEGKTFYVLPNDDTLRVEAFEYYHTTDPSFLGRYMSALNHTKKWKYPQVNGLTSIKWADNNCYLATALLTLQQIELKFNPPALQDAYYRARAGEAANFCALILAYCNKTVGELGDVRETMSYLFQHANLDSCKRVLNVVCKTCGQQQTTLKGVEAVMYMGTLSYEQFKKGVQIPCTCGKQATKYLVQQESPFVMMSAPPAQYELKHGTFTCASEYTGNYQCGHYKHITSKETLYCIDGALLTKSSEYKGPITDVFYKENSYTTTIKPVTYKLDGVVCTEIDPKLDNYYKKDNSYFTEQPIDLVPNQPYPNASFDNFKFVCDNIKFADDLNQLTGYKKPASRELKVTFFPDLNGDVVAIDYKHYTPSFKKGAKLLHKPIVWHVNNATNKATYKPNTWCIRCLWSTKPVETSNSFDVLKSEDAQGMDNLACEDLKPVSEEVVENPTIQKDVLECNVKTTEVVGDIILKPANNSLKITEEVGHTDLMAAYVDNSSLTIKKPNELSRVLGLKTLATHGLAAVNSVPWDTIANYAKPFLNKVVSTTTNIVTRCLNRVCTNYMPYFFTLLLQLCTFTRSTNSRIKASMPTTIAKNTVKSVGKFCLEASFNYLKSPNFSKLINIIIWFLLLSVCLGSLIYSTAALGVLMSNLGMPSYCTGYREGYLNSTNVTIATYCTGSIPCSVCLSGLDSLDTYPSLETIQITISSFKWDLTAFGLVAEWFLAYILFTRFFYVLGLAAIMQLFFSYFAVHFISNSWLMWLIINLVQMAPISAMVRMYIFFASFYYVWKSYVHVVDGCNSSTCMMCYKRNRATRVECTTIVNGVRRSFYVYANGGKGFCKLHNWNCVNCDTFCAGSTFISDEVARDLSLQFKRPINPTDQSSYIVDSVTVKNGSIHLYFDKAGQKTYERHSLSHFVNLDNLRANNTKGSLPINVIVFDGKSKCEESSAKSASVYYSQLMCQPILLLDQALVSDVGDSAEVAVKMFDAYVNTFSSTFNVPMEKLKTLVATAEAELAKNVSLDNVLSTFISAARQGFVDSDVETKDVVECLKLSHQSDIEVTGDSCNNYMLTYNKVENMTPRDLGACIDCSARHINAQVAKSHNIALIWNVKDFMSLSEQLRKQIRSAAKKNNLPFKLTCATTRQVVNVVTTKIALKGG

SEQ ID NO: 15880 - protein, 1946 aa, Artificial Sequence
  SARS-CoV-2__MT847224.1__non-structural protein 3 (NSP3)
MAPTKVTFGDDTVIEVQGYKSVNITFELDERIDKVLNEKCSAYTVELGTEVNEFACVVADAVIKTLQPVSELLTPLGIDLDEWSMATYYLFDESGEFKLASHMYCSFYPPDEDEEEGDYEEEEFEPSTQYEYGTEDDYQGKPLEFGATSAALQPEEEQEEDWLDDDSQQTVGQQDGSEDNQTTTIQTIVEVQPQLEMELTPVVQTIEVNSFSGYLKLTDNVYIKNADIVEEAKKVKPTVVVNAANVYLKHGGGVAGALNKATNNAMQVESDDYIATNGPLKVGGSCVLSGHNLAKHCLHVVGPNVNKGEDIQLLKSAYENFNQHEVLLAPLLSAGIFGADPIHSLRVCVDTVRTNVYLAVFDKNLYDKLVSSFLEMKSEKQVEQKIAEIPKEEVKPFITESKPSVEQRKQDDKKIKACVEEVTTTLEETKFLTENLLLYIDINGNLHPDSATLVSDIDITFLKKDAPYIVGDVVQEGVLTAVVIPTKKAGGTTEMLAKALRKVPTDNYITTYPGQGLNGYTVEEAKTVLKKCKSAFYILPSIISNEKQEILGTVSWNLREMLAHAEETRKLMPVCVETKAIVSTIQRKYKGIKIQEGVVDYGARFYFYTSKTTVASLINTLNDLNETLVTMPLGYVTHGLNLEEAARYMRSLKVPATVSVSSPDAVTAYNGYLTSSSKTPEEHFIETISLAGSYKDWSYSGQSTQLGIEFLKRGDKSVYYTSNPTTFHLDGEVITFDNLKTLLSLREVRTIKVFTTVDNINLHTQVVDMSMTYGQQFGPTYLDGADVTKIKPHNSHEGKTFYVLPNDDTLRVEAFEYYHTTDPSFLGRYMSALNHTKKWKYPQVNGLTSIKWADNNCYLATALLTLQQIELKFNPPALQDAYYRARAGEAANFCALILAYCNKTVGELGDVRETMSYLFQHANLDSCKRVLNVVCKTCGQQQTTLKGVEAVMYMGTLSYEQFKKGVQIPCTCGKQATKYLVQQESPFVMMSAPPAQYELKHGTFTCASEYTGNYQCGHYKHITSKETLYCIDGALLTKSSEYKGPITDVFYKENSYTTTIKPVTYKLDGVVCTEIDPKLDNYYKKDNSYFTEQPIDLVPNQPYPNASFDNFKFVCDNIKFADDLNQLTGYKKPASRELKVTFFPDLNGDVVAIDYKHYTPSFKKGAKLLHKPIVWHVNNATNKATYKPNTWCIRCLWSTKPVETSNSFDVLKSEDAQGMDNLACEDLKPVSEEVVENPTIQKDVLECNVKTTEVVGDIILKPANNSLKITEEVGHIDLMAAYVDNSSLTIKKPNELSRVLGLKTLATHGLAAVNSVPWDTIANYAKPFLNKVVSTTTNIVTRCLNRVCTNYMPYFFTLLLQLCTFTRSTNSRIKASMPTTIAKNTVKSVGKFCLEASFNYLKSPNFSKLINIIIWFLLLSVCLGSLIYSTAALGVLMSNLGMPSYCTGYREGYLNSTNVTIATYCTGSIPCSVCLSGLDSLDTYPSLETIQITISSFKWDLTAFGLVAEWFLAYILFTRFFYVLGLAAIMQLFFSYFAVHFISNSWLMWLIINLVQMAPISAMVRMYIFFASFYYVWKSYVHVVDGCNSSTCMMCYKRNRATRVECTTIVNGVRRSFYVYANGGKGFCKLHNWNCVNCDTFCAGSTFISDEVARDLSLQFKRPINPTDQSSYIVDSVTVKNGSIHLYFDKAGQKTYERHSLSHFVNLDNLRANNTKGSLPINVIVFDGKSKCEESSAKSASVYYSQLMCQPILLLDQALVSDVGDSAEVAVKMFDAYVNTFSSTFNVPMEKLKTLVATAEAELAKNVSLDNVLSTFISAARQGFVDSDVETKDVVECLKLSHQSDIEVTGDSCNNYMLTYNKVENMTPRDLGACIDCSARHINAQVAKSHNIALIWNVKDFMSLSEQLRKQIRSAAKKNNLPFKLTCATTRQVVNVVTTKIALKGG

SEQ ID NO: 15881 - protein, 1946 aa, Artificial Sequence
  SARS-CoV-2__MT847228.1__non-structural protein 3 (NSP3)
MAPTKVTFGDDTVIEVQGYKSVNITFELDERIDKVLNEKCSAYTVELGTEVNEFACVVADAVIKTLQPVSELLTPLGIDLDEWSMATYYLFDESGEFKLASHMYCSFYPPDEDEEEGDCEEEEFEPSTQYEYGTEDDYQGKPLEFGATSAALQPEEEQEEDWLDDDSQQTVGQQDGSEDNQTTTIQTIVEVQPQLEMELTPVVQTIEVNSFSGYLKLTDNVYIKNADIVEEAKKVKPTVVVNAANVYLKHGGGVAGALNKATNNAMQVESDDYIATNGPLKVGGSCVLSGHNLAKHCLHVVGPNVNKGEDIQLLKSAYENFNQHEVLLAPLLSAGIFGADPIHSLRVCVDTVRTNVYLAVFDKNLYDKLVSSFLEMKSEKQVEQKIAEIPKEEVKPFITESKPSVEQRKQDDKKIKACVEEVTTTLEETKFLTENLLLYIDINGNLHPDSATLVSDIDITFLKKDAPYIVGDVVQEGVLTAVVIPTKKAGGTTEMLAKALRKVPTDNYITTYPGQGLNGYTVEEAKTVLKKCKSAFYILPSIISNEKQEILGTVSWNLREMLAHAEETRKLMPVCVETKAIVSTIQRKYKGIKIQEGVVDYGARFYFYTSKTTVASLINTLNDLNETLVTMPLGYVTHGLNLEEAARYMRSLKVPATVSVSSPDAVTAYNGYLTSSSKTPEEHFIETISLAGSYKDWSYSGQSTQLGIEFLKRGDKSVYYTSNPTTFHLDGEVITFDNLKTLLSLREVRTIKVFTTVDNINLHTQVVDMSMTYGQQFGPTYLDGADVTKIKPHNSHEGKTFYVLPNDDTLRVEAFEYYHTTDPSFLGRYMSALNHTKKWKYPQVNGLTSIKWADNNCYLATALLTLQQIELKFNPPALQDAYYRARAGEAANFCALILAYCNKTVGELGDVRETMSYLFQHANLDSCKRVLNVVCKTCGQQQTILKGVEAVMYMGTLSYEQFKKGVQIPCTCGKQATKYLVQQESPFVMMSAPPAQYELKHGTFTCASEYTGNYQCGHYKHITSKETLYCIDGALLTKSSEYKGPITDVFYKENSYTTTIKPVTYKLDGVVCTEIDPKLDNYYKKDNSYFTEQPIDLVPNQPYPNASFDNFKFVCDNIKFADDLNQLTGYKKPASRELKVTFFPDLNGDVVAIDYKHYTPSFKKGAKLLHKPIVWHVNNATNKATYKPNTWCIRCLWSTKPVETSNSFDVLKSEDAQGMDNLACEDLKPVSEEVVENPTIQKDVLECNVKTTEVVGDIILKPANNSLKITEEVGHTDLMAAYVDNSSLTIKKPNELSRVLGLKTLATHGLAAVNSVPWDTIANYAKPFLNKVVSTTTNIVTRCLNRVCTNYMPYFFTLLLQLCTFTRSTNSRIKASMPTTIAKNTVKSVGKFCLEASFNYLKSPNFSKLINIIIWFLLLSVCLGSLIYSTAALGVLMSNLGMPSYCTGYREGYLNSTNVTIATYCTGSIPCSVCLSGLDSLDTYPSLETIQITISSFKWDLTAFGLVAEWFLAYILFTRFFYVLGLAAIMQLFFSYFAVHFISNSWLMWLIINLVQMAPISAMVRMYIFFASFYYVWKSYVHVVDGCNSSTCMMCYKRNRATRVECTTIVNGVRRSFYVYANGGKGFCKLHNWNCVNCDTFCAGSTFISDEVARDLSLQFKRPINPTDQSSYIVDSVTVKNGSIHLYFDKAGQKTYERHSLSHFVNLDNLRANNTKGSLPINVIVFDGKSKCEESSAKSASVYYSQLMCQPILLLDQALVSDVGDSAEVAVKMFDAYVNTFSSTFNVPMEKLKTLVATAEAELAKNVSLDNVLSTFISAARQGFVDSDVETKDVVECLKLSHQSDIEVTGDSCNNYMLTYNKVENMTPRDLGACIDCSARHINAQVAKSHNIALIWNVKDFMSLSEQLRKQIRSAAKKNNLPFKLTCATTRQVVNVVTTKIALKGG

SEQ ID NO: 15882 - protein, 1946 aa, Artificial Sequence
  SARS-CoV-2__MT843297.1__non-structural protein 3 (NSP3)
MAPTKVTFGDDTVIEVQGYKSVNITFELDERIDKVLNEKCSAYTVELGTEVNEFACVVADAVIKTLQPVSELLTPLGIDLDEWSMATYYLFDESGEFKLASHMYCSFYPPDEDEEEGDCEEEEFEPSTQYEYGTEDDYQGKHLEFGATSAALQPEEEQEEDWLDDDSQQTVGQQDGSEDNQTTTIQTIVEVQPQLEMELTPVVQTIEVNSFSGYLKLTDNVYIKNADIVEEAKKVKPTVVVNAANVYLKHGGGVAGALNKATNNAMQVESDDYIATNGPLKVGGSCVLSGHNLAKHCLHVVGPNVNKGEDIQLLKSAYENFNQHEVLLAPLLSAGIFGADPIHSLRVCVDTVRTNVYLAVFDKNLYDKLVSSFLEMKSEKQVEQKIAEIPKEEVKPFITESKPSVEQRKQDDKKIKACVEEVTTTLEETKFLTENLLLYIDINGNLHPDSATLVSDIDITFLKKDAPYIVGDVVQEGVLTAVVIPTKKAGGTTEMLAKALRKVPTDNYITTYPGQGLNGYTVEEAKTVLKKCKSAFYILPSIISNEKQEILGTVSWNLREMLAHAEETRKLMPVCVETKAIVSTIQRKYKGIKIQEGVVDYGARFYFYTSKTTVASLINTLNDLNETLVTMPLGYVTHGLNLEEAARYMRSLKVPATVSVSSPDAVTAYNGYLTSSSKTPEEHFIETISLAGSYKDWSYSGQSTQLGIEFLKRGDKSVYYTSNPTTFHLDGEVITFDNLKTLLSLREVRTIKVFTTVDNINLHTQVVDMSMTYGQQFGPTYLDGADVTKIKPHNSHEGKTFYVLPNDDTLRVEAFEYYHTTDPSFLGRYMSALNHTKKWKYPQVNGLTSIKWADNNCYLATALLTLQQIELKFNPPALQDAYYRARAGEAANFCALILAYCNKTVGELGDVRETMSYLFQHANLDSCKRVLNVVCKTCGQQQTTLKGVEAVMYMGTLSYEQFKKGVQIPCTCGKQATKYLVQQESPFVMMSAPPAQYELKHGTFTCASEYTGNYQCGHYKHITSKETLYCIDGALLTKSSEYKGPITDVFYKENSYTTTIKPVTYKLDGVVCTEIDPKLDNYYKKDNSYFTEQPIDLVPNQPYPNASFDNFKFVCDNIKFADDLNQLTGYKKPASRELKVTFFPDLNGDVVAIDYKHYTPSFKKGAKLLHKPIVWHVNNATNKATYKPNTWCIRCLWSTKPVETSNSFDVLKSEDAQGMDNLACEDLKPVSEEVVENPTIQKDVLECNVKTTEVVGDIILKPANNSLKITEEVGHTDLMAAYVDNSSLTIKKPNELSRVLGLKTLATHGLAAVNSVPWDTIANYAKPFLNKVVSTTTNIVTRCLNRVCTNYMPYFFTLLLQLCTFTRSTNSRIKASMPTTIAKNTVKSVGKFCLEASFNYLKSPNFSKLINIIIWFLLLSVCLGSLIYSTAALGVLMSNLGMPSYCTGYREGYLNSTNVTIATYCTGSIPCSVCLSGLDSLDTYPSLETIQITISSFKWDLTAFGLVAEWFLAYILFTRFFYVLGLAAIMQLFFSYFAVHFISNSWLMWLIINLVQMAPISAMVRMYIFFASFYYVWKSYVHVVDGCNSSTCMMCYKRNRATRVECTTIVNGVRRSFYVYANGGKGFCKLHNWNCVNCDTFCAGSTFISDEVARDLSLQFKRPINPTDQSSYIVDSVTVKNGSIHLYFDKAGQKTYERHSLSHFVNLDNLRANNTKGSLPINVIVFDGKSKCEESSAKSASVYYSQLMCQPILLLDQALVSDVGDSAEVAVKMFDAYVNTFSSTFNVPMEKLKTLVATAEAELAKNVSLDNVLSTFISAARQGFVDSDVETKDVVECLKLSHQSDIEVTGDSCNNYMLTYNKVENMTPRDLGACIDCSARHINAQVAKSHNIALIWNVKDFMSLSEQLRKQIRSAAKKNNLPFKLTCATTRQVVNVVTTKIALKGG

SEQ ID NO: 15883 - protein, 1946 aa, Artificial Sequence
  SARS-CoV-2__MT843319.1__non-structural protein 3 (NSP3)
MAPTKVTFGDDTVIEVQGYKSVNITFELDERIDKVLNEKCSAYTVELGTEVNEFACVVADAVIKTLQPVSELLTPLGIDLDEWSMATYYLFDESGEFKLASHMYCSFYPPDEDEEEGDCEEEEFEPSTQYEYGTEDDYQGKPLEFGATSAALQPEEEQEEDWLDDDSQQTVGQQDGSEDNQTTTIQTIVEVQPQLEMELTPVVQTIEVNSFSGYLKLTDNVYIKNADIVEEAKKVKPTVVVNAANVYLKHGGGVAGALNKATNNAMQVESDDYIATNGPLKVGGSCVLSGHNLAKHCLHVVGPNVNKGEDIQLLKSAYENFNQHEVLLAPLLSAGIFGADPIHSLRVCVDTVRTNVYLAVFDKNLYDKLVSSFLEMKSEKQVEQKIAEIPKEEVKPFITESKPSVEQRKQDDKKIKACVEEVTTTLEETKFLTENLLLYIDINGNLHPDSATLVSDIDITFLKKDAPYIVGDVVQEGVLTAVVIPTKKAGGTTEMLAKALRKVPTDNYITTYPGQGLNGYTVEEAKTVLKKCKSAFYILPSIISNEKQEILGTVSWNLREMLAHAEETRKLMPVCVETKAIVSTIQRKYKGIKIQEGVVDYGARFYFYTSKTTVASLINTLNDLNETLVTMPLGYVTHGLNLEEAARYMRSLKVPATVSVSSPDAVTAYNGYLTSSSKTPEEHFIETISLAGSYKDWSYSGQSTQLGIEFLKRGDKSVYYTSNPTTFHLDGEVITFDNLKTLLSLREVRTIKVFTTVDNINLHTQVVDMSMTYGQQFGPTYLDGADVTKIKPHNSHEGKTFYVLPNDDTLRVEAFEYYHTTDPSFLGRYMSALNHTKKWKYPQVNGLTSIKWADNNCYLATALLTLQQIELKFNPPALQDAYYRARAGEAANFCALILAYCNKTVGELGDVRETMSYLFQHANLDSCKRVLNVVCKTCGQQQTTLKGVEAVMYMGTLSYEQFKKGVQIPCTCGKQATKYLVQQESPFVMMSAPPAQYELKHGTFTCASEYTGNYQCGHYKHITSKETLYCIDGALLTKSSEYKGPITDVFYKENSYTTTIKPVTYKLDGVVCTEIDPKLDNYYKKDNSYFTEQPIDLVPNQPYPNASFDNFKFVCDNIKFADDLNQLTGYKKPASRELKVTFFPDLNGDVVAIDYKHYTPSFKKGAKLLHKPIVWHVNNATNKATYKPNTWCIRCLWSTKPVETSNSFDVLKSEDAQGMDNLACEDLKPVSEEVVENPTIQKDVLECNVKTTEVVGDIILKPANNSLKITEEVGHTDLMAAYVDNSSLTIKKPNELSRVLGLKTLATHGLAAVNSVPWDTIANYAKPFLNKVVSTTTNIVTRCLNRVCTNYMPYFFTLLLQLCTFTRSTNSRIKASMPTTIAKNTVKSVGKFCLEASFNYLKSPNFSKLINIIIWFLLLSVCLGSLIYSTAALGVLMSNLGMPSYCTGYREGYLNSTNVTIATYCTGSIPCSVCLSGLDSLDTYPSLETIQITISSFKWDLTAFGLVAEWFLAYILFTRFFYVLGLAAIMQLFFSYFAVHFISNSWLMWLIINLVQMAPISAMVRMYIFFASFYYVWKSYVHVVDGCNSSTCMMCYKRNRATRVECTTIVNGVRRSFYVYANGGKGFCKLHNWNCVNCDTFCAGSTFISDEVARDLSLQFKRPINPTDQSSYIVDSVTVKNGSIHLYFDKAGQKTYERHSLSHFVNLDNLRANNTKGSLPINVIVFDGKSKCEESSAKSASVYYSQLMCQPILLLDQALVSDVGDSAEVAVKMFDAYVNTFSSTFNVPMEKLKTLVATAEAELAKNVSLDNVLSTFISAARQGFVDSDVETKDVVECLKLSHQSDIEVTGDSCNNYMLTYNKVENMTPRDLGACIDCSARHINAQVAKSHNIALIWNVKDFMSLSEQLRKKIRSAAKKNNLPFKLTCATTRQVVNVVTTKIALKGG

SEQ ID NO: 15884 - protein, 1946 aa, Artificial Sequence
  SARS-CoV-2__MT843738.1__non-structural protein 3 (NSP3)
MAPTKVTFGDDTVIEVQGYKSVNITFELDERIDKVLNEKCSAYTVELGTEVNEFACVVADAVIKTLQPVFELLTPLGIDLDEWSMATYYLFDESGEFKLASHMYCSFYPPDEDEEEGDCEEEEFEPSTQYEYGTEDDYQGKPLEFGATSAALQPEEEQEEDWLDDDSQQTVGQQDGSEDNQTTTIQTIVEVQPQLEMELTPVVQTIEVNSFSGYLKLTDNVYIKNADIVEEAKKVKPTVVVNAANVYLKHGGGVAGALNKATNNAMQVESDDYIATNGPLKVGGSCVLSGHNLAKHCLHVVGPNVNKGEDIQLLKSAYENFNQHEVLLAPLLSAGIFGADPIHSLRVCVDTVRTNVYLAVFDKNLYDKLVSSFLEMKSEKQVEQKIAEIPKEEVKPFITESKPSVEQRKQDDKKIKACVEEVTTTLEETKFLTENLLLYIDINGNLHPDSATLVSDIDITFLKKDAPYIVGDVVQEGVLTAVVIPTKKAGGTTEMLAKALRKVPTDNYITTYPGQGLNGYTVEEAKTVLKKCKSAFYILPSIISNEKQEILGTVSWNLREMLAHAEETRKLMPVCVETKAIVSTIQRKYKGIKIQEGVVDYGARFYFYTSKTTVASLINTLNDLNETLVTMPLGYVTHGLNLEEAARYMRSLKVPATVSVSSPDAVTAYNGYLTSSSKTPEEHFIETISLAGSYKDWSYSGQSTQLGIEFLKRGDKSVYYTSNPTTFHLDGEVITFDNLKTLLSLREVRTIKVFTTVDNINLHTQVVDMSMTYGQQFGPTYLDGADVTKIKPHNSHEGKTFYVLPNDDTLRVEAFEYYHTTDPSFLGRYMSALNHTKKWKYPQVNGLTSIKWADNNCYLATALLTLQQIELKFNPPALQDAYYRARAGEAANFCALILAYCNKTVGELGDVRETMSYLFQHANLDSCKRVLNVVCKTCGQQQTTLKGVEAVMYMGTLSYEQFKKGVQIPCTCGKQATKYLVQQESPFVMMSAPPAQYELKHGTFTCASEYTGNYQCGHYKHITSKETLYCIDGALLTKSSEYKGPITDVFYKENSYTTTIKPVTYKLDGVVCTEIDPKLDNYYKKDNSYFTEQPIDLVPNQPYPNASFDNFKFVCDNIKFADDLNQLTGYKKPASRELKVTFFPDLNGDVVAIDYKHYTPSFKKGAKLLHKPIVWHVNNATNKATYKPNTWCIRCLWSTKPVETSNSFDVLKSEDAQGMDNLACEDLKPVSEEVVENPTIQKDVLECNVKTTEVVGDIILKPANNSLKITEEVGHTDLMAAYVDNSSLTIKKPNELSRVLGLKTLATHGLAAVNSVPWDTIANYAKPFLNKVVSTTTNIVTRCLNRVCTNYMPYFFTLLLQLCTFTRSTNSRIKASMPTTIAKNTVKSVGKFCLEASFNYLKSPNFSKLINIIIWFLLLSVCLGSLIYSTAALGVLMSNLGMPSYCTGYREGYLNSTNVTIATYCTGSIPCSVCLSGLDSLDTYPSLETIQITISSFKWDLTAFGLVAEWFLAYILFTRFFYVLGLAAIMQLFFSYFAVHFISNSWLMWLIINLVQMAPISAMVRMYIFFASFYYVWKSYVHVVDGCNSSTCMMCYKRNRATRVECTTIVNGVRRSFYVYANGGKGFCKLHNWNCVNCDTFCAGSTFISDEVARDLSLQFKRPINPTDQSSYIVDSVTVKNGSIHLYFDKAGQKTYERHSLSHFVNLDNLRANNTKGSLPINVIVFDGKSKCEESSAKSASVYYSQLMCQPILLLDQALVSDVGDSAEVAVKMFDAYVNTFSSTFNVPMEKLKTLVATAEAELAKNVSLDNVLSTFISAARQGFVDSDVETKDVVECLKLSHQSDIEVTGDSCNNYMLTYNKVENMTPRDLGACIDCSARHINAQVAKSHNIALIWNVKDFMSLSEQLRKQIRSAAKKNNLPFKLTCATTRQVVNVVTTKIALKGG

SEQ ID NO: 15885 - protein, 1946 aa, Artificial Sequence
  SARS-CoV-2__MT844021.1__non-structural protein 3 (NSP3)
MAPTKVTFGDDTVIEVQGYKSVNITFELDERIDKVLNEKCSAYTVELGTEVNEFACVVADAVIKTLQPVSELLTPLGIDLDEWSMATYYLFDESGEFKLASHMYCSFYPPDEDEEEGDCEEEEFEPSTQYEYGTEDDYQGKPLEFGATSAALQPEEEQEEDWLDDDSQQTVGQQDGSEDNQTTTIQTIVEVQPQLEMELTPVVQTIEVNSFSGYLKLTDNVYIKNADIVEEAKKVKPTVVVNAANVYLKHGGGVAGALNKATNNAMQVESDDYIATNGPLKVGGSCVLSGHNLAKHCLHVVGPNVNKGEDIQLLKSAYENFNQHEVLLAPLLSAGIFGADPIHSLRVCVDTVRTNVYLAVFDKNLYDKLVSSFLEMKSEKQVEQKIAEIPKEEVKPFITESKPSVEQRKQDDKKIKACVEEVTTTLEETKFLTENLLLYIDINGNLHPDSATLVSDIDITFLKKDAPYIVGDVVQEGVLTAVVIPTKKAGGTTEMLAKALRKVPTDNYITTYPGQGLNGYTVEEAKTVLKKCKSAFYILPSIISNEKQEILGTVSWNLREMLAHAEETRKLMPVCVETKAIVSTIQRKYKGIKIQEGVVDYGARFYFYTSKTTVASLINTLNDLNETLVTMPLGYVTHGLNLEEAARYMRSLKVPATVSVSSPDAVTAYNGYLTSSSKTPEEHFIETISLAGSYKDWSYSGQSTQLGIEFLKRGDKSVYYTSNPTTFHLDGEVITFDNLKTLLSLREVRTIKVFTTVDNINLHTQVVDMSMTYGQQFGPTYLDGADVTKIKPHNSHEGKTFYVLPNDDTLRVEAFEYYHTTDLSFLGRYMSALNHTKKWKYPQVNGLTSIKWADNNCYLATALLTLQQIELKFNPPALQDAYYRARAGEAANFCALILAYCNKTVGELGDVRETMSYLFQHANLDSCKRVLNVVCKTCGQQQTTLKGVEAVMYMGTLSYEQFKKGVQIPCTCGKQATKYLVQQESPFVMMSAPPAQYELKHGTFTCASEYTGNYQCGHYKHITSKETLYCIDGALLTKSSEYKGPITDVFYKENSYTTTIKPVTYKLDGVVCTEIDPKLDNYYKKDNSYFTEQPIDLVPNQPYPNASFDNFKFVCDNIKFADDLNQLTGYKKPASRELKVTFFPDLNGDVVAIDYKHYTPSFKKGAKLLHKPIVWHVNNATNKATYKPNTWCIRCLWSTKPVETSNSFDVLKSEDAQGMDNLACEDLKPVSEEVVENPTIQKDVLECNVKTTEVVGDIILKPANNSLKITEEVGHTDLMAAYVDNSSLTIKKPNELSRVLGLKTLATHGLAAVNSVPWDTIANYAKPFLNKVVSTTTNIVTRCLNRVCTNYMPYFFTLLLQLCTFTRSTNSRIKASMPTTIAKNTVKSVGKFCLEASFNYLKSPNFSKLINIIIWFLLLSVCLGSLIYSTAALGVLMSNLGMPSYCTGYREGYLNSTNVTIATYCTGSIPCSVCLSGLDSLDTYPSLETIQITISSFKWDLTAFGLVAEWFLAYILFTRFFYVLGLAAIMQLFFSYFAVHFISNSWLMWLIINLVQMAPISAMVRMYIFFASFYYVWKSYVHVVDGCNSSTCMMCYKRNRATRVECTTIVNGVRRSFYVYANGGKGFCKLHNWNCVNCDTFCAGSTFISDEVARDLSLQFKRPINPTDQSSYIVDSVTVKNGSIHLYFDKAGQKTYERHSLSHFVNLDNLRANNTKGSLPINVIVFDGKSKCEESSAKSASVYYSQLMCQPILLLDQALVSDVGDSAEVAVKMFDAYVNTFSSTFNVPMEKLKTLVATAEAELAKNVSLDNVLSTFISAARQGFVDSDVETKDVVECLKLSHQSDIEVTGDSCNNYMLTYNKVENMTPRDLGACIDCSARHINAQVAKSHNIALIWNVKDFMSLSEQLRKQIRSAAKKNNLPFKLTCATTRQVVNVVTTKIALKGG

SEQ ID NO: 15886 - protein, 1946 aa, Artificial Sequence
  SARS-CoV-2__MT844044.1__non-structural protein 3 (NSP3)
MAPTKVTFGDDTVIEVQGYKSVNITFELDERIDKVLNEKCSAYTVELGTEVNEFACVVADAVIKTLQPVSELLTPLGIDLDEWSMATYYLFDESGEFKLASHMYCSFYPPDEDEEEGDCEEEEFEPSTQYEYGTEDDYQGKPLEFGATSAALQPEEEQEEDWLDDDSQQTVGQQDGSEDNQTTTIQTIVEVQPQLEMELTPVVQTIEVNSFSGYLKLTDNVYIKNADIVEEAKKVKPTVVVNAANVYLKHGGGVAGALNKATNNAMQVESDDYIATNGPLKVGGSCVLSGHNLAKHCLHVVGPNVNKGEDIQLLKSAYENFNQHEVLLAPLLSAGIFGADPIHSLRVCVDTVRTNVYLAVFDKNLYDKLVSSFLEMKSEKQVEQKIAEIPKEEVKPFITESKPSVEQRKQDDKKIKACVEEVTTTLEETKFLTENLLLYIDINGNLHPDSATLVSDIDITFLKKDAPYIVGDVVQEGVLTAVVIPTKKAGGTTGMLAKALRKVPTDNYITTYPGQGLNGYTVEEAKTVLKKCKSAFYILPSIISNEKQEILGTVSWNLREMLAHAEETRKLMPVCVETKAIVSTIQRKYKGIKIQEGVVDYGARFYFYTSKTTVASLINTLNDLNETLVTMPLGYVTHGLNLEEAARYMRSLKVPATVSVSSPDAVTAYNGYLTSSSKTPEEHFIETISLAGSYKDWSYSGQSTQLGIEFLKRGDKSVYYTSNPTTFHLDGEVITFDNLKTLLSLREVRTIKVFTTVDNINLHTQVVDMSMTYGQQFGPTYLDGADVTKIKPHNSHEGKTFYVLPNDDTLRVEAFEYYHTTDPSFLGRYMSALNHTKKWKYPQVNGLTSIKWADNNCYLATALLTLQQIELKFNPPALQDAYYRARAGEAANFCALILAYCNKTVGELGDVRETMSYLFQHANLDSCKRVLNVVCKTCGQQQTTLKGVEAVMYMGTLSYEQFKKGVQIPCTCGKQATKYLVQQESPFVMMSAPPAQYELKHGTFTCASEYTGNYQCGHYKHITSKETLYCIDGALLTKSSEYKGPITDVFYKENSYTTTIKPVTYKLDGVVCTEIDPKLDNYYKKDNSYFTEQPIDLVPNQPYPNASFDNFKFVCDNIKFADDLNQLTGYKKPASRELKVTFFPDLNGDVVAIDYKHYTPSFKKGAKLLHKPIVWHVNNATNKATYKPNTWCIRCLWSTKPVETSNSFDVLKSEDAQGMDNLACEDLKPVSEEVVENPTIQKDVLECNVKTTEVVGDIILKPANNSLKITEEVGHTDLMAAYVDNSSLTIKKPNELSRVLGLKTLATHGLAAVNSVPWDTIANYAKPFLNKVVSTTTNIVTRCLNRVCTNYMPYFFTLLLQLCTFTRSTNSRIKASMPTTIAKNTVKSVGKFCLEASFNYLKSPNFSKLINIIIWFLLLSVCLGSLIYSTAALGVLMSNLGMPSYCTGYREGYLNSTNVTIATYCTGSIPCSVCLSGLDSLDTYPSLETIQITISSFKWDLTAFGLVAEWFLAYILFTRFFYVLGLAAIMQLFFSYFAVHFISNSWLMWLIINLVQMAPISAMVRMYIFFASFYYVWKSYVHVVDGCNSSTCMMCYKRNRATRVECTTIVNGVRRSFYVYANGGKGFCKLHNWNCVNCDTFCAGSTFISDEVARDLSLQFKRPINPTDQSSYIVDSVTVKNGSIHLYFDKAGQKTYERHSLSHFVNLDNLRANNTKGSLPINVIVFDGKSKCEESSAKSASVYYSQLMCQPILLLDQALVSDVGDSAEVAVKMFDAYVNTFSSTFNVPMEKLKTLVATAEAELAKNVSLDNVLSTFISAARQGFVDSDVETKDVVECLKLSHQSDIEVTGDSCNNYMLTYNKVENMTPRDLGACIDCSARHINAQVAKSHNIALIWNVKDFMSLSEQLRKQIRSAAKKNNLPFKLTCATTRQVVNVVTTKIALKGG

SEQ ID NO: 15887 - protein, 1946 aa, Artificial Sequence
  SARS-CoV-2__MT831129.1__non-structural protein 3 (NSP3)
MAPTKVTFGDDTVIEVQGYKSVNITFELDERIDKVLNEKCSAYTVELGTEVNEFACVVADAVIKTLQPVSELLTPLGIDLDEWSMATYYLFDESGEFKLASHMYCSFYPPDEDEEEGDCEEEEFEPSTQYEYGTEDDYQGKPLEFGATSAALQPEEEQEEDWLDDDSQQTVGQQDGSEDNQTTTIQTIVEVQPQLEMELTPVVQTIEVNSFSGYLKLTDNVYIKNADIVEEAKKVKPTVVVNAANVYLKHGGGVAGALNKATNNAMQVESDDYIATNGPLKVGGSCVLSGHNLAKHCLHVVGPNVNKGEDIQLLKSAYENFNQHEVLLAPLLSAGIFGADPIHSLRVCVDTVRTNVYLAVFDKNLYDKLVSSFLEMKSEKQVEQKIAEIPKEEVKPFITESKPSVEQRKQDDKKIKACVEEVTTTLEETKFLTENLLLYIDINGNLHPDSATLVSDIDITFLKKDAPYIVGDVVQEGVLTAVVIPTKKAGGTTEMLAKALRKVPTDNYITTYPGQGLNGYTVEDAKTVLKKCKSAFYILPSIISNEKQEILGTVSWNLREMLAHAEETRKLMPVCVETKAIVSTIQRKYKGIKIQEGVVDYGARFYFYTSKTTVASLINTLNDLNETLVTMPLGYVTHGLNLEEAARYMRSLKVPATVSVSSPDAVTAYNGYLTSSSKTPEEHFIETISLAGSYKDWSYSGQSTQLGIEFLKRGDKSVYYTSNPTTFHLDGEVITFDNLKTLLSLREVRTIKVFTTVDNINLHTQVVDMSMTYGQQFGPTYLDGADVTKIKPHNSHEGKTFYVLPNDDTLRVEAFEYYHTTDPSFLGRYMSALNHTKKWKYPQVNGLTSIKWADNNCYLATALLTLQQIELKFNPPALQDAYYRARAGEAANFCALILAYCNKTVGELGDVRETMSYLFQHANLDSCKRVLNVVCKTCGQQQTTLKGVEAVMYMGTLSYEQFKKGVQIPCTCGKQATKYLVQQESPFVMMSAPPAQYELKHGTFTCASEYTGNYQCGHYKHITSKETLYCIDGALLTKSSEYKGPITDVFYKENSYTTTIKPVTYKLDGVVCTEIDPKLDNYYKKDNSYFTEQPIDLVPNQPYPNASFDNFKFVCDNIKFADDLNQLTGYKKPASRELKVTFFPDLNGDVVAIDYKHYTPSFKKGAKLLHKPIVWHVNNATNKATYKPNTWCIRCLWSTKPVETSNSFDVLKSEDAQGMDNLACEDLKPVSEEVVENPTIQKDVLECNVKTTEVVGDIILKPANNSLKITEEVGHTDLMAAYVDNSSLTIKKPNELSRVLGLKTLATHGLAAVNSVPWDTIANYAKPFLNKVVSTTTNIVTRCLNRVCTNYMPYFFTLLLQLCTFTRSTNSRIKASMPTTIAKNTVKSVGKFCLEASFNYLKSPNFSKLINIIIWFLLLSVCLGSLIYSTAALGVLMSNLGMPSYCTGYREGYLNSTNVTIATYCTGSIPCSVCLSGLDSLDTYPSLETIQITISSFKWDLTAFGLVAEWFLAYILFTRFFYVLGLAAIMQLFFSYFAVHFISNSWLMWLIINLVQMAPISAMVRMYIFFASFYYVWKSYVHVVDGCNSSTCMMCYKRNRATRVECTTIVNGVRRSFYVYANGGKGFCKLHNWNCVNCDTFCAGSTFISDEVARDLSLQFKRPINPTDQSSYIVDSVTVKNGSIHLYFDKAGQKTYERHSLSHFVNLDNLRANNTKGSLPINVIVFDGKSKCEESSAKSASVYYSQLMCQPILLLDQALVSDVGDSAEVAVKMFDAYVNTFSSTFNVPMEKLKTLVATAEAELAKNVSLDNVLSTFISAARQGFVDSDVETKDVVECLKLSHQSDIEVTGDSCNNYMLTYNKVENMTPRDLGACIDCSARHINAQVAKSHNIALIWNVKDFMSLSEQLRKQIRSAAKKNNLPFKLTCATTRQVVNVVTTKIALKGG

SEQ ID NO: 15888 - protein, 1946 aa, Artificial Sequence
  SARS-CoV-2__MT831131.1__non-structural protein 3 (NSP3)
MAPTKVTFGDDTVIEVQGYKSVNITFELDERIDKVLNEKCSAYTVELGTEVNEFACVVADAVIKTLQPVSELLTPLGIDLDEWSMATYYLFDESGEFKLASHMYCSFYPPDEDEEEGDCEEEEFEPSTQYEYGTEDDYQGKPLEFGATSAALQPEEEQEEDWLDDDSQQTVGQQDGSEDNQTTTIQTIVEVQPQLEMELTPVVQTIEVNSFSGYLKLTDNVYIKNADIVEEAKKVKPTVVVNAANVYLKHGGGVAGALNKATNNAMQVESDDYIATNGPLKVGGSCVLSGHNLAKHCLHVVGPNVNKGEDIQLLKSAYENFNQHEVLLAPLLSAGIFGADPIHSLRVCVDTVRTNVYLAVFDKNLYDKLVSSFLEMKSEKQVEQKIAEIPKEEVKPFITESKPSVEQRKQDDKKIKACVEEVTTTLEETKFLTENLLLYIDINGNLHPDSATLVSDIDITFLKKDAPYIVGDVVQEGVLTAVVIPTKKAGGTTEMLAKALRKVPTDNYITTYPGQGLNGYTVEEAKTVLKKCKSAFYILPSIISNEKQEILGTVSWNLREMLAHAEETRKLMPVCVETKAIVSTIQRKYKGIKIQEGVVDYGARFYFYTSKTTVASLINTLNDLNETLVTMPLGYVTHGLNLEEAARYMRSLKVPATVSVSSPDAVTAYNGYLTSSSKTPEEHFIETISLAGSYKDWSYSGQSTQLGIEFLKRGDKSVYYTSNPTTFHLDGEVITFDNLKTLLSLREVRTIKVFTTVDNINLHTQVVDMSMTYGQQFGPTYLDGADVTKIKPHNSHEGKTFYVLPNDDTLRVEAFEYYHTTDPSFLGRYMSALNHTKKWKYPQVNGLTSIKWADNNCYLATALLTLQQIELKFNPPALQDAYYRARAGEAANFCALILAYCNKTVGELGDVRETMSYLFQHANLDSCKRVLNVVCKTCGQQQTTLKGVEAVMYMGTLSYEQFKKGVQIPCTCGKQATKYLVQQESPFVMMSAPPAQYELKHGTFTCASEYTGNYQCGHYKHITSKETLYCIDGALLTKSSEYKGPITDVFYKENSYTTTIKPVTYKLDGVVCTEIDPKLDNYYKKDNSYFTEQPIDLVPNQPYPNASFDNFKFVCDNIKFADDLNQLTGYKKPASRELKVTFFPDLNGDVVAIDYKHYTPSFKKGAKLLHKPIVWHVNNATNKATYKPNTWCIRCLWSTKPVETSNSFDVLKSEDAQGMDNLACEDLKPVSEEVVENPTIQKDVLECNVKTTEVVGDIILKPANNSLKITEEVGHTDLMAAYVDNSSLTIKKPNELSRVLGLKTLATHGLAAVNSVPWDTIANYAKPFLNKVVSTTTNIVTRCLNRVCTNYMPYFFTLLLQLCTFTRSTNSRIKASMPTTIAKNTVKSVGKFCLEASFNYLKSPNFSKLINIIIWFLLLSVCLGSLIYSTAALGVLMSNLGMPSYCTGYREGYLNSTNVTIATYCTGSIPCSVCLSGLDSLDTYPSLETIQITISSFKWDLTAFGLVAEWFLAYILFTRFFYVLGLAAIMQLFFSYFAVHFISNSWLMWLIINLVQMAPISAMVRMYIFFASFYYVWKSYVHVVDGCNSSTCMMCYKRNRATRVECTTIVNGVRRSFYVYANGGKGFCKLHNWNCVNCDTFCAGSTFISDEVARDLSLQFKRPINPTDQSSYIVDSVTVKNGSIHLYFDKAGQKTYERHSLSHFVNLDNLRANNTKGSLPINVIVFDGKSKCEESSAKSASVYYSQLMCQPILLLDQALVSDVGDSAEVAVKMFDAYVNTFSSTFNIPMEKLKTLVATAEAELAKNVSLDNVLSTFISAARQGFVDSDVETKDVVECLKLSHQSDIEVTGDSCNNYMLTYNKVENMTPRDLGACIDCSARHINAQVAKSHNIALIWNVKDFMSLSEQLRKQIRSAAKKNNLPFKLTCATTRQVVNVVTTKIALKGG

SEQ ID NO: 15889 - protein, 1946 aa, Artificial Sequence
  SARS-CoV-2__MT831162.1__non-structural protein 3 (NSP3)
MAPTKVTFGDDTVIEVQGYKSVNITFELDERIDKVLNEKCSAYTVELGTEVNEFACVVADAVIKTLQPVSELLTPLGIDLDEWSMATYYLFDESGEFKLASHMYCSFYPPDEDEEEGDCEEEEFEPSTQYEYGTEDDYQGKPLEFGATSAALQPEEEQEEDWLDDDSQQTVGQQDGSEDNQTTTIQTIVEVQPQLEMELTPVVQTIEVNSFSGYLKLTDNVYIKNADIVEEAKKVKPTVVVNAANVYLKHGGGVAGALNKATNNAMQVESDDYIATNGPLKVGGSCVLSGHNLAKHCLHVVGPNVNKGEDIQLLKSAYENFNQHEVLLAPLLSAGIFGADPIHSLRVCVDTVRTNVYLAVFDKNLYDKLVSSFLEMKSEKQVEQKIAEIPKEEVKPFITESKPSVEQRKQDDKKIKACVEEVTTTLEETKFLTENLLLYIDINGNLHPDSATLVSDIDITFLKKDAPYIVGDVVQEGVLTAVVIPTKKAGGTTEMLAKALRKVPTDNYITTYPGQGLNGYTVEEAKTVLKKCKSAFYILPSIISNEKQEILGTVSWNLREMLAHAEETRKLMPVCVETKAIVSTIQRKYKGIKIQEGVVDYGARFYFYTSKTTVASLINTLNDLNETLVTMPLGYVTHGLNLEEAARYMRSLKVPATVSVSSPDAVTAYNGYLTSSSKTPEEHFIETISLAGSYKDWSYSGQSTQLGIEFLKRGDKSVYYTSNPTTFHLDGEVITFDNLKTLLSLREVRTIKVFTTVDNINLHTQVVDMSMTYGQQFGPTYLDGADVTKIKPHNSHEGKTFYVLPNDDTLRVEAFEYYHTTDPSFLGRYMSALNHTKKWKYPQVNGLTSIKWADNNCYLATALLTLQQIELKFNPPALQDAYYRARAGEAANFCALILAYCNKTVGELGDVRETMSYLFQHANLDSCKRVLNVVCKTCGQQQTTLKGVEAVMYMGTLSYEQFKKGVQIPCTCGKQATKYLVQQESPFVMMSAPPAQYELKHGTFTCASEYTGNYQCGHYKHITSKETLYCIDGALLTKSSEYKGPITDVFYKENSYTTTIKPVTYKLDGVVCTEIDPKLDNYYKKDNSYFTEQPIDLVPNQPYPNASFDNFKFVCDNIKFADDLNQLTGYKKPASRELKVTFFPDLNGDVVAIDYKHYTPSFKKGAKLLHKPIVWHVNNATNKATYKPNTWCIRCLWSTKPVETSNSFDVLKSEDAQGMDNLACEDLKPVSEEVVENPTIQKDVLECNVKTTEVVGDIILKPANNSLKITEEVGHTDLMAAYVDNSSLTIKKPNELSRVLGLKTLATHGLAAVNSVPWDTIANYAKPFLNKVVSTTTNIVTRCLNRVCTNYMPYFFTLLLQLCTFTRSTNSRIKASMPTTIAKNTVKSVGKFCLEASFNYLKSPNFSKLINIIIWFLLLSVCLGSLIYSTAALGVLMSNLGMPSYCTGYREGYLNSTNVTIATYCTGSIPCSVCLSGLDSLDTYPSLETIQITISSFKWDLTAFGLVAEWFLAYILFTRFFYVLGLAAIMQLFFSYFAVHFISNSWLMWLIINLVQMAPISAMVRMYIFFASFYYVWKSYVHVVDGCNSSTCMMCYKRNRATRVECTTIVNGVRRSFYVYANGGKGFCKLHNWNCVNCDTFCAGSTFISDEVARDLSLQFKRPINPTDQSSYIVDSVTVKNGSIHLYFDKAGQKTYERHSLSHFVNLDNLRANNIKGSLPINVIVFDGKSKCEESSAKSASVYYSQLMCQPILLLDQALVSDVGDSAEVAVKMFDAYVNTFSSTFNVPMEKLKTLVATAEAELAKNVSLDNVLSTFISAARQGFVDSDVETKDVVECLKLSHQSDIEVTGDSCNNYMLTYNKVENMTPRDLGACIDCSARHINAQVAKSHNIALIWNVKDFMSLSEQLRKQIRSAAKKNNLPFKLTCATTRQVVNVVTTKIALKGG

SEQ ID NO: 15890 - protein, 1946 aa, Artificial Sequence
  SARS-CoV-2__MT831168.1__non-structural protein 3 (NSP3)
MAPTKVTFGDDTVIEVQGYKSVNITFELDERIDKVLNEKCSAYTVELGTEVNEFACVVADAVIKTLQPVSELLTPLGIDLDEWSMATYYLFDESGEFKLASHMYCSFYPPDEDEEEGDCEEEEFEPSTQYEYGTEDDYQGKPLEFGATSAALQPEEEQEEDWLDDDSQQTVGQQDGSEDNQTTTIQTIVEVQPQLEMELTPVVQTIEVNSFSGYLKLTDNVYIKNADIVEEAKKVKPTVVVNAANVYLKHGGGVAGALNKATNNAMQVESDDYIATNGPLKVGGSCVLSGHNLAKHCLHVVGPNVNKGEDIQLLKSAYENFNQHEVLLAPLLSAGIFGADPIHSLRVCVDIVRTNVYLAVFDKNLYDKLVSSFLEMKSEKQVEQKIAEIPKEEVKPFITESKPSVEQRKQDDKKIKACVEEVTTTLEETKFLTENLLLYIDINGNLHPDSATLVSDIDITFLKKDAPYIVGDVVQEGVLTAVVIPTKKAGGTTEMLAKALRKVPTDNYITTYPGQGLNGYTVEEAKTVLKKCKSAFYILPSIISNEKQEILGTVSWNLREMLAHAEETRKLMPVCVETKAIVSTIQRKYKGIKIQEGVVDYGARFYFYTSKTTVASLINTLNDLNETLVTMPLGYVTHGLNLEEAARYMRSLKVPATVSVSSPDAVTAYNGYLTSSSKTPEEHFIETISLAGSYKDWSYSGQSTQLGIEFLKRGDKSVYYTSNPTTFHLDGEVITFDNLKTLLSLREVRTIKVFTTVDNINLHTQVVDMSMTYGQQFGPTYLDGADVTKIKPHNSHEGKTFYVLPNDDTLRVEAFEYYHTTDPSFLGRYMSALNHTKKWKYPQVNGLTSIKWADNNCYLATALLTLQQIELKFNPPALQDAYYRARAGEAANFCALILAYCNKTVGELGDVRETMSYLFQHANLDSCKRVLNVVCKTCGQQQTTLKGVEAVMYMGTLSYEQFKKGVQIPCTCGKQATKYLVQQESPFVMMSAPPAQYELKHGTFTCASEYTGNYQCGHYKHITSKETLYCIDGALLTKSSEYKGPITDVFYKENSYTTTIKPVTYKLDGVVCTEIDPKLDNYYKKDNSYFTEQPIDLVPNQPYPNASFDNFKFVCDNIKFADDLNQLTGYKKPASRELKVTFFPDLNGDVVAIDYKHYTPSFKKGAKLLHKPIVWHVNNATNKATYKPNTWCIRCLWSTKPVETSNSFDVLKSEDAQGMDNLACEDLKPVSEEVVENPTIQKDVLECNVKTTEVVGDIILKPANNSLKITEEVGHTDLMAAYVDNSSLTIKKPNELSRVLGLKTLATHGLAAVNSVPWDTIANYAKPFLNKVVSTTTNIVTRCLNRVCTNYMPYFFTLLLQLCTFTRSTNSRIKASMPTTIAKNTVKSVGKFCLEASFNYLKSPNFSKLINIIIWFLLLSVCLGSLIYSTAALGVLMSNLGMPSYCTGYREGYLNSTNVTIATYCTGSIPCSVCLSGLDSLDTYPSLETIQITISSFKWDLTAFGLVAEWFLAYILFTRFFYVLGLAAIMQLFFSYFAVHFISNSWLMWLIINLVQMAPISAMVRMYIFFASFYYVWKSYVHVVDGCNSSTCMMCYKRNRATRVECTTIVNGVRRSFYVYANGGKGFCKLHNWNCVNCDTFCAGSTFISDEVARDLSLQFKRPINPTDQSSYIVDSVTVKNGSIHLYFDKAGQKTYERHSLSHFVNLDNLRANNTKGSLPINVIVFDGKSKCEESSAKSASVYYSQLMCQPILLLDQALVSDVGDSAEVAVKMFDAYVNTFSSTFNVPMEKLKTLVATAEAELAKNVSLDNVLSTFISAARQGFVDSDVETKDVVECLKLSHQSDIEVTGDSCNNYMLTYNKVENMTPRDLGACIDCSARHINAQVAKSHNIALIWNVKDFMSLSEQLRKQIRSAAKKNNLPFKLTCATTRQVVNVVTTKIALKGG

SEQ ID NO: 15891 - protein, 1946 aa, Artificial Sequence
  SARS-CoV-2__MT831173.1__non-structural protein 3 (NSP3)
MAPTKVTFGDDTVIEVQGYKSVNITFELDERIDKVLNEKCSAYTVELGTEVNEFACVVADAVIKTLQPVSELLTPLGIDLDEWSMATYYLFDESGEFKLASHMYCSFYPPDEDEEEGDCEEEEFEPSTQYEYGTEDDYQGKPLEFGATSAALQPEEEQEEDWLDDDSQQTVGQQDGSEDNQTTTIQTIVEVQPQLEMELTPVVQTIEVNSFSGYLKLTDNVYIKNADIVEEAKKVKPTVVVNAANVYLKHGGGVAGALNKATNNAMQVESDDYIATNGPLKVGGSCVLSGHNLAKHCLHVVGPNVNKGEDIQLLKSAYENFNQHEVLLAPLLSAGIFGADPIHSLRVCVDTVRTNVYLAVFDKNLYDKLVSSFLEMKSEKQVEQKIAEIPKEEVKPFITESKPSVEQRKQDDKKIKACVEEVTTTLEETKFLTENLLLYIDINGNLHPDSATLVSDIDITFLKKDAPYIVGDVVQEGVLTAVVIPTKKAGGTTEMLAKALRKVPTDNYITTYPGQGLNGYTVEEAKTVLKKCKSAFYILPSIISNEKQEILGTVSWNLREMLAHAEETRKLMPVCVETKAIVSTIQRKYKGIKIQEGVVDYGARFYFYTSKTTVASLINTLNDLNETLVTMPLGYVTHGLNLEEAARYMRSLKVPATVSVSSPDAVTAYNGYLTSSSKTPEEHFIETISLAGSYKDWSYSGQSTQLGIEFLKRGDKSVYYTSNPTTFHLDGEVITFDNLKTLLSLREVRTIKVFTTVDNINLHTQVVDMSMTYGQQFGPTYLDGADVTKIKPHNSHEGKTFYVLPNDDTLRVEAFEYYHTTDPSFLGRYMSALNHTKKWKYPQVNGLTSIKWADNNCYLATALLTLQQIELKFNPPALQDAYYRARAGEAANFCALILAYCNKTVGELGDVRETMSYLFQHANLDSCKRVLNVVCKTCGQQQTTLKGVEAVMYMGTLSYEQFKKGVQIPCTCGKQATKYLVQQESPFVMMSAPPAQYELKHGTFTCASEYTGNYQCGHYKHITSKETLYCIDGALLTKSSEYKGPITDVFYKENSYTTTIKPVTYKLDGVVCTEIDPKLDNYYKKDNSYFTEQPIDLVPNQPYPNASFDNFKFVCDNIKFADDLNQLTGYKKPASRELKVTFFPDLNGDVVAIDYKHYTPSFKKGAKLLHKPIVWHVNNATNKATYKPNTWCIRCLWSTKPVETSNSFDVLKSEDAQGMDNLACEDLKPVSEEVVENPTIQKDVLECNVKTTEVVGDIILKPANNSLKITEEVGHTDLMAAYVDNSSLTIKKPNELSRVLGLKTLATHGLAAVNSVPWDTIANYAKPFLNKVVSTTTNIVTRCLNRVCTNYMPYFFTLLLQLCTFTRSTNSRIKASMPTTIAKNTVKSVGKFCLEASFNYLKSPNFSKLINIIIWFLLLSVCLGSLIYSTAALGVLMSNLGMPSYCTGYREGYLNSTNVTIATYCTGSIPCSVCLSGLDSLDTYPSLETIQITISSFKWDLTAFGLVAEWFLAYILFTRFFYVLGLAAIMQLFFSYFAVHFISNSWLMWLIINLVQMAPISAMVRMYIFFASFYYVWKSYVHVVDGCNSSTCMMCYKRNRATRVECTTIVNGVRRSFYVYANGGKGFCKLHNWNCVNCDTFCAGSTFISDEVARDLSLQFKRPINPTDQSSYIVDSVTVKNGSIHLYFDKAGQKTYERHSLSHFVNLDNLRANNTKGSLPINVIVFDGKSKCEESSAKSASVYYSQLMCQPILLLDQALVSDVGDSAEVAVKMFDAYVNTFSSTFNVPMEKLKTLVATAEAELAKNVSLDNVLSTFISAARQGFVDSDVETKDVVECLKLSHQSDIEVTGDSCNNYMLTYNKVENMTPRDLGVCIDCSARHINAQVAKSHNIALIWNVKDFMSLSEQLRKQIRSAAKKNNLPFKLTCATTRQVVNVVTTKIALKGG

SEQ ID NO: 15892 - protein, 1946 aa, Artificial Sequence
  SARS-CoV-2__MT831177.1__non-structural protein 3 (NSP3)
MAPTKVTFGDDTVIEVQGYKSVNITFELDERIDKVLNEKCSAYTVELGTEVNEFACVVADAVIKTLQPVSELLTPLGIDLDEWSMATYYLFDESGEFKLASHMYCSFYPPDEDEEEGDCEEEEFEPSTQYEYGTEDDYQGKPLEFGATSAALQPEEEQEEDWLDDDSQQTVGQQDGSEDNQTTTIQTIVEVQPQLEMELTPVVQTIEVNSFSGYLKLTDNVYIKNADIVEEAKKVKPTVVVNAANVYLKHGGGVAGALNKATNNAMQVESDDYIVTNGPLKVGGSCVLSGHNLAKHCLHVVGPNVNKGEDIQLLKSAYENFNQHEVLLAPLLSAGIFGADPIHSLRVCVDTVRTNVYLAVFDKNLYDKLVSSFLEMKSEKQVEQKIAEIPKEEVKPFITESKPSVEQRKQDDKKIKACVEEVTTTLEETKFLTENLLLYIDINGNLHPDSATLVSDIDITFLKKDAPYIVGDVVQEGVLTAVVIPTKKAGGTTEMLAKALRKVPTDNYITTYPGQGLNGYTVEEAKTVLKKCKSAFYILPSIISNEKQEILGTVSWNLREMLAHAEETRKLMPVCVETKAIVSTIQRKYKGIKIQEGVVDYGARFYFYTSKTTVASLINTLNDLNETLVTMPLGYVTHGLNLEEAARYMRSLKVPATVSVSSPDAVTAYNGYLTSSSKTPEEHFIETISLAGSYKDWSYSGQSTQLGIEFLKRGDKSVYYTSNPTTFHLDGEVITFDNLKTLLSLREVRTIKVFTTVDNINLHTQVVDMSMTYGQQFGPTYLDGADVTKIKPHNSHEGKTFYVLPNDDTLRVEAFEYYHTTDPSFLGRYMSALNHTKKWKYPQVNGLTSIKWADNNCYLATALLTLQQIELKFNPPALQDAYYRARAGEAANFCALILAYCNKTVGELGDVRETMSYLFQHANLDSCKRVLNVVCKTCGQLQTTLKGVEAVMYMGTLSYEQFKKGVQIPCTCGKQATKYLVQQESPFVMMSAPPAQYELKHGTFTCASEYTGNYQCGHYKHITSKETLYCIDGALLTKSSEYKGPITDVFYKENSYTTTIKPVTYKLDGVVCTEIDPKLDNYYKKDNSYFTEQPIDLVPNQPYPNASFDNFKFVCDNIKFADDLNQLTGYKKPASRELKVTFFPDLNGDVVAIDYKHYTPSFKKGAKLLHKPIVWHVNNATNKATYKPNTWCIRCLWSTKPVETSNSFDVLKSEDAQGMDNLACEDLKPVSEEVVENPTIQKDVLECNVKTTEVVGDIILKPANNSLKITEEVGHTDLMAAYVDNSSLTIKKPNELSRVLGLKTLATHGLAAVNSVPWDTIANYAKPFLNKVVSTTTNIVTRCLNRVCTNYMPYFFTLLLQLCTFTRSTNSRIKASMPTTIAKNTVKSVGKFCLEASFNYLKSPNFSKLINIIIWFLLLSVCLGSLIYSTAALGVLMSNLGMPSYCTGYREGYLNSTNVTIATYCTGSIPCSVCLSGLDSLDTYPSLETIQITISSFKWDLTAFGLVAEWFLAYILFTRFFYVLGLAAIMQLFFSYFAVHFISNSWLMWLIINLVQMAPISAMVRMYIFFASFYYVWKSYVHVVDGCNSSTCMMCYKRNRATRVECTTIVNGVRRSFYVYANGGKGFCKLHNWNCVNCDTFCAGSTFISDEVARDLSLQFKRPINPTDQSSYIVDSVTVKNGSIHLYFDKAGQKTYERHSLSHFVNLDNLRANNTKGSLPINVIVFDGKSKCEESSAKSASVYYSQLMCQPILLLDQALVSDVGDSAEVAVKMFDAYVNTFSSTFNVPMEKLKTLVATAEAELAKNVSLDNVLSTFISAARQGFVDSDVETKDVVECLKLSHQSDIEVTGDSCNNYMLTYNKVENMTPRDLGACIDCSARHINAQVAKSHNIALIWNVKDFMSLSEQLRKQIRSAAKKNNLPFKLTCATTRQVVNVVTTKIALKGG

SEQ ID NO: 15893 - protein, 1946 aa, Artificial Sequence
  SARS-CoV-2__MT831190.1__non-structural protein 3 (NSP3)
MAPTKVTFGDDTVIEVQGYKSVNITFELDERIDKVLNEKCSAYTVELGTEVNEFACVVADAVIKTLQPVSELLTPLGIDLDEWSMATYYLFDESGEFKLASHMYCSFYPPDEDEEEGDCEEEEFEPSTQYEYGTEDDYQGKPLEFGATSAALQPEEEQEEDWLDDDSQQTVGQQDGSEDNQTTTIQTIVEVQPQLEMELTPVVQTIEVNSFSGYLKLTDNVYIKNADIVEEAKKVKPTVVVNAANVYLKHGGGVAGALNKATNNAMQVESDDYIATNGPLKVGGSCVLSGHNLAKHCLHVVGPNVNKGEDIQLLKSAYENFNQHEVLLAPLLSAGIFGADPIHSLRVCVDTVRTNVYLAVFDKNLYDKLVSSFLEMKSEKQVEQKIAEIPKEEVKPFITESKPSVEQRKQDDKKIKACVEEVTTTLEETKFLTENLLLYIDINGNLHPDSATLVSDIDITFLKKDAPYIVGDVVQEGVLTAVVIPTKKAGGTTEMLAKALRKVPTDNYITTYPGQGLNGYTVEEAKTVLKKCKSAFYILPSIISNEKQEILGTVSWNLREMLAHAEETRKLMPVCVETKAIVSTIQRKYKGIKIQEGVVDYGARFYFYTSKTTVASLINTLNDLNETLVTMPLGYVTHGLNLEEAARYMRSLKVPATVSVSSPDAVTAYNGYLTSSSKTPEEHFIETISLAGSYKDWSYSGQSTQLGIEFLKRGDKSVYYTSNPTTFHLDGEVITFDNLKTLLSLREVRTIKVFTTVDNINLHTQVVDMSMTYGQQFGPTYLDGADVTKIKPHNSHEGKTFYVLPNDDTLRVEAFEYYHTTDPSFLGRYMSALNHTKKWKYPQVNGLTSIKWADNNCYLATALLTLQQIELKFNPPALQDAYYRARAGEAANFCALILAYCNKTVGELGDVRETMSYLFQHANLDSCKRVLNVVCKTCGQQQTTLKGVEAVMYMGTLSYEQFKKGVQIPCTCGKQATKYLVQQESPFVMMSAPPAQYELKHGTFTCASEYTGNYQCGHYKHITSKETLYCIDGALLTKSSEYKGPITDVFYKENSYTTTIKPVTYKLDGVVCTEIDPKLDNYYKKDNSYFTEQPIDLVPNQPYPNASFDNFKFVCDNIKFADDLNQLTGYKKPASRELKVTFFPDLNGDVVAIDYKHYTPSFKKGAKLLHKPIVWHVNNATNKATYKPNTWCIRCLWSTKPVETPNSFDVLKSEDAQGMDNLACEDLKPVSEEVVENPTIQKDVLECNVKTTEVVGDIILKPANNSLKITEEVGHTDLMAAYVDNSSLTIKKPNELSRVLGLKTLATHGLAAVNSVPWDTIANYAKPFLNKVVSTTTNIVTRCLNRVCTNYMPYFFTLLLQLCTFTRSTNSRIKASMPTTIAKNTVKSVGKFCLEASFNYLKSPNFSKLINIIIWFLLLSVCLGSLIYSTAALGVLMSNLGMPSYCTGYREGYLNSTNVTIATYCTGSIPCSVCLSGLDSLDTYPSLETIQITISSFKWDLTAFGLVAEWFLAYILFTRFFYVLGLAAIMQLFFSYFAVHFISNSWLMWLIINLVQMAPISAMVRMYIFFASFYYVWKSYVHVVDGCNSSTCMMCYKRNRATRVECTTIVNGVRRSFYVYANGGKGFCKLHNWNCVNCDTFCAGSTFISDEVARDLSLQFKRPINPTDQSSYIVDSVTVKNGSIHLYFDKAGQKTYERHSLSHFVNLDNLRANNTKGSLPINVIVFDGKSKCEESSAKSASVYYSQLMCQPILLLDQALVSDVGDSAEVAVKMFDAYVNTFSSTFNVPMEKLKTLVATAEAELAKNVSLDNVLSTFISAARQGFVDSDVETKDVVECLKLSHQSDIEVTGDSCNNYMLTYNKVENMTPRDLGACIDCSARHINAQVAKSHNIALIWNVKDFMSLSEQLRKQIRSAAKKNNLPFKLTCATTRQVVNVVTTKIALKGG

SEQ ID NO: 15894 - protein, 1946 aa, Artificial Sequence
  SARS-CoV-2__MT831198.1__non-structural protein 3 (NSP3)
MAPTKVTFGDDTVIEVQGYKSVNITFELDERIDKVLNEKCSAYTVELGTEVNEFACVVADAVIKTLQPVSELLTPLGIDLDEWSMATYYLFDESGEFKLASHMYCSFYPPDEDEEEGDCEEEEFEPSTQYEYGTEDDYQGKPLEFGATSAALQPEEEQEEDWLDDDSQQTVVQQDGSEDNQTTTIQTIVEVQPQLEMELTPVVQTIEVNSFSGYLKLTDNVYIKNADIVEEAKKVKPTVVVNAANVYLKHGGGVAGALNKATNNAMQVESDDYIATNGPLKVGGSCVLSGHNLAKHCLHVVGPNVNKGEDIQLLKSAYENFNQHEVLLAPLLSAGIFGADPIHSLRVCVDTVRTNVYLAVFDKNLYDKLVSSFLEMKSEKQVEQKIAEIPKEEVKPFITESKPSVEQRKQDDKKIKACVEEVTTTLEETKFLTENLLLYIDINGNLHPDSATLVSDIDITFLKKDAPYIVGDVVQEGVLTAVVIPTKKAGGTTEMLAKALRKVPTDNYITTYPGQGLNGYTVEEAKTVLKKCKSAFYILPSIISNEKQEILGTVSWNLREMLAHAEETRKLMPVCVETKAIVSTIQRKYKGIKIQEGVVDYGARFYFYTSKTTVASLINTLNDLNETLVTMPLGYVTHGLNLEEAARYMRSLKVPATVSVSSPDAVTAYNGYLTSSSKTPEEHFIETISLAGSYKDWSYSGQSTQLGIEFLKRGDKSVYYTSNPTTFHLDGEVITFDNLKTLLSLREVRTIKVFTTVDNINLHTQVVDMSMTYGQQFGPTYLDGADVTKIKPHNSHEGKTFYVLPNDDTLRVEAFEYYHTTDPSFLGRYMSALNHTKKWKYPQVNGLTSIKWADNNCYLATALLTLQQIELKFNPPALQDAYYRARAGEAANFCALILAYCNKTVGELGDVRETMSYLFQHANLDSCKRVLNVVCKTCGQQQTTLKGVEAVMYMGTLSYEQFKKGVQIPCTCGKQATKYLVQQESPFVMMSAPPAQYELKHGTFTCASEYTGNYQCGHYKHITSKETLYCIDGALLTKSSEYKGPITDVFYKENSYTTTIKPVTYKLDGVVCTEIDPKLDNYYKKDNSYFTEQPIDLVPNQPYPNASFDNFKFVCDNIKFADDLNQLTGYKKPASRELKVTFFPDLNGDVVAIDYKHYTPSFKKGAKLLHKPIVWHVNNATNKATYKPNTWCIRCLWSTKPVETSNSFDVLKSEDAQGMDNLACEDLKPVSEEVVENPTIQKDVLECNVKTTEVVGDIILKPANNSLKITEEVGHTDLMAAYVDNSSLTIKKPNELSRVLGLKTLATHGLAAVNSVPWDTIANYAKPFLNKVVSTTTNIVTRCLNRVCTNYMPYFFTLLLQLCTFTRSTNSRIKASMPTTIAKNTVKSVGKFCLEASFNYLKSPNFSKLINIIIWFLLLSVCLGSLIYSTAALGVLMSNLGMPSYCTGYREGYLNSTNVTIATYCTGSIPCSVCLSGLDSLDTYPSLETIQITISSFKWDLTAFGLVAEWFLAYILFTRFFYVLGLAAIMQLFFSYFAVHFISNSWLMWLIINLVQMAPISAMVRMYIFFASFYYVWKSYVHVVDGCNSSTCMMCYKRNRATRVECTTIVNGVRRSFYVYANGGKGFCKLHNWNCVNCDTFCAGSTFISDEVARDLSLQFKRPINPTDQSSYIVDSVTVKNGSIHLYFDKAGQKTYERHSLSHFVNLDNLRANNTKGSLPINVIVFDGKSKCEESSAKSASVYYSQLMCQPILLLDQALVSDVGDSAEVAVKMFDAYVNTFSSTFNIPMEKLKTLVATAEAELAKNVSLDNVLSTFISAARQGFVDSDVETKDVVECLKLSHQSDIEVTGDSCNNYMLTYNKVENMTPRDLGACIDCSARHINAQVAKSHNIALIWNVKDFMSLSEQLRKQIRSAAKKNNLPFKLTCATTRQVVNVVTTKIALKGG

SEQ ID NO: 15895 - protein, 1946 aa, Artificial Sequence
  SARS-CoV-2__MT831202.1__non-structural protein 3 (NSP3)
MAPTKVTFGDDTVIEVQGYKSVNITFELDERIDKVLNEKCSAYTVELGTEVNEFACVVADAVIKTLQPVSELLTPLGIDLDEWSMATYYLFDESGEFKLASHMYCSFYPPDEDEEEGDCEEEEFEPSTQYEYGTEDDYQGKPLEFGATSAALQPEEEQEEDWLDDDSQQTVGQQDGSEDNQTTTIQTIVEVQPQLEMELTPVVQTIEVNSFSGYLKLTDNVYIKNADIVEEAKKVKPTVVVNAANVYLKHGGGVAGALNKATNNAMQVESDDYIATNGPLKVGGSCVLSGHNLAKHCLHVVGPNVNKGEDIQLLKSAYENFNQHEVLLAPLLSAGIFGADPIHSLRVCVDTVRTNVYLAVFDKNLYDKLVSSFLEMKSEKQVEQKIAEIPKEEVKPFITESKPSVEQRKQDDKKIKACVEEVTTTLEETKFLTENLLLYIDINGNLHPDSATLVSDIDITFLKKDAPYIVGDVVQEGVLTAVVIPTKKAGGTTEMLAKALRKVPTDNYITTYPGQGLNGYTVEEAKTVLKKCKSAFYILPSIISNEKQEILGTVSWNLREMLAHAEETRKLMPVCVETKAIVSTIQRKYKGIKIQEGVVDYGARFYFYTSKTTVASLINTLNDLNETLVTMPLGYVTHGLNLEEAARYMRSLKVPATVSVSSPDAVTAYNGYLTSSSKTPEEHFIETISLAGSYKDWSYSGQSTQLGIEFLKRGDKSVYYTSNPTTFHLDGEVITFDNLKTLLSLREVRTIKVFTTVDNINLHTQVVDMSMTYGQQFGPTYLDGADVTKIKPHNSHEGKTFYVLPNDDTLRVEAFEYYHTTDPSFLGRYMSALNHTKKWKYPQVNGLTSIKWADNNCYLATALLTLQQIELKFNPPALQDAYYRARAGEAANFCALILAYCNKTVGELGDVRETMSYLFQHANLDSCKRVLNVVCKTCGQQQTTLKGVEAVMYMGTLSYEQFKKGVQIPCTCGKQATKYLVQQESPFVMMSAPPAQYELKHGTFTCASEYTGNYQCGHYKHITSKETLYCIDGALLTKSSEYKGPITDVFYKENSYTTTIKPVTYKLDGVVCTEIDPKLDNYYKKDNSYFTEQPIDLVPNQPYPNASFDNFKFVCDNIKFADDLNQLTGYKKPASRELKVTFFPDLNGDVVAIDYKHYTPSFKKGAKLLHKPIVWHVNNATNKATYKPNTWCIRCLWSTKPVETSNSFDVLKSEDAQGMDNLACEDLKPVSEEVVENPTIQKDVLECNVKTTEVVGDIILKPANNSLKITEEVGHTDLMAAYVDNFSLTIKKPNELSRVLGLKTLATHGLAAVNSVPWDTIANYAKPFLNKVVSTTTNIVTRCLNRVCTNYMPYFFTLLLQLCTFTRSTNSRIKASMPTTIAKNTVKSVGKFCLEASFNYLKSPNFSKLINIIIWFLLLSVCLGSLIYSTAALGVLMSNLGMPSYCTGYREGYLNSTNVTIATYCTGSIPCSVCLSGLDSLDTYPSLETIQITISSFKWDLTAFGLVAEWFLAYILFTRFFYVLGLAAIMQLFFSYFAVHFISNSWLMWLIINLVQMAPISAMVRMYIFFASFYYVWKSYVHVVDGCNSSTCMMCYKRNRATRVECTTIVNGVRRSFYVYANGGKGFCKLHNWNCVNCDTFCAGSTFISDEVARDLSLQFKRPINPTDQSSYIVDSVTVKNGSIHLYFDKAGQKTYERHSLSHFVNLDNLRANNTKGSLPINVIVFDGKSKCEESSAKSASVYYSQLMCQPILLLDQALVSDVGDSAEVAVKMFDAYVNTFSSTFNVPMEKLKTLVATAEAELAKNVSLDNVLSTFISAARQGFVDSDVETKDVVECLKLSHQSDIEVTGDSCNNYMLTYNKVENMTPRDLGACIDCSARHINAQVAKSHNIALIWNVKDFMSLSEQLRKQIRSAAKKNNLPFKLTCATTRQVVNVVTTKIALKGG

SEQ ID NO: 15896 - protein, 1946 aa, Artificial Sequence
  SARS-CoV-2__MT831205.1__non-structural protein 3 (NSP3)
MAPTKVTFGDDTVIEVQGYKSVNITFELDERIDKVLNEKCSAYTVELGTEVNEFACVVADAVIKTLQPVSELLTPLGIDLDEWSMATYYLFDESGEFKLASHMYCSFYPPDEDEEEGDCEEEEFEPSTQYEYGTEDDYQGKPLEFGATSAALQPEEEQEEDWLDDDSQQTVGQQDGSEDNQTTTIQTIVEVQPQLEMELTPVVQTIEVNSFSGYLKLTDNVYIKNADIVEEAKKVKPTVVVNAANVYLKHGGGVAGALNKATNNAMQVESDDYIATNGPLKVGGSCVLSGHNLAKHCLHVVGPNVNKGEDIQLLKSAYENFNQHEVLLAPLLSAGIFGADPIHSLRVCVDTVRTNVYLAVFDKNLYDKLVSSFLEMKSEKQVEQKIAEIPKEEVKPFITESKPSVEQRKQDDKKIKACVEEVTTTLEETKFLTENLLLYIDINGNLHPDSATLVSDIDITFLKKDAPYIVGDVVQEGVLTAVVIPTKKAGGTTEMLAKALRKVPTDNYITTYPGQGLNGYTVEEAKTVLKKCKSAFYILPSIISNEKQEILGTVSWNLREMLAHAEETRKLMPVCVETKAIVSTIQRKYKGIKIQEGVVDYGARFYFYTSKTTVASLINTLNDLNETLVTMPLGYVTHGLNLEEAARYMRSLKVPATVSVSSPDAVTAYNGYLTSSSKTPEEHFIETISLAGSYKDWSYSGQSTQLGIEFLKRGDKSVYYTSNPTTFHLDGEVITFDNLKTLLSLREVRTIKVFTTVDNINLHTQVVDMSMTYGQQFGPTYLDGADVTKIKPHNSHEGKTFYVLPNDDTLRVEAFEYYHTTNPSFLGRYMSALNHTKKWKYPQVNGLTSIKWADNNCYLATALLTLQQIELKFNPPALQDAYYRARAGEAANFCALILAYCNKTVGELGDVRETMSYLFQHANLDSCKRVLNVVCKTCGQQQTTLKGVEAVMYMGTLSYEQFKKGVQIPCTCGKQATKYLVQQESPFVMMSAPPAQYELKHGTFTCASEYTGNYQCGHYKHITSKETLYCIDGALLTKSSEYKGPITDVFYKENSYTTTIKPVTYKLDGVVCTEIDPKLDNYYKKDNSYFTEQPIDLVPNQPYPNASFDNFKFVCDNIKFADDLNQLTGYKKPASRELKVTFFPDLNGDVVAIDYKHYTPSFKKGAKLLHKPIVWHVNNATNKATYKPNTWCIRCLWSTKPVETSNSFDVLKSEDAQGMDNLACEDLKPVSEEVVENPTIQKDVLECNVKTTEVVGDIILKPANNSLKITEEVGHTDLMAAYVDNSSLTIKKPNELSRVLGLKTLATHGLAAVNSVPWDTIANYAKPFLNKVVSTTTNIVTRCLNRVCTNYMPYFFTLLLQLCTFTRSTNSRIKASMPTTIAKNTVKSVGKFCLEASFNYLKSPNFSKLINIIIWFLLLSVCLGSLIYSTAALGVLMSNLGMPSYCTGYREGYLNSTNVTIATYCTGSIPCSVCLSGLDSLDTYPSLETIQITISSFKWDLTAFGLVAEWFLAYILFTRFFYVLGLAAIMQLFFSYFAVHFISNSWLMWLIINLVQMAPISAMVRMYIFFASFYYVWKSYVHVVDGCNSSTCMMCYKRNRATRVECTTIVNGVRRSFYVYANGGKGFCKLHNWNCVNCDTFCAGSTFISDEVARDLSLQFKRPINPTDQSSYIVDSVTVKNGSIHLYFDKAGQKTYERHSLSHFVNLDNLRANNTKGSLPINVIVFDGKSKCEESSAKSASVYYSQLMCQPILLLDQALVSDVGDSAEVAVKMFDAYVNTFSSTFNVPMEKLKTLVATAEAELAKNVSLDNVLSTFISAARQGFVDSDVETKDVVECLKLSHQSDIEVTGDSCNNYMLTYNKVENMTPRDLGACIDCSARHINAQVAKSHNIALIWNVKDFMSLSEQLRKQIRSAAKKNNLPFKLTCATTRQVVNVVTTKIALKGG

SEQ ID NO: 15897 - protein, 1946 aa, Artificial Sequence
  SARS-CoV-2__MT831223.1__non-structural protein 3 (NSP3)
MAPTKVTFGDDTVIEVQGYKSVNITFELDERIDKVLNEKCSAYTVELGTEVNEFACVVADAVIKTLQPVSELLTPLGIDLDEWSMATYYLFDESGEFKLASHMYCSFYPPDEDEEEGDCEEEEFEPSTQYEYGTEDDYQGKPLEFGATSAALQPEEEQEEDWLDDDSQQTVGQQDGSEDNQTTTIQTIVEVQPQLEMELTPVVQTIEVNSFSGYLKLTDNVYIKNADIVEEAKKVKPTVVVNAANVYLKHGGGVAGALNKATNNAMQVESDDYIATNGPLKVGGSCVLSGHNLAKHCLHVVGPNVNKGEDIQLLKSAYENFNQHEVLLAPLLSAGIFGADPIHSLRVCVDTVRTNVYLAVFDKNLYDKLVSSFLEMKSEKQVEQKIAEIPKEEVKPFITESKPSVEQRKQDDKKIKACVEEVTTTLEETKFLTENLLLYIDINGNLHPDSATLVSDIDITFLKKDAPYIVGDVVQEGVLTAVVIPTKKAGGTTEMLAKALRKVPTDNYITTYPGQGLNGYTVEEAKTVLKKCKSAFYILPSIISNEKQEILGTVSWNLREMLAHAEETRKLMPVCVETKAIVSTIQRKYKGIKIQEGVVDYGARFYFYTSKTTVASLINTLNDLNETLVTMPLGYVTHGLNLEEAARYMRSLKVPATVSVSSPDAVTAYNGYLTSSSKTPEEHFIETISLAGSYKDWSYSGQSTQLGIEFLKRGDKSVYYTSNPTTFHLDGEVITFDNLKTLLSLREVRTIKVFTTVDNINLHTQVVDMSMTYGQQFGPTYLDGADVTKIKPHNSHEGKTFYVLPNDDTLRVEAFEYYHTTDPSFLGRYMSALNHTKKWKYPQVNGLTSIKWADNNCYLATALLTLQQIELKFNPPALQDAYYRARAGEAANFCALILAYCNKTVGELGDVRETMSYLFQHANLDSCKRVLNVVCKTCGQQQTTLKGVEAVMYMGTLSYEQFKKGVQIPCTCGKQATKYLVQQESPFVMMSAPPAQYELKHGTFTCASEYTGNYQCGHYKHITSKETLYCIDGALLTKSSEYKGPITDVFYKENSYTTTIKPVTYKLDGVVCTEIDPKLDNYYKKDNSYFTEQPIDLVPNQPYPNASFDNFKFVCDNIKFADDLNQLTGYKKPASRELKVTFFPDLNGDVVAIDYKHYTPSFKKGAKLLHKPIVWHVNNATNKATYKPNTWCIRCLWSTKPVETSNSFDVLKSEDAQGMDNLACEDLKPFSEEVVENPTIQKDVLECNVKTTEVVGDIILKPANNSLKITEEVGHTDLMAAYVDNSSLTIKKPNELSRVLGLKTLATHGLAAVNSVPWDTIANYAKPFLNKVVSTTTNIVTRCLNRVCTNYMPYFFTLLLQLCTFTRSTNSRIKASMPTTIAKNTVKSVGKFCLEASFNYLKSPNFSKLINIIIWFLLLSVCLGSLIYSTAALGVLMSNLGMPSYCTGYREGYLNSTNVTIATYCTGSIPCSVCLSGLDSLDTYPSLETIQITISSFKWDLTAFGLVAEWFLAYILFTRFFYVLGLAAIMQLFFSYFAVHFISNSWLMWLIINLVQMAPISAMVRMYIFFASFYYVWKSYVHVVDGCNSSTCMMCYKRNRATRVECTTIVNGVRRSFYVYANGGKGFCKLHNWNCVNCDTFCAGSTFISDEVARDLSLQFKRPINPTDQSSYIVDSVTVKNGSIHLYFDKAGQKTYERHSLSHFVNLDNLRANNTKGSLPINVIVFDGKSKCEESSAKSASVYYSQLMCQPILLLDQALVSDVGDSAEVAVKMFDAYVNTFSSTFNVPMEKLKTLVATAEAELAKNVSLDNVLSTFISAARQGFVDSDVETKDVVECLKLSHQSDIEVTGDSCNNYMLTYNKVENMTPRDLGACIDCSARHINAQVAKSHNIALIWNVKDFMSLSEQLRKQIRSAAKKNNLPFKLTCATTRQVVNVVTTKIALKGG

SEQ ID NO: 15898 - protein, 1946 aa, Artificial Sequence
  SARS-CoV-2__MT831261.1__non-structural protein 3 (NSP3)
MAPTKVTFGDDTVIEVQGYKSVNITFELDERIDKVLNEKCSAYTVELGTEVNEFACVVADAVIKTLQPVSELLTPLGIDLDEWSMATYYLFDESGEFKLASHMYCSFYPPDEDEEEGDCEEEEFEPSTQYEYGTEDDYQGKPLEFGATSAALQPEEEQEEDWLDDDSQQTVGQQDGSEDNQTTTIQTIVEVQPQLEMELTPVVQTIEVNSFSGYLKLTDNVYIKNADIVEEAKKVKPTVVVNAANVYLKHGGGVAGALNKATNNAMQVESDDYIATNGPLKVGGSCVLSGHNLAKHCLHVVGPNVNKGEDIQLLKSAYENFNQHEVLLAPLLSAGIFGADPIHSLRVCVDTVRTNVYLAVFDKNLYDKLVSSFLEMKSEKQVEQKIAEIPKEEVKPFITESKPSVEQRKQDDKKIKACVEEVTTTLEETKFLTENLLLYIDINGNLHPDSATLVSDIDITFLKKDAPYIVGDVVQEGVLTAVVIPTKKAGGTTEMLAKALRKVPTDNYITTYPGQGLNGYTVEEAKTVLKKCKSAFYILPSIISNEKQEILGTVSWNLREMLAHAEETRKLMPVCVETKAIVSTIQRKYKGIKIQEGVVDYGARFYFYTSKTTVASLINTLNDLNETLVTMPLGYVTHGLNLEEAARYMRSLKVPATVSVSSPDAVTAYNGYLTSSSKTPEEHFIETISLAGSYKDWSYSGQSTQLGIEFLKRGDKSVYYTSNPTTFHLDGEVITFDNLKTLLSLREVRTIKVFTTVDNINLHTQVVDMSMTYGQQFGPTYLDGADVTKIKPHNSHEGKTFYVLPNDDTLRVEAFEYYHTTDPSFLGRYMSALNHTKKWKYPQVNGLTSIKWADNNCYLATALLTLQQIELKFNPPALQDAYYRARAGEAANFCALILAYCNKTVGELGDVRETMSYLFQHANLDSCKRVLNVVCKTCGQQQTTLKGVEAVMYMGTLSYEQFKKGVQIPCTCGKQATKYLVQQESPFVMMSAPPAQYELKHGTFTCASEYTGNYQCGHYKHITSKETLYCIDGALLTKSSEYKGPITDVFYKENSYTTTIKPVTYKLDGVVCTEIDPKLDNYYKKDNSYFTEQPIDLVPNQPYPNVSFDNFKFVCDNIKFADDLNQLTGYKKPASRELKVTFFPDLNGDVVAIDYKHYTPSFKKGAKLLHKPIVWHVNNATNKATYKPNTWCIRCLWSTKPVETSNSFDVLKSEDAQGMDNLACEDLKPVSEEVVENPTIQKDVLECNVKTTEVVGDIILKPANNSLKITEEVGHTDLMAAYVDNSSLTIKKPNELSRVLGLKTLATHGLAAVNSVPWDTIANYAKPFLNKVVSTTTNIVTRCLNRVCTNYMPYFFTLLLQLCTFTRSTNSRIKASMPTTIAKNTVKSVGKFCLEASFNYLKSPNFSKLINIIIWFLLLSVCLGSLIYSTAALGVLMSNLGMPSYCTGYREGYLNSTNVTIATYCTGSIPCSVCLSGLDSLDTYPSLETIQITISSFKWDLTAFGLVAEWFLAYILFTRFFYVLGLAAIMQLFFSYFAVHFISNSWLMWLIINLVQMAPISAMVRMYIFFASFYYVWKSYVHVVDGCNSSTCMMCYKRNRATRVECTTIVNGVRRSFYVYANGGKGFCKLHNWNCVNCDTFCAGSTFISDEVARDLSLQFKRPINPTDQSSYIVDSVTVKNGSIHLYFDKAGQKTYERHSLSHFVNLDNLRANNTKGSLPINVIVFDGKSKCEESSAKSASVYYSQLMCQPILLLDQALVSDVGDSAEVAVKMFDAYVNTFSSTFNVPMEKLKTLVATAEAELAKNVSLDNVLSTFISAARQGFVDSDVETKDVVECLKLSHQSDIEVTGDSCNNYMLTYNKVENMTPRDLGACIDCSARHINAQVAKSHNIALIWNVKDFMSLSEQLRKQIRSAAKKNNLPFKLTCATTRQVVNVVTTKIALKGG

SEQ ID NO: 15899 - protein, 1946 aa, Artificial Sequence
  SARS-CoV-2__MT831296.1__non-structural protein 3 (NSP3)
MAPTKVTFGDDTVIEVQGYKSVNITFELDERIDKVLNEKCSAYTVELGTEVNEFACVVADAVIKTLQPVSELLTPLGIDLDEWSMATYYLFDESGEFKLASHMYCSFYPPDEDEEEGDCEEEEFEPSTQYEYGTEDDYQGKPLEFGATSAALQPEEEQEEDWLDDDSQQTVGQQDGSEDNQTTTIQTIVEVQPQLEMELTPVVQTIEVNSFSGYLKLTDNVYIKNADIVEEAKKVKPTVVVNAANVYLKHGGGVAGALNKATNNAMQVESDDYIATNGPLKVGGSCVLSGHNLAKHCLHVVGPNVNKGEDIQLLKSAYENFNQHEVLLAPLLSAGIFGADPIHSLRVCVDTVRTNVYLAVFDKNLYDKLVSSFLEMKSEKQVEQKIAEIPKEEVKPFITESKPSVEQRKQDDKKIKACVEEVTTTLEETKFLTENLLLYIDINGNLHPDSATLVSDIDITFLKKDAPYIVGDVVQEGVLTAVVIPTKKAGGTTEMLAKALRKVPTDNYITTYPGQGLNGYTVEEAKTVLKKCKSAFYILPSIISNEKQEILGTVSWNLREMLAHAEETRKLMPVCVETKAIVSTIQRKYKGIKIQEGVVDYGARFYFYTSKTTVASLINTLNDLNETLVTMPLGYVTHGLNLEEAARYMRSLKVPATVSVSSPDAVTAYNGYLTSSSKTPEEHFIETISLAGSYKDWSYSGQSTQLGIEFLKRGDKSVYYTSNPTTFHLDGEVITFDNLKTLLSLREVRTIKVFTTVDNINLHTQVVDMSMTYGQQFGPTYLDGADVTKIKPHNSHEGKTFYVLPNDDTLRVEAFEYYHTTDPSFLGRYMSALNHTKKWKYPQVNGLTSIKWADNNCYLATALLTLQQIELKFNPPALQDAYYRARAGEAANFCALILAYCNKTVGELGDVRETMSYLFQHANLDSCKRVLNVVCKTCGQQQTTLKGVEAVMYMGTLSYEQFKKGVQIPCTCGKQVTKYLVQQESPFVMMSAPPAQYELKHGTFTCASEYTGNYQCGHYKHITSKETLYCIDGALLTKSSEYKGPITDVFYKENSYTTTIKPVTYKLDGVVCTEIDPKLDNYYKKDNSYFTEQPIDLVPNQPYPNASFDNFKFVCDNIKFADDLNQLTGYKKPASRELKVTFFPDLNGDVVAIDYKHYTPSFKKGAKLLHKPIVWHVNNATNKATYKPNTWCIRCLWSTKPVETSNSFDVLKSEDAQGMDNLACEDLKPVSEEVVENPTIQKDVLECNVKTTEVVGDIILKPANNSLKITEEVGHTDLMAAYVDNSSLTIKKPNELSRVLGLKTLATHGLAAVNSVPWDTIANYAKPFLNKVVSTTTNIVTRCLNRVCTNYMPYFFTLLLQLCTFTRSTNSRIKASMPTTIAKNTVKSVGKFCLEASFNYLKSPNFSKLINIIIWFLLLSVCLGSLIYSTAALGVLMSNLGMPSYCTGYREGYLNSTNVTIATYCTGSIPCSVCLSGLDSLDTYPSLETIQITISSFKWDLTAFGLVAEWFLAYILFTRFFYVLGLAAIMQLFFSYFAVHFISNSWLMWLIINLVQMAPISAMVRMYIFFASFYYVWKSYVHVVDGCNSSTCMMCYKRNRATRVECTTIVNGVRRSFYVYANGGKGFCKLHNWNCVNCDTFCAGSTFISDEVARDLSLQFKRPINPTDQSSYIVDSVTVKNGSIHLYFDKAGQKTYERHSLSHFVNLDNLRANNTKGSLPINVIVFDGKSKCEESSAKSASVYYSQLMCQPILLLDQALVSDVGDSAEVAVKMFDAYVNTFSSTFNVPMEKLKTLVATAEAELAKNVSLDNVLSTFISAARQGFVDSDVETKDVVECLKLSHQSDIEVTGDSCNNYMLTYNKVENMTPRDLGACIDCSARHINAQVAKSHNIALIWNVKDFMSLSEQLRKQIRSAAKKNNLPFKLTCATTRQVVNVVTTKIALKGG

SEQ ID NO: 15900 - protein, 1946 aa, Artificial Sequence
  SARS-CoV-2__MT831301.1__non-structural protein 3 (NSP3)
MAPTKVTFGDDTVIEVQGYKSVNITFELDERIDKVLNEKCSAYTVELGTEVNEFACVVADAVIKTLQPVSELLTPLGIDLDEWSMATYYLFDESGEFKLASHMYCSFYPPDEDEEEGDCEEEEFEPSTQYEYGTEDDYQGKPLEFGATSAALQPEEEQEEDWLDDDSQQTVGQQDGSEDNQTTTIQTIVEVQPQLEMELTPVVQTIEVNSFSGYLKLTDNVYIKNADIVEEAKKVKPTVVVNAANVYLKHGGGVAGALNKATNNAMQVESDDYIATNGPLKVGGSCVLSGHNLAKHCLHVVGPNVNKGEDIQLLKSAYENFNQHEVLLAPLLSAGIFGADPIHSLRVCVDTVRTNVYLAVFDKNLYDKLVSSFLEMKSEKQVEQKIAEIPKEEVKPFITESKPSVEQRKQDDKKIKACVEEVTTTLEETKFLTENLLLYIDINGNLHPDSATLVSDIDITFLKKDAPYIVGDVVQEGVLTAVVIPTKKAGGTTEMLAKALRKVPTDNYITTYPGQGLNGYTVEEAKTVLKKCKSAFYILPSIISNEKQEILGTVSWNLREMLAHAEETRKLMPVCVETKAIVSTIQRKYKGIKIQEGVVDYGARFYFYTSKTTVASLINTLNDLNETLVTMPLGYVTHGLNLEEAARYMRSLKVPATVSVSSPDAVTAYNGYLTSSSKTPEEHFIETISLAGSYKDWSYSGQSTQLGIEFLKRGDKSVYYTSNPTTFHLDGEVITFDNLKTLLSLREVRTIKVFTTVDNINLHTQVVDMSMTYGQQFGPTYLDGADVTKIKPHNSHEGKTFYVLPNDDTLRVEAFEYYHTTDPSFLGRYMSALNHTKKWKYPQVNGLTSIKWADNNCYLATALLTLQQIELKFNPPALQDAYYRARAGEAANFCALILAYCNKTVGELGDVRETMSYLFQHANLDSCKRVLNVVCKTCGQQQTTLKGVEAVMYMGTLSYEQFKKGVQIPCTCGKQATKYLVQQESPFVMMSAPPAQYELKHGTFTCASEYTGNYQCGHYKHITSKETLYCIDGALLTKSSEYKGPITDVFYKENSYTTTIKPVTYKLDGVVCTEIDPKLDNYYKKDNSYFTEQPIDLVPNQPYPNASFDNFKFVCDNIKFADDLNQLTGYKKPASRELKVTFFPDLNGDVVAIDYKHYTPSFKKGAKLLHKPIVWHVNNATNKATYKPNTWCIRCLWSTKPVETSNSFDVLKSEDAQGMDNLACEDLKPVSEEVVENPTIQKDVLECNVKTTEVVGDIILKPANNSLKITEEVGHTDLMAAYVDNSSLTIKKPNELSRVLGLKTLATHGLAAVNSVPWDTIANYAKPFLNKVVSTTTNIVTRCLNRVCTNYMPYFFTLLLQLCTFTRSTNSRIKASMPTTIAKNTVKSVGKFCLEASFNYLKSPNFSKLINIIIWFLLLSVCLGSLIYSTAALGVLMSNLGMPSYCTGYREGYLNSTNVTIATYCTGSIPCSVCLSGLDSLDTYPSLETIQITISSFKWDLTAFGLVAEWFLAYILFTRFFYVLGLAAIMQLFFSYFAVHFISNSWLMWLIINLVQMAPISAMVRMYIFFASFYYVWKSYVHVVDGCNSSTCMMCYKRNRATRVECTTIVNGVRRSFYVYANGGKGFCKLHNWNCVNCDTFCAGSTFISDEVARDLSLQFKRPINPTDQSSYIVDSVTVKNGSIHLYFDKAGQKTYERHSLSHFVNLDNLRANNTKGSLPINVIVFDGKSKCEESSAKSASVYYSQLMCQPILLLDQALVSDVGDSAEVAVKMFDAYVNTFSSTFNVPMEKLKTLVATAEAELAKNVSLDNVLSNFISAARQGFVDSDVETKDVVECLKLSHQSDIEVTGDSCNNYMLTYNKVENMTPRDLGACIDCSARHINAQVAKSHNIALIWNVKDFMSLSEQLRKQIRSAAKKNNLPFKLTCATTRQVVNVVTTKIALKGG

SEQ ID NO: 15901 - protein, 1946 aa, Artificial Sequence
  SARS-CoV-2__MT831340.1__non-structural protein 3 (NSP3)
MAPTKVTFGDDTVIEVQGYKSVNITFELDERIDKVLNEKCSAYTVELGTEVNEFACVVADAVIKTLQPVSELLTPLGIDLDEWSMATYYLFDESGEFKLASHMYCSFYPPDEDEEEGDCEEEEFEPSTQYEYGTEDDYQGKPLEFGATSAALQPEEEQEEDWLDDDSQQTVGQQDGSEDNQTTTIQTIVEVQPQLEMELTPVVQTIEVNIFSGYLKLTDNVYIKNADIVEEAKKVKPTVVVNAANVYLKHGGGVAGALNKATNNAMQVESDDYIATNGPLKVGGSCVLSGHNLAKHCLHVVGPNVNKGEDIQLLKSAYENFNQHEVLLAPLLSAGIFGADPIHSLRVCVDTVRTNVYLAVFDKNLYDKLVSSFLEMKSEKQVEQKIAEIPKEEVKPFITESKPSVEQRKQDDKKIKACVEEVTTTLEETKFLTENLLLYIDINGNLHPDSATLVSDIDITFLKKDAPYIVGDVVQEGVLTAVVIPTKKAGGTTEMLAKALRKVPTDNYITTYPGQGLNGYTVEEAKTVLKKCKSAFYILPSIISNEKQEILGTVSWNLREMLAHAEETRKLMPVCVETKAIVSTIQRKYKGIKIQEGVVDYGARFYFYTSKTTVASLINTLNDLNETLVTMPLGYVTHGLNLEEAARYMRSLKVPATVSVSSPDAVTAYNGYLTSSSKTPEEHFIETISLAGSYKDWSYSGQSTQLGIEFLKRGDKSVYYTSNPTTFHLDGEVITFDNLKTLLSLREVRTIKVFTTVDNINLHTQVVDMSMTYGQQFGPTYLDGADVTKIKPHNSHEGKTFYVLPNDDTLRVEAFEYYHTTDPSFLGRYMSALNHTKKWKYPQVNGLTSIKWADNNCYLATALLTLQQIELKFNPPALQDAYYRARAGEAANFCALILAYCNKTVGELGDVRETMSYLFQHANLDSCKRVLNVVCKTCGQQQTTLKGVEAVMYMGTLSYEQFKKGVQIPCTCGKQATKYLVQQESPFVMMSAPPAQYELKHGTFTCASEYTGNYQCGHYKHITSKETLYCIDGALLTKSSEYKGPITDVFYKENSYTTTIKPVTYKLDGVVCTEIDPKLDNYYKKDNSYFTEQPIDLVPNQPYPNASFDNFKFVCDNIKFADDLNQLTGYKKPASRELKVTFFPDLNGDVVAIDYKHYTPSFKKGAKLLHKPIVWHVNNATNKATYKPNTWCIRCLWSTKPVETSNSFDVLKSEDAQGMDNLACEDLKPVSEEVVENPTIQKDVLECNVKTTEVVGDIILKPANNSLKITEEVGHTDLMAAYVDNSSLTIKKPNELSRVLGLKTLATHGLAAVNSVPWDTIANYAKPFLNKVVSTTTNIVTRCLNRVCTNYMPYFFTLLLQLCTFTRSTNSRIKASMPTTIAKNTVKSVGKFCLEASFNYLKSPNFSKLINIIIWFLLLSVCLGSLIYSTAALGVLMSNLGMPSYCTGYREGYLNSTNVTIATYCTGSIPCSVCLSGLDSLDTYPSLETIQITISSFKWDLTAFGLVAEWFLAYILFTRFFYVLGLAAIMQLFFSYFAVHFISNSWLMWLIINLVQMAPISAMVRMYIFFASFYYVWKSYVHVVDGCNSSTCMMCYKRNRATRVECTTIVNGVRRSFYVYANGGKGFCKLHNWNCVNCDTFCAGSTFISDEVARDLSLQFKRPINPTDQSSYIVDSVTVKNGSIHLYFDKAGQKTYERHSLSHFVNLDNLRANNTKGSLPINVIVFDGKSKCEESSAKSASVYYSQLMCQPILLLDQALVSDVGDSAEVAVKMFDAYVNTFSSTFNVPMEKLKTLVATAEAELAKNVSLDNVLSTFISAARQGFVDSDVETKDVVECLKLSHQSDIEVTGDSCNNYMLTYNKVENMTPRDLGACIDCSARHINAQVAKSHNIALIWNVKDFMSLSEQLRKQIRSAAKKNNLPFKLTCATTRQVVNVVTTKIALKGG

SEQ ID NO: 15902 - protein, 1946 aa, Artificial Sequence
  SARS-CoV-2__MT831347.1__non-structural protein 3 (NSP3)
MAPTKVTFGDDTVIEVQGYKSVNITFELDERIDKVLNEKCSAYTVELGTEVNEFACVVADAVIKTLQPVSELLTPLGIDLDEWSMATYYLFDESGEFKLASHMYCSFYPPDEDEEEGDCEEEEFEPSTQYEYGTEDDYQGKPLEFGATSAALQPEEEQEEDWLDDDSQQTVGQQDGSEDNQTTTIQTIVEVQPQLEMELTPVVQTIEVNSFSGYLKLTDNVYIKNADIVEEAKKVKPTVVVNAANVYLKHGGGVAGALNKATNNAMQVESDDYIATNGPLKVGGSCVLSGHNLAKHCLHVVGPNVNKGEDIQLLKSAYENFNQHEVLLAPLLSAGIFGADPIHSLRVCVDTVRTNVYLAVFDKNLYDKLVSSFLEMKSEKQVEQKIAEIPKEEVKPFITESKPSVEQRKQDDKKIKACVEEVTTTLEETKFLTENLLLYIDINGNLHPDSATLVSDIDITFLKKDAPYIVGDVVQEGVLTAVVIPTKKAGGTTEMLAKALRKVPTDNYITTYPGQGLNGYTVEEAKTVLKKCKSAFYILPSIISNEKQEILGTVSWNLREMLAHAEETRKLMPVCVETKAIVSTIQRKYKGIKIQEGVVDYGARFYFYTSKTTVASLINTLNDLNETLVTMPLGYVTHGLNLEEAARYMRSLKVPATVSVSSPDAVTAYNGYLTSSSKTPEEHFIETISLAGSYKDWSYSGQSTQLGIEFLKRGDKSVYYTSNPTTFHLDGEVITFDNLKTLLSLREVRTIKVFTTVDNINLHTQVVDMSMTYGQQFGPTYLDGADVTKIKPHNSHEGKTFYVLPNDDTLRVEAFEYYHTTDPSFLGRYMSALNHTKKWKYPQVNGLTSIKWADNNCYLATALLTLQQIELKFNPPALQDAYYRARAGEAANFCALILAYCNKTVGELGDVRETMSYLFQHANLDSCKRVLNVVCKTCGQQQTTLKGVEAVMYMGTLSYEQFKKGVQIPCTCGKQATKYLVQQESPFVMMSAPPAQYELKHGTFTCASEYTGNYQCGHYKHITSKETLYCIDGALLTKSSEYKGPITDVFYKENSYTTTIKPVTYKLDGVVCTEIDPKLDNYYKKDNSYFTEQPIDLVPNQPYPNASFDNFKFVCDNIKFADDLNQLTGYKKPASRELKVTFFPDLNGDVVAIDYKHYTPSFKKGAKLLHKPIVWHVNNATNKATYKPNTWCIRCLWSTKPVETSNSFDVLKSEDAQGMDNLACEDLKPVSEEVVENPTIQKDVLECNVKTTEVVGDIILKPANNSLKITEEVGHTDLMAAYVDNSSLTIKKPNELSRVLGLKTLATHGLAAVNSVPWDTIANYAKPFLNKVVSTTTNIVTRCLNRVCTNYMPYFFTLLLQLCTFTRSTNSRIKASMPTTIAKNTVKSVGKFCLEASFNYLKSPNFSKLINIIIWFLLLSVCLGSLIYSTAALGVLMSNLGMPSYCTGYREGYLNSTNVTIATYCTGSIPCSVCLSGLDSLDTYPSLETIQITISSFKWDLTAFGLVAEWFLAYILFTRFFYVLGLAAIMQLFFSYFAVHFISNSWLMWLIINLVQMAPISAMVRMYIFFVSFYYVWKSYVHVVDGCNSSTCMMCYKRNRATRVECTTIVNGVRRSFYVYANGGKGFCKLHNWNCVNCDTFCAGSTFISDEVARDLSLQFKRPINPTDQSSYIVDSVTVKNGSIHLYFDKAGQKTYERHSLSHFVNLDNLRANNTKGSLPINVIVFDGKSKCEESSAKSASVYYSQLMCQPILLLDQALVSDVGDSAEVAVKMFDAYVNTFSSTFNVPMEKLKTLVATAEAELAKNVSLDNVLSTFISAARQGFVDSDVETKDVVECLKLSHQSDIEVTGDSCNNYMLTYNKVENMTPRDLGACIDCSARHINAQVAKSHNIALIWNVKDFMSLSEQLRKQIRSAAKKNNLPFKLTCATTRQVVNVVTTKIALKGG

SEQ ID NO: 15903 - protein, 1946 aa, Artificial Sequence
  SARS-CoV-2__MT831353.1__non-structural protein 3 (NSP3)
MAPTKVTFGDDTVIEVQGYKSVNITFELDERIDKVLNEKCSAYTVELGTEVNEFACVVADAVIKTLQPVSELLTPLGIDLDEWSMATYYLFDESGEFKLASHMYCSFYPPDEDEEEGDCEEEEFEPSTQYEYGTEDDYQGKPLEFGATSAALQPEEEQEEDWLDDDSQQTVGQQDGSEDNQTTTIQTIVEVQPQLEMELTPVVQTIEVNSFSGYLKLTDNVYIKNADIVEEAKKVKPTVVVNAANVYLKHGGGVAGALNKATNNAMQVESDDYIATNGPLKVGGSCVLSGHNLAKHCLHVVGPNVNKGEDIQLLKSAYENFNQHEVLLAPLLSAGIFGADPIHSLRVCVDTVRTNVYLAVFDKNLYDKLVSSFLEMKSEKQVEQKIAEIPKEEVKPFITESKPSVEQRKQDDKKIKACVEEVTTTLEETKFLTENLLLYIDINGNLHPDSATLVSDIDITFLKKDAPYIVGDVVQEGVLTAVVIPTKKAGGTTEMLAKALRKVPTDNYITTYPGQGLNGYTVEEAKTVLKKCKSAFYILPSIISNEKQEILGTVSWNLREMLAHAEETRKLMPVCVETKAIVSTIQRKYKGIKIQEGVVDYGARFYFYTSKTTVASLINTLNDLNETLVTMPLGYVTHGLNLEEAARYMRSLKVPATVSVSSPDAVTAYNGYLTSSSKTPEEHFIETISLAGSYKDWSYSGQSTQLGIEFLKRGDKSVYYTSNPTTFHLDGEVITFDNLKTLLSLREVRTIKVFTTVDNINLHTQVVDMSMTYGQQFGPTYLDGADVTKIKPHNSHEGKTFYVLPNDDTLRVEAFEYYHTTDPSFLGRYMSALNHTKKWKYPQVNGLTSIKWADNNCYLATALLTLQQIELKFNPPALQDAYYRARAGEAANFCALILAYCNKTVGELGDVRETMSYLFQHANLDSCKRVLNVVCKTCGQQQTTLKGVEAVMYMGTLSYEQFKKGVQIPCTCGKQATKYLVQQESPFVMMSAPPAQYELKHGTFTCASEYTGNYQCGHYKHITSKETLYCIDGALLTKSSEYKGPITDVFYKENSYTTTIKPVTYKLDGVVCTEIDPKLDNYYKKDNSYFTEQPIDLVPNQPYPNASFDNFKFVCDNIKFADDLNQLTGYKKPASRELKVTFFPDLNGDVVAIDYKHYTPSFKKGAKLLHKPIVWHVNNATNKATYKPNTWCIRCLWSTKPVETSNSFDVLKSEDAQGMDNLACEDLKPVSEEVVENPTIQKDVLECNVKTTEVVGDIILKPANNSLKITEEVGHTDLMAAYVDNSSLTIKKPNELSRVLGLKTLATHGLAAVNSVPWDTIANYAKPFLNKVVSTTTNIVTRCLNRVCTNYMPYFFTLLLQLCTFTRSTNSRIKASMPTTIAKNTVKSVGKFCLEASFNYLKSPNFSKLINIIIWFLLLSVCLGSLIYSTAALGVLMSNLGMPSYCTGYREGYLNSTNVTIATYCTGSIPCSVCLSGLDSLDTYPSLETIQITISSFKWDLTAFGLVAEWFLAYILFTRFFYVLGLAAIMQLFFSYFAVHFISNSWLMWLIINLVQMAPISAMVRMYIFFASFYYVWKSYVHVVDGCNSSTCMMCYKRNRATRVECTTIVNGVRRSFYVYANGGKGFCKLHNWNCVNCDTFCAGSTFISDEVARDLSLQFKRPINPTDQSSYIVDSVTVKNGSIHLYFDKAGQKTYERHSLSHFVNLDNLRANNTKGSLPINVIVFDGKSKCEESSAKSASVYYSQLMCQPILLLDQALVSDVGDSAEVAVKMFDAYVNTFSSTFNVPMEKLKTLVATAEAELAKNVSLDNVLSTFISAVRQGFVDSDVETKDVVECLKLSHQSDIEVTGDSCNNYMLTYNKVENMTPRDLGACIDCSARHINAQVAKSHNIALIWNVKDFMSLSEQLRKQIRSAAKKNNLPFKLTCATTRQVVNVVTTKIALKGG

SEQ ID NO: 15904 - protein, 1946 aa, Artificial Sequence
  SARS-CoV-2__MT831405.1__non-structural protein 3 (NSP3)
MAPTKVTFGDDTVIEVQGYKSVNITFELDERIDKVLNEKCSAYTVELGTEVNEFACVVADAVIKTLQPVSELLTPLGIDLDEWSMATYYLFDESGEFKLASHMYCSFYPPDEDEEEGDCEEEEFEPSTQYEYGTEDDYQGKPLEFGATSAALQPEEEQEEDWLDDDSQQTVGQQDGSEDNQTTTIQTIVEVQPQLEMELTPVVQTIEVNSFSGYLKLTDNVYIKNADIVEEAKKVKPTVVVNAANVYLKHGGGVAGALNKATNNAMQVESDDYIATNGPLKVGGSCVLSGHNLAKHCLHVVGPNVNKGEDIQLLKSAYENFNQHEVLLAPLLSAGIFGADPIHSLRVCVDTVRTNVYLAVFDKNLYDKLVSSFLEMKSEKQVEQKIAEIPKEEVKPFITESKPSVEQRKQDDKKIKACVEEVTTTLEETKFLTENLLLYIDINGNLHPDSATLVSDIDITFLKKDAPYIVGDVVQEGVLTAVVIPTKKAGGTTEMLAKALRKVPTDNYITTYPGQGLNGYTVEEAKTVLKKCKSAFYILPSIISNEKQEILGTVSWNLREMLAHAEETRKLMPVCVETKAIVSTIQRKYKGIKIQEGVVDYGARFYFYTSKTTVASLINTLNDLNETLVTMPLGYVTHGLNLEEAARYMRSLKVPATVSVSSPDAVTAYNGYLTSSSKTPEEHFIETISLAGSYKDWSYSGQSTQLGIEFLKRGDKSVYYTSNPTTFHLDGEVITFDNLKTLLSLREVRTIKVFTTVDNINLHTQVVDMSMTYGQQFGPTYLDGADVTKIKPHNSHEGKTFYVLPNDDTLRVEAFEYYHTTDPSFLGRYMSALNHTKKWKYPQVNGLTSIKWADNNCYLATALLTLQQIELKFNPPALQDAYYRARAGEAANFCALILAYCNKTVGELGDVRETMSYLFQHANLDSCKRVLNVVCKTCGQQQTTLKGVEAVMYMGTLSYEQFKKGVQIPCTCGKQATKYLVQQESPFVMMSAPPAQYELKHGTFTCASEYTGNYQCGHYKHITSKETLYCIDGALLTKSSEYKGPITDVFYKENSYTTTIKPVTYKLDGVVCTEIDPKLDNYYKKDNSYFTEQPIDLVPNQPYPNASFDNFKFVCDNIKFADDLNQLTGYKKPASRELKVTFFPDLNGDVVAIDYKHYTPSFKKGAKLLHKPIVWHVNNATNKATYKPNTWCIRCLWSTKPVETSNSFDVLKSEDAQGMDNLACEDLKPVSEEVVENPTIQKDVLECNVKTTEVVGDIILKPANNSLKITEEVGHTDLMAAYVDNSSLTIKKPNELSRVLGLKTLATHGLAAVNSVPWDTIANYAKPFLNKVVSTTTNIVTRCLNRVCTNYMPYFFTLLLQLCTFTRSTNSRIKASMPTTIAKNTVKSVGKFCLEASFNYLKSPNFSKLINIIIWFLLLSVCLGSLIYSTAALGVLMSNLGMPSYCTGYREGYLNSTNVTIATYCTGSIPCSVCLSGLDSLDTYPSLETIQITISSFKWDLTAFGLVAEWFLAYILFTRFFYVLGLAAIMQLFFSYFAVHFISNSWLMWLIINLVQMAPISAMVRMYIFFASFYYVWKSYVHVVDGCNSSTCMMCYKRNRATRVECTTIVNGVRRSFYVYANGGKGFCKLHNWNCVNCDTFCAGSTFISDEVARDLSLQFKRPINPTDQSSYIVDSVTVKNGSIHLYFDKAGQNTYERHSLSHFVNLDNLRANNTKGSLPINVIVFDGKSKCEESSAKSASVYYSQLMCQPILLLDQALVSDVGDSAEVAVKMFDAYVNTFSSTFNVPMEKLKTLVATAEAELAKNVSLDNVLSTFISAARQGFVDSDVETKDVVECLKLSHQSDIEVTGDSCNNYMLTYNKVENMTPRDLGACIDCSARHINAQVAKSHNIALIWNVKDFMSLSEQLRKQIRSAAKKNNLPFKLTCATTRQVVNVVTTKIALKGG

SEQ ID NO: 15905 - protein, 1946 aa, Artificial Sequence
  SARS-CoV-2__MT831416.1__non-structural protein 3 (NSP3)
MAPTKVTFGDDTVIEVQGYKSVNITFELDERIDKVLNEKCSAYTVELGTEVNEFACVVADAVIKTLQPVSELLTPLGIDLDEWSMATYYLFDESGEFKLASHMYCSFYPPDEDEEEGDCEEEEFEPSTQYEYGTEDDYQGKPLEFGATSAALQPEEEQEEDWLDDDSQQTVGQQDGSEDNQTTTIQTIVEVQPQLEMELTPVVQTIEVNSFSGYLKLTDNVYIKNADIVEEAKKVKPTVVVNAANVYLKHGGGVAGALNKATNNAMQVESDDYIATNGPLKVGGSCVLSGHNLAKHCLHVVGPNVNKGEDIQLLKSAYENFNQHEVLLAPLLSAGIFGADPIHSLRVCVDTVRTNVYLAVFDKNLYDKLVSSFLEMKSEKQVEQKIAEIPKEEVKPFITESKPSVEQRKQDDKKIKACVEEVTTTLEETKFLTENLLLYIDINGNLHPDSATLVSDIDITFLKKDAPYIVGDVVQEGVLTAVVIPTKKAGGTTEMLAKALRKVPTDNYITTYPGQGLNGYTVEEAKTVLKKCKSAFYILPSIISNEKQEILGTVSWNLREMLAHAEETRKLMPVCVETKAIVSTIQRKYKGIKIQEGVVDYGARFYFYTSKTTVASLINTLNDLNETLVTMPLGYVTHGLNLEEAARYMRSLKVPATVSVSSPDAVTAYNGYLTSSSKTPEEHFIETISLAGSYKDWSYSGQSTQLGIEFLKRGDKSVYYTSNPTTFHLDGEVITFDNLKTLLSLREVRTIKVFTTVDNINLHTQVVDMSMTYGQQFGPTYLDGADVTKIKPHNSHEGKTFYVLPNDDTLRVEAFEYYHTTDPSFLGRYMSALNHTKKWKYPQVNGLTSIKWADNNCYLATALLTLQQIELKFNPPALQDAYYRARAGEAANFCALILAYCNKTVGELGDVRETMSYLFQHANLDSCKRVLNVVCKTCGQQQTTLKGVEAVMYMGTLSYEQFKKGVQIPCTCGKQATKYLVQQESPFVMMSAPPAQYELKHGTFTCASEYTGNYQCGHYKHITSKETLYCIDGALLTKSSEYKGPITDVFYKENSYTTTIKPVTYKLDGVVCTEIDPKLDNYYKKDNSYFTEQPIDLVPNQPYPNASFDNFKFVCDNIKFADDLNQLTGYKKPASRELKVTFFPDLNGDVVAIDYKHYTPSFKKGAKLLHKPIVWHVNNATNKATYKPNTWCIRCLWSTKPVETSNSFDVLKSEDAQGMDNLACEDLKPVSEEVVENPTIQKDVLECNVKTTEVVGDIILKPANNSLKITEEVGHTDLMAAYVDNSSLTIKKPNELSRVLGLKTLATHGLAAVNSVPWDTIANYAKPFLNKVVSTTTNIVTRCLNRVCTNYMPYFFTLLLQLCTFTRSTNSRIKASMPTTIAKNTVKSVGKFCLEASFNYLKSPNFSKLINIIIWFLLLSVCLGSLIYSTAALGVLMSNLGMPSYCTGYREGYLNSTNVTIATYCTGSIPCSVCLSGLDSLDTYPSLETIQITISSFKWDLTAFGLVAEWFLAYILFTRFFYVLGLAAIMQLFFSYFAVHFISNSWLMWLIINLVQMAPISAMVRMYIFFASFYYVWKSYVHVVDGCNSSTCMMCYKRNRATRVECTTIVNGVRRSFYVYANGGKGFCKLHNWNCVNCDTFCAGSTFISDEVARDLSLQFKRPINPTDQSSYIVDSVTVKNGSIHLYFDKAGQKTYERHSLSHFVNLDNLRANNTKGSLPISVIVFDGKSKCEESSAKSASVYYSQLMCQPILLLDQALVSDVGDSAEVAVKMFDAYVNTFSSTFNVPMEKLKTLVATAEAELAKNVSLDNVLSTFISAARQGFVDSDVETKDVVECLKLSHQSDIEVTGDSCNNYMLTYNKVENMTPRDLGACIDCSARHINAQVAKSHNIALIWNVKDFMSLSEQLRKQIRSAAKKNNLPFKLTCATTRQVVNVVTTKIALKGG

SEQ ID NO: 15906 - protein, 1946 aa, Artificial Sequence
  SARS-CoV-2__MT831444.1__non-structural protein 3 (NSP3)
MAPTKVTFGDDTVIEVQGYKSVNITFELDERIDKVLNEKCSAYTVELGTEVNEFACVVADAVIKTLQPVSELLTPLGIDLDEWSMATYYLFDESGEFKLASHMYCSFYPPDEDEEEGDCEEEEFEPSTQYEYGTEDDYQGKPLEFGATSAALQPEEEQEEDWLDDDSQQTVGQQDGSEDNQTTTIQTIVEVQPQLEMELTPVVQTIEVNSFSGYLKLTNNVYIKNADIVEEAKKVKPTVVVNAANVYLKHGGGVAGALNKATNNAMQVESDDYIATNGPLKVGGSCVLSGHNLAKHCLHVVGPNVNKGEDIQLLKSAYENFNQHEVLLAPLLSAGIFGADPIHSLRVCVDTVRTNVYLAVFDKNLYDKLVSSFLEMKSEKQVEQKIAEIPKEEVKPFITESKPSVEQRKQDDKKIKACVEEVTTTLEETKFLTENLLLYIDINGNLHPDSATLVSDIDITFLKKDAPYIVGDVVQEGVLTAVVIPTKKAGGTTEMLAKALRKVPTDNYITTYPGQGLNGYTVEEAKTVLKKCKSAFYILPSIISNEKQEILGTVSWNLREMLAHAEETRKLMPVCVETKAIVSTIQRKYKGIKIQEGVVDYGARFYFYTSKTTVASLINTLNDLNETLVTMPLGYVTHGLNLEEAARYMRSLKVPATVSVSSPDAVTAYNGYLTSSSKTPEEHFIETISLAGSYKDWSYSGQSTQLGIEFLKRGDKSVYYTSNPTTFHLDGEVITFDNLKTLLSLREVRTIKVFTTVDNINLHTQVVDMSMTYGQQFGPTYLDGADVTKIKPHNSHEGKTFYVLPNDDTLRVEAFEYYHTTDPSFLGRYMSALNHTKKWKYPQVNGLTSIKWADNNCYLATALLTLQQIELKFNPPALQDAYYRARAGEAANFCALILAYCNKTVGELGDVRETMSYLFQHANLDSCKRVLNVVCKTCGQQQTTLKGVEAVMYMGTLSYEQFKKGVQIPCTCGKQATKYLVQQESPFVMMSAPPAQYELKHGTFTCASEYTGNYQCGHYKHITSKETLYCIDGALLTKSSEYKGPITDVFYKENSYTTTIKPVTYKLDGVVCTEIDPKLDNYYKKDNSYFTEQPIDLVPNQPYPNASFDNFKFVCDNIKFADDLNQLTGYKKPASRELKVTFFPDLNGDVVAIDYKHYTPSFKKGAKLLHKPIVWHVNNATNKATYKPNTWCIRCLWSTKPVETSNSFDVLKSEDAQGMDNLACEDLKPVSEEVVENPTIQKDVLECNVKTTEVVGDIILKPANNSLKITEEVGHTDLMAAYVDNSSLTIKKPNELSRVLGLKTLATHGLAAVNSVPWDTIANYAKPFLNKVVSTTTNIVTRCLNRVCTNYMPYFFTLLLQLCTFTRSTNSRIKASMPTTIAKNTVKSVGKFCLEASFNYLKSPNFSKLINIIIWFLLLSVCLGSLIYSTAALGVLMSNLGMPSYCTGYREGYLNSTNVTIATYCTGSIPCSVCLSGLDSLDTYPSLETIQITISSFKWDLTAFGLVAEWFLAYILFTRFFYVLGLAAIMQLFFSYFAVHFISNSWLMWLIINLVQMAPISAMVRMYIFFASFYYVWKSYVHVVDGCNSSTCMMCYKRNRATRVECTTIVNGVRRSFYVYANGGKGFCKLHNWNCVNCDTFCAGSTFISDEVARDLSLQFKRPINPTDQSSYIVDSVTVKNGSIHLYFDKAGQKTYERHSLSHFVNLDNLRANNTKGSLPINVIVFDGKSKCEESSAKSASVYYSQLMCQPILLLDQALVSDVGDSAEVAVKMFDAYVNTFSSTFNVPMEKLKTLVATAEAELAKNVSLDNVLSTFISAARQGFVDSDVETKDVVECLKLSHQSDIEVTGDSCNNYMLTYNKVENMTPRDLGACIDCSARHINAQVAKSHNIALIWNVKDFMSLSEQLRKQIRSAAKKNNLPFKLTCATTRQVVNVVTTKIALKGG

SEQ ID NO: 15907 - protein, 1946 aa, Artificial Sequence
  SARS-CoV-2__MT831463.1__non-structural protein 3 (NSP3)
MAPTKVTFGDDTVIEVQGYKSVNITFELDERIDKVLNEKCSAYTVELGTEVNEFACVVADAVIKTLQPVSELLTPLGIDLDEWSMATYYLFDESGEFKLASHMYCSFYPPDEDEEEGDCEEEEFEPSTQYEYGTEDDYQGKPLEFGATSAALQPEEEQEEDWLDDDSQQTVGQQDGSEDNQTTTIQTIVEVQPQLEMELTPVVQTIEVNSFSGYLKLTDNVYIKNADIVEEAKKVKPTVVVNAANVYLKHGGGVAGALNKATNNAMQVESDDYIATNGPLKVGGSCVLSGHNLAKHCLHVVGPNVNKGEDIQLLKSAYENFNQHEVLLAPLLSAGIFGADPIHSLRVCVDTVRTNVYLAVFDKNLYDKLVSSFLEMKSEKQVEQKIAEIPKEEVKPFITESKPSVEQRKQDDKKIKACVEEVTTTLEETKFLTENLLLYIDINGNLHPDSATLVSDIDITFLKKDAPYIVGDVVQEGVLTAVVIPTKKAGGTTEMLAKALRKVPTDNYITTYPGQGLNGYTVEEAKTVLKKCKSAFYILPSIISNEKQEILGTVSWNLREMLAHAEETRKLMPVCVETKAIVSTIQRKYKGIKIQEGVVDYGARFYFYTSKTTVASLINTLNDLNETLVTMPLGYVTHGLNLEEAARYMRSLKVPATVSVSSPDAVTAYNGYLTSSSKTPEEHFIETISLAGSYKDWSYSGQSTQLGIEFLKRGDKSVYYTSNPTTFHLDGEVITFDNLKTLLSLREVRTIKVFTTVDNINLHTQVVDMSMTYGQQFGPTYLDGADVTKIKPHNSHEGKTFYVLPNDDTLRVEAFEYYHTTDPSFLGRYMSALNHTKKWKYPQVNGLTSIKWADNNCYLATALLTLQQIELKFNPPALQDAYYRARAGEAANFCALILAYCNKTVGELGDVRETMSYLFQHANLDSCKRVLNVVCKTCGQQQTTLKGVEAVMYMGTLSYEQFKKGVQIPCTCGKQATKYLVQQESPFVMMSAPPAQYELKHGTFTCASEYTGNYQCGHYKHITSKETLYCIDGALLTKSSEYKGPITDVFYKENSYTTTIKPVTYKLDGVVCTEIDPKLDNYYKKDNSYFTEQPIDLVPNQPYPNASFDNFKFVCDNIKFADDLNQLTGYKKPASRELKVTFFPDLNGDVVAIDYKHYTPSFKKGAKLLHKPIVWHVNNATNKATYKPNIWCIRCLWSTKPVETSNSFDVLKSEDAQGMDNLACEDLKPVSEEVVENPTIQKDVLECNVKTTEVVGDIILKPANNSLKITEEVGHTDLMAAYVDNSSLTIKKPNELSRVLGLKTLATHGLAAVNSVPWDTIANYAKPFLNKVVSTTTNIVTRCLNRVCTNYMPYFFTLLLQLCTFTRSTNSRIKASMPTTIAKNTVKSVGKFCLEASFNYLKSPNFSKLINIIIWFLLLSVCLGSLIYSTAALGVLMSNLGMPSYCTGYREGYLNSTNVTIATYCTGSIPCSVCLSGLDSLDTYPSLETIQITISSFKWDLTAFGLVAEWFLAYILFTRFFYVLGLAAIMQLFFSYFAVHFISNSWLMWLIINLVQMAPISAMVRMYIFFASFYYVWKSYVHVVDGCNSSTCMMCYKRNRATRVECTTIVNGVRRSFYVYANGGKGFCKLHNWNCVNCDTFCAGSTFISDEVARDLSLQFKRPINPTDQSSYIVDSVTVKNGSIHLYFDKAGQKTYERHSLSHFVNLDNLRANNTKGSLPINVIVFDGKSKCEESSAKSASVYYSQLMCQPILLLDQALVSDVGDSAEVAVKMFDAYVNTFSSTFNVPMEKLKTLVATAEAELAKNVSLDNVLSTFISAARQGFVDSDVETKDVVECLKLSHQSDIEVTGDSCNNYMLTYNKVENMTPRDLGACIDCSARHINAQVAKSHNIALIWNVKDFMSLSEQLRKQIRSAAKKNNLPFKLTCATTRQVVNVVTTKIALKGG

SEQ ID NO: 15908 - protein, 1946 aa, Artificial Sequence
  SARS-CoV-2__MT831464.1__non-structural protein 3 (NSP3)
MAPTKVTFGDDTVIEVQGYKSVNITFELDERIDKVLNEKCSAYTVELGTEVNEFACVVADAVIKTLQPVSELLTPLGIDLDEWSMATYYLFDESGEFKLASHMYCSFYPPDEDEEEGDCEEEEFEPSTQYEYGTEDDYQGKPLEFGATSAALQPEEEQEEDWLDDDSQQTVGQQDGSEDNQTTTIQTIVEVQPQLEMELTPVVQTIEVNSFSGYLKLTDNVYIKNADIVEEAKKVKPTVVVNAANVYLKHGGGVAGALNKATNNAMQVESDDYIATNGPLKVGGSCVLSGHNLAKHCLHVVGPNVNKGEDIQLLKSAYENFNQHEVLLAPLLSAGIFGADPIHSLRVCVDTVRTNVYLAVFDKNLYDKLVSSFLEMKSEKQVEQKIAEIPKEEVKPFITESKPSVEQRKQDDKKIKACVEEVTTTLEETKFLTENLLLYIDINGNLHPDSATLVSDIDITFLKKDAPYIVGDVVQEGVLTAVVIPTKKAGGTTEMLAKALRKVPTDNYITTYPGQGLNGYTVEEAKTVLKKCKSAFYILPSIISNEKQEILGTVSWNLREMLAHAEETRKLMPVCVETKAIVSTIQRKYKGIKIQEGVVDYGARFYFYTSKTTVASLINTLNDLNETLVTMPLGYVTHGLNLEEAARYMRSLKVPATVSVSSPDAVTAYNGYLTSSSKTPEEHFIETISLAGSYKDWSYSGQSTQLGIEFLKRGDKSVYYTSNPTTFHLDGEVITFDNLKTLLSLREVRTIKVFTTVDNINLHTQVVDMSMTYGQQFGPTYLDGADVTKIKPHNSHEGKTFYVLPNDDTLRVEAFEYYHTTDPSFLGRYMSALNHTKKWKYPQVNGLTSIKWADNNCYLATALLTLQQIELKFNPPALQDAYYRARAGEAANFCALILAYCNKTVGELGDVRETMSYLFQHANLDSCKRVLNVVCKTCGQQQTTLKGVEAVMYMGTLSYEQFKKGVQIPCTCGKQATKYLVQQESPFVMMSAPPAQYELKHGTFTCASEYTGNYQCGHYKHITSKETLYCIDGALLTKSSEYKGPITDVFYKENSYTTTIKPVTYKLDGVVCTEIDPKLDNYYKKDNSYFTEQPIDLVPNQPYPNASFDNFKFVCDNIKFADDLNQLTGYKKPASRELKVTFFPDLNGDVVAIDYKHYTPSFKKGAKLLHKPIVWHVNNATNKATYKPNTWCIRCLWSTKPVETSNSFDVLKSEDAQGMDNLACEDLKPVSEEVVENPTIQKDVLECNVKTTEVVGDIILKPANNSLKITEEVGHTDLMAAYVDNSSLTIKKPNELSRVLGLKTLATHGLAAVNSVPWDTIANYAKPFLNKVVSTTTNIVTRCLNRVCTNYMPYFFTLLLQLCTFTRSTNSRIKASMPTTIAKNTVKSVGKFCLEASFNYLKSPNFSKLINIIIWFLLLSVCLGSLIYSTAALGVLMSNLGMPSYCTGYREGYLNSTNVTIATYCTGSIPCSVCLSGLDSLDTYPSLETIQITISSFKRDLTAFGLVAEWFLAYILFTRFFYVLGLAAIMQLFFSYFAVHFISNSWLMWLIINLVQMAPISAMVRMYIFFASFYYVWKSYVHVVDGCNSSTCMMCYKRNRATRVECTTIVNGVRRSFYVYANGGKGFCKLHNWNCVNCDTFCAGSTFISDEVARDLSLQFKRPINPTDQSSYIVDSVTVKNGSIHLYFDKAGQKTYERHSLSHFVNLDNLRANNTKGSLPINVIVFDGKSKCEESSAKSASVYYSQLMCQPILLLDQALVSDVGDSAEVAVKMFDAYVNTFSSTFNVPMEKLKTLVATAEAELAKNVSLDNVLSTFISAARQGFVDSDVETKDVVECLKLSHQSDIEVTGDSCNNYMLTYNKVENMTPRDLGACIDCSARHINAQVAKSHNIALIWNVKDFMSLSEQLRKQIRSAAKKNNLPFKLTCATTRQVVNVVTTKIALKGG

SEQ ID NO: 15909 - protein, 1946 aa, Artificial Sequence
  SARS-CoV-2__MT831471.1__non-structural protein 3 (NSP3)
MAPTKVTFGDDTVIEVQGYKSVNITFELDERIDKVLNEKCSAYTVELGTEVNEFACVVADAVIKTLQPVSELLTPLGIDLDEWSMATYYLFDESGEFKLASHMYCSFYPPDEDEEEGDCEEEEFEPSTQYEYGTEDDYQGKPLEFGATSAALQPEEEQEEDWLDDDSQQTVGQQDGSEDNQTTTIQTIVEVQPQLEMEITPVVQTIEVNSFSGYLKLTDNVYIKNADIVEEAKKVKPTVVVNAANVYLKHGGGVAGALNKATNNAMQVESDDYIATNGPLKVGGSCVLSGHNLAKHCLHVVGPNVNKGEDIQLLKSAYENFNQHEVLLAPLLSAGIFGADPIHSLRVCVDTVRTNVYLAVFDKNLYDKLVSSFLEMKSEKQVEQKIAEIPKEEVKPFITESKPSVEQRKQDDKKIKACVEEVTTTLEETKFLTENLLLYIDINGNLHPDSATLVSDIDITFLKKDAPYIVGDVVQEGVLTAVVIPTKKAGGTTEMLAKALRKVPTDNYITTYPGQGLNGYTVEEAKTVLKKCKSAFYILPSIISNEKQEILGTVSWNLREMLAHAEETRKLMPVCVETKAIVSTIQRKYKGIKIQEGVVDYGARFYFYTSKTTVASLINTLNDLNETLVTMPLGYVTHGLNLEEAARYMRSLKVPATVSVSSPDAVTAYNGYLTSSSKTPEEHFIETISLAGSYKDWSYSGQSTQLGIEFLKRGDKSVYYTSNPTTFHLDGEVITFDNLKTLLSLREVRTIKVFTTVDNINLHTQVVDMSMTYGQQFGPTYLDGADVTKIKPHNSHEGKTFYVLPNDDTLRVEAFEYYHTTDPSFLGRYMSALNHTKKWKYPQVNGLTSIKWADNNCYLATALLTLQQIELKFNPPALQDAYYRARAGEAANFCALILAYCNKTVGELGDVRETMSYLFQHANLDSCKRVLNVVCKTCGQQQTTLKGVEAVMYMGTLSYEQFKKGVQIPCTCGKQATKYLVQQESPFVMMSAPPAQYELKHGTFTCASEYTGNYQCGHYKHITSKETLYCIDGALLTKSSEYKGPITDVFYKENSYTTTIKPVTYKLDGVVCTEIDPKLDNYYKKDNSYFTEQPIDLVPNQPYPNASFDNFKFVCDNIKFADDLNQLTGYKKPASRELKVTFFPDLNGDVVAIDYKHYTPSFKKGAKLLHKPIVWHVNNATNKATYKPNTWCIRCLWSTKPVETSNSFDVLKSEDAQGMDNLACEDLKPVSEEVVENPTIQKDVLECNVKTTEVVGDIILKPANNSLKITEEVGHTDLMAAYVDNSSLTIKKPNELSRVLGLKTLATHGLAAVNSVPWDTIANYAKPFLNKVVSTTTNIVTRCLNRVCTNYMPYFFTLLLQLCTFTRSTNSRIKASMPTTIAKNTVKSVGKFCLEASFNYLKSPNFSKLINIIIWFLLLSVCLGSLIYSTAALGVLMSNLGMPSYCTGYREGYLNSTNVTIATYCTGSIPCSVCLSGLDSLDTYPSLETIQITISSFKWDLTAFGLVAEWFLAYILFTRFFYVLGLAAIMQLFFSYFAVHFISNSWLMWLIINLVQMAPISAMVRMYIFFASFYYVWKSYVHVVDGCNSSTCMMCYKRNRATRVECTTIVNGVRRSFYVYANGGKGFCKLHNWNCVNCDTFCAGSTFISDEVARDLSLQFKRPINPTDQSSYIVDSVTVKNGSIHLYFDKAGQKTYERHSLSHFVNLDNLRANNTKGSLPINVIVFDGKSKCEESSAKSASVYYSQLMCQPILLLDQALVSDVGDSAEVAVKMFDAYVNTFSSTFNVPMEKLKTLVATAEAELAKNVSLDNVLSTFISAARQGFVDSDVETKDVVECLKLSHQSDIEVTGDSCNNYMLTYNKVENMTPRDLGACIDCSARHINAQVAKSHNIALIWNVKDFMSLSEQLRKQIRSAAKKNNLPFKLTCATTRQVVNVVTTKIALKGG

SEQ ID NO: 15910 - protein, 1946 aa, Artificial Sequence
  SARS-CoV-2__MT831542.1__non-structural protein 3 (NSP3)
MAPTKVTFGDDTVIEVQGYKSVNITFELDERIDKVLNEKCSAYTVELGTEVNEFACVVADAVIKTLQPVSELLTPLGIDLDEWSMATYYLFDESGEFKLASHMYCSFYPPDEDEEEGDCEEEEFEPSTQYEYGTEDDYQGKPLEFGATSAALQPEEEQEEDWLDDDSQQTVGQQDGSEDNQTTTIQTIVEVQPQLEMELTPVVQTIEVNSFSGYLKLTDNVYIKNADIVEEAKKVKPTVVVNAANVYLKHGGGVAGALNKATNNAMQVESDDYIATNGPLKVGGSCVLSGHNLAKHCLHVVGPNVNKGEDIQLLKSAYENFNQHEVLLAPLLSAGIFGADPIHSLRVCVDTVRTNVYLAVFDKNLYDKLVSSFLEMKSEKQVEQKIAEIPKEEVKPFITESKPSVEQRKQDDKKIKACVEEVTTTLEETKFLTENLLLYIDINGNLHPDSATLVSDIDITFLKKDAPYIVGDVVQEGVLTAVVIPTKKAGGTTEMLAKALRKVPTDNYITTYPGQGLNGYTVEEAKTVLKKCKSAFYILPSIISNEKQEILGTVSWNLREMLAHAEETRKLMPVCVETKAIVSTIQRKYKGIKIQEGVVDYGARFYFYTSKTTVASLINTLNDLNETLVTMPLGYVTHGLNLEEAARYMRSLKVPATVSVSSPDAVTAYNGYLTSSSKTPEEHFIETISLAGSYKDWSYSGQSTQLGIEFLKRGDKSVYYTSNPTTFHLDGEVITFDNLKTLLSLREVRTIKVFTTVDNINLHTQVVDMSMTYGQQFGPTYLDGADVTKIKPHNSHEGKTFYVLPNDDTLRVEAFEYYHTTDPSFLGRYMSALNHTKKWKYPQVNGLTSIKWADNNCYLATALLTLQQIELKFNPPALQDAYYRARAGEAANFCALILAYCNKTVGELGDVRETMSYLFQHANLDSCKRVLNVVCKTCGQQQTTLKGVEAVMYMGTLSYEQFKKGVQIPCTCGKQATKYLVQQESPFVMMSAPPAQYELKHGTFTCASEYTGNYQCGHYKHITSKETLYCIDGALLTKSSEYKGPITDVFYKENSYTTTIKPVTYKLDGVVCTEIDPKLDNYYKKDNSYFTEQPIDLVPNQPYPNASFDNFKFVCDNIKFADDLNQLTGYKKPASRELKVTFFPDLNGDVVAIDYKHYTPSFKKGAKLLHKPIVWHVNNATNKATYKPNTWCVRCLWSTKPVETSNSFDVLKSEDAQGMDNLACEDLKPVSEEVVENPTIQKDVLECNVKTTEVVGDIILKPANNSLKITEEVGHTDLMAAYVDNSSLTIKKPNELSRVLGLKTLATHGLAAVNSVPWDTIANYAKPFLNKVVSTTTNIVTRCLNRVCTNYMPYFFTLLLQLCTFTRSTNSRIKASMPTTIAKNTVKSVGKFCLEASFNYLKSPNFSKLINIIIWFLLLSVCLGSLIYSTAALGVLMSNLGMPSYCTGYREGYLNSTNVTIATYCTGSIPCSVCLSGLDSLDTYPSLETIQITISSFKWDLTAFGLVAEWFLAYILFTRFFYVLGLAAIMQLFFSYFAVHFISNSWLMWLIINLVQMAPISAMVRMYIFFASFYYVWKSYVHVVDGCNSSTCMMCYKRNRATRVECTTIVNGVRRSFYVYANGGKGFCKLHNWNCVNCDTFCAGSTFISDEVARDLSLQFKRPINPTDQSSYIVDSVTVKNGSIHLYFDKAGQKTYERHSLSHFVNLDNLRANNTKGSLPINVIVFDGKSKCEESSAKSASVYYSQLMCQPILLLDQALVSDVGDSAEVAVKMFDAYVNTFSSTFNVPMEKLKTLVATAEAELAKNVSLDNVLSTFISAARQGFVDSDVETKDVVECLKLSHQSDIEVTGDSCNNYMLTYNKVENMTPRDLGACIDCSARHINAQVAKSHNIALIWNVKDFMSLSEQLRKQIRSAAKKNNLPFKLTCATTRQVVNVVTTKIALKGG

SEQ ID NO: 15911 - protein, 1946 aa, Artificial Sequence
  SARS-CoV-2__MT831569.1__non-structural protein 3 (NSP3)
MAPTKVTFGDDTVIEVQGYKSVNITFELDERIDKVLNEKCSAYTVELGTEVNEFACVVADAVIKTLQPVSELLTPLGIDLDEWSMATYYLFDESGEFKLASHMYCSFYPPDEDEEEGDCEEEEFEPSTQYEYGTEDDYQGKPLEFGATSAALQPEEEQEEDWLDDDSQQTVGQQDGSEDNQTTTIQTIVEVQPQLEMELTPVVQTIEVNSFSGYLKLTDNVYIKNADIVEEAKKVKPTVVVNAANIYLKHGGGVAGALNKATNNAMQVESDDYIATNGPLKVGGSCVLSGHNLAKHCLHVVGPNVNKGEDIQLLKSAYENFNQHEVLLAPLLSAGIFGADPIHSLRVCVDTVRTNVYLAVFDKNLYDKLVSSFLEMKSEKQVEQKIAEIPKEEVKPFITESKPSVEQRKQDDKKIKACVEEVTTTLEETKFLTENLLLYIDINGNLHPDSATLVSDIDITFLKKDAPYIVGDVVQEGVLTAVVIPTKKAGGTTEMLAKALRKVPTDNYITTYPGQGLNGYTVEEAKTVLKKCKSAFYILPSIISNEKQEILGTVSWNLREMLAHAEETRKLMPVCVETKAIVSTIQRKYKGIKIQEGVVDYGARFYFYTSKTTVASLINTLNDLNETLVTMPLGYVTHGLNLEEAARYMRSLKVPATVSVSSPDAVTAYNGYLTSSSKTPEEHFIETISLAGSYKDWSYSGQSTQLGIEFLKRGDKSVYYTSNPTTFHLDGEVITFDNLKTLLSLREVRTIKVFTTVDNINLHTQVVDMSMTYGQQFGPTYLDGADVTKIKPHNSHEGKTFYVLPNDDTLRVEAFEYYHTTDPSFLGRYMSALNHTKKWKYPQVNGLTSIKWADNNCYLATALLTLQQIELKFNPPALQDAYYRARAGEAANFCALILAYCNKTVGELGDVRETMSYLFQHANLDSCKRVLNVVCKTCGQQQTTLKGVEAVMYMGTLSYEQFKKGVQIPCTCGKQATKYLVQQESPFVMMSAPPAQYELKHGTFTCASEYTGNYQCGHYKHITSKETLYCIDGALLTKSSEYKGPITDVFYKENSYTTTIKPVTYKLDGVVCTEIDPKLDNYYKKDNSYFTEQPIDLVPNQPYPNASFDNFKFVCDNIKFADDLNQLTGYKKPASRELKVTFFPDLNGDVVAIDYKHYTPSFKKGAKLLHKPIVWHVNNATNKATYKPNTWCIRCLWSTKPVETSNSFDVLKSEDAQGMDNLACEDLKPVSEEVVENPTIQKDVLECNVKTTEVVGDIILKPANNSLKITEEVGHTDLMAAYVDNSSLTIKKPNELSRVLGLKTLATHGLAAVNSVPWDTIANYAKPFLNKVVSTTTNIVTRCLNRVCTNYMPYFFTLLLQLCTFTRSTNSRIKASMPTTIAKNTVKSVGKFCLEASFNYLKSPNFSKLINIIIWFLLLSVCLGSLIYSTAALGVLMSNLGMPSYCTGYREGYLNSTNVTIATYCTGSIPCSVCLSGLDSLDTYPSLETIQITISSFKWDLTAFGLVAEWFLAYILFTRFFYVLGLAAIMQLFFSYFAVHFISNSWLMWLIINLVQMAPISAMVRMYIFFASFYYVWKSYVHVVDGCNSSTCMMCYKRNRATRVECTTIVNGVRRSFYVYANGGKGFCKLHNWNCVNCDTFCAGSTFISDEVARDLSLQFKRPINPTDQSSYIVDSVTVKNGSIHLYFDKAGQKTYERHSLSHFVNLDNLRANNTKGSLPINVIVFDGKSKCEESSAKSASVYYSQLMCQPILLLDQALVSDVGDSAEVAVKMFDAYVNTFSSTFNVPMEKLKTLVATAEAELAKNVSLDNVLSTFISAARQGFVDSDVETKDVVECLKLSHQSDIEVTGDSCNNYMLTYNKVENMTPRDLGACIDCSARHINAQVAKSHNIALIWNVKDFMSLSEQLRKQIRSAAKKNNLPFKLTCATTRQVVNVVTTKIALKGG

SEQ ID NO: 15912 - protein, 1946 aa, Artificial Sequence
  SARS-CoV-2__MT831579.1__non-structural protein 3 (NSP3)
MAPTKVTFGDDTVIEVQGYKSVNITFELDERIDKVLNEKCSAYTVELGTEVNEFACVVADAVIKTLQPVSELLTPLGIDLDEWSMATYYLFDESGEFKLASHMYCSFYPPDEDEEEGDCEEEEFEPSTQYEYGTEDDYQGKPLEFGATSAALQPEEEQEEDWLDDDSQQTVGQQDGSEDNQTTTIQTIVEVQPQLEMELTPVVQTIEVNSFSGYLKLTDNVYIKNADIVEEAKKVKPTVVVNAANVYLKHGGGVAGALNKATNNAMQVESDDYIATNGPLKVGGSCVLSGHNLAKHCLHVVGPNVNKGEDIQLLKSAYENFNQHEVLLAPLLSAGIFGADPIHSLRVCVDTVRTNVYLAVFDKNLYDKLVSSFLEMKSEKQVEQKIAEIPKEEVKPFITESKPSVEQRKQDDKKIKACVEEVTTTLEETKFLTENLLLYIDINGNLHPDSATLVSDIDITFLKKDAPYIVGDVVQEGVLTAVVIPTKKAGGTTEMLAKALRKVPTDNYITTYPGQGLNGYTVEEAKTVLKKCKSAFYILPSIISNEKQEILGTVSWNLREMLAHAEETRKLMPVCVETKAIVSTIQRKYKGIKIQEGVVDYGARFYFYTSKTTVASLINTLNNLNETLVTMPLGYVTHGLNLEEAARYMRSLKVPATVSVSSPDAVTAYNGYLTSSSKTPEEHFIETISLAGSYKDWSYSGQSTQLGIEFLKRGDKSVYYTSNPTTFHLDGEVITFDNLKTLLSLREVRTIKVFTTVDNINLHTQVVDMSMTYGQQFGPTYLDGADVTKIKPHNSHEGKTFYVLPNDDTLRVEAFEYYHTTDPSFLGRYMSALNHTKKWKYPQVNGLTSIKWADNNCYLATALLTLQQIELKFNPPALQDAYYRARAGEAANFCALILAYCNKTVGELGDVRETMSYLFQHANLDSCKRVLNVVCKTCGQQQTTLKGVEAVMYMGTLSYEQFKKGVQIPCTCGKQATKYLVQQESPFVMMSAPPAQYELKHGTFTCASEYTGNYQCGHYKHITSKETLYCIDGALLTKSSEYKGPITDVFYKENSYTTTIKPVTYKLDGVVCTEIDPKLDNYYKKDNSYFTEQPIDLVPNQPYPNASFDNFKFVCDNIKFADDLNQLTGYKKPASRELKVTFFPDLNGDVVAIDYKHYTPSFKKGAKLLHKPIVWHVNNATNKATYKPNTWCIRCLWSTKPVETSNSFDVLKSEDAQGMDNLACEDLKPVSEEVVENPTIQKDVLECNVKTTEVVGDIILKPANNSLKITEEVGHTDLMAAYVDNSSLTIKKPNELSRVLGLKTLATHGLAAVNSVPWDTIANYAKPFLNKVVSTTTNIVTRCLNRVCTNYMPYFFTLLLQLCTFTRSTNSRIKASMPTTIAKNTVKSVGKFCLEASFNYLKSPNFSKLINIIIWFLLLSVCLGSLIYSTAALGVLMSNLGMPSYCTGYREGYLNSTNVTIATYCTGSIPCSVCLSGLDSLDTYPSLETIQITISSFKWDLTAFGLVAEWFLAYILFTRFFYVLGLAAIMQLFFSYFAVHFISNSWLMWLIINLVQMAPISAMVRMYIFFASFYYVWKSYVHVVDGCNSSTCMMCYKRNRATRVECTTIVNGVRRSFYVYANGGKGFCKLHNWNCVNCDTFCAGSTFISDEVARDLSLQFKRPINPTDQSSYIVDSVTVKNGSIHLYFDKAGQKTYERHSLSHFVNLDNLRANNIKGSLPINVIVFDGKSKCEESSAKSASVYYSQLMCQPILLLDQALVSDVGDSAEVAVKMFDAYVNTFSSTFNVPMEKLKTLVATAEAELAKNVSLDNVLSTFISAARQGFVDSDVETKDVVECLKLSHQSDIEVTGDSCNNYMLTYNKVENMTPRDLGACIDCSARHINAQVAKSHNIALIWNVKDFMSLSEQLRKQIRSAAKKNNLPFKLTCATTRQVVNVVTTKIALKGG

SEQ ID NO: 15913 - protein, 1946 aa, Artificial Sequence
  SARS-CoV-2__MT831587.1__non-structural protein 3 (NSP3)
MAPTKVTFGDDTVIEVQGYKSVNITFELDERIDKVLNEKCSAYTVELGTEVNEFACVVADAVIKTLQPVSELLTPLGIDLDEWSMATYYLFDESGEFKLASHMYCSFYPPDEDEEEGDCEEEEFEPSTQYEYGTEDDYQGKPLEFGATSAALQPEEEQEEDWLDDDSQQTVGQQDGSEDNQTTTIQTIVEVQPQLEMELTPVVQTIEVNSFSGYLKLTDNVYIKNADIVEEAKKVKPTVVVNAANVYLKHGGGVAGALNKATNNAMQVESDDYIATNGPLKVGGSCVLSGHNLAKHCLHVVGPNVNKGEDIQLLKSAYENFNQHEVLLAPLLSAGIFGADPIHSLRVCVDTVRTNVYLAVFDKNLYDKLVSSFLEMKSEKQVEQKIAEIPKEEVKPFITESKPSVEQRKQDDKKIKACVEEVTTTLEETKFLTENLLLYIDINGNLHPDSATLVSDIDITFLKKDAPYIVGDVVQEGVLTAVVIPTKKAGGTTEMLAKALRKVPTDNYITTYPGQGLNGYTVEEAKTVLKKCKSAFYILPSIISNEKQEILGTVSWNLREMLAHAEETRKLMPVCVETKAIVSTIQRKYKGIKIQEGVVDYGARFYFYTSKTTVASLINTLNDLNETLVTMPLGYVTHGLNLEEAARYMRSLKVPATVSVSSPDAVTAYNGYLTSSSKTPEEHFIETISLAGSYKDWSYSGQSTQLGIEFLKRGDKSVYYTSNPTTFHLDGEVITFDNLKTLLSLREVRTIKVFTTVDNINLHTQVVDMSMTYGQQFGLTYLDGADVTKIKPHNSHEGKTFYVLPNDDTLRVEAFEYYHTTDPSFLGRYMSALNHTKKWKYPQVNGLTSIKWADNNCYLATALLTLQQIELKFNPPALQDAYYRARAGEAANFCALILAYCNKTVGELGDVRETMSYLFQHANLDSCKRVLNVVCKTCGQQQTTLKGVEAVMYMGTLSYEQFKKGVQIPCTCGKQATKYLVQQESPFVMMSAPPAQYELKHGTFTCASEYTGNYQCGHYKHITSKETLYCIDGALLTKSSEYKGPITDVFYKENSYTTTIKPVTYKLDGVVCTEIDPKLDNYYKKDNSYFTEQPIDLVPNQPYPNASFDNFKFVCDNIKFADDLNQLTGYKKPASRELKVTFFPDLNGDVVAIDYKHYTPSFKKGAKLLHKPIVWHVNNATNKATYKPNTWCIRCLWSTKPVETSNSFDVLKSEDAQGMDNLACEDLKPVSEEVVENPTIQKDVLECNVKTTEVVGDIILKPANNSLKITEEVGHTDLMAAYVDNSSLTIKKPNELSRVLGLKTLATHGLAAVNSVPWDTIANYAKPFLNKVVSTTTNIVTRCLNRVCTNYMPYFFTLLLQLCTFTRSTNSRIKASMPTTIAKNTVKSVGKFCLEASFNYLKSPNFSKLINIIIWFLLLSVCLGSLIYSTAALGVLMSNLGMPSYCTGYREGYLNSTNVTIATYCTGSIPCSVCLSGLDSLDTYPSLETIQITISSFKWDLTAFGLVAEWFLAYILFTRFFYVLGLAAIMQLFFSYFAVHFISNSWLMWLIINLVQMAPISAMVRMYIFFASFYYVWKSYVHVVDGCNSSTCMMCYKRNRATRVECTTIVNGVRRSFYVYANGGKGFCKLHNWNCVNCDTFCAGSTFISDEVARDLSLQFKRPINPTDQSSYIVDSVTVKNGSIHLYFDKAGQKTYERHSLSHFVNLDNLRANNTKGSLPINVIVFDGKSKCEESSAKSASVYYSQLMCQPILLLDQALVSDVGDSAEVAVKMFDAYVNTFSSTFNVPMEKLKTLVATAEAELAKNVSLDNVLSTFISAARQGFVDSDVETKDVVECLKLSHQSDIEVTGDSCNNYMLTYNKVENMTPRDLGACIDCSARHINAQVAKSHNIALIWNVKDFMSLSEQLRKQIRSAAKKNNLPFKLTCATTRQVVNVVTTKIALKGG

SEQ ID NO: 15914 - protein, 1946 aa, Artificial Sequence
  SARS-CoV-2__MT831625.1__non-structural protein 3 (NSP3)
MAPTKVTFGDDTVIEVQGYKSVNITFELDERIDKVLNEKCSAYTVELGTEVNEFACVVADAVIKTLQPVSELLTPLGIDLDEWSMATYYLFDESGEFKLASHMYCSFYPPDEDEEEGDCEEEEFEPSTQYEYGTEDDYQGKPLEFGATSAALQPEEEQEEDWLDDDSQQTVGQQDGSEDNQTTTIQTIVEVQPQLEMELTPVVQTIEVNSFSGYLKLTDNVYIKNADIVEEAKKVKPTVVVNAANVYLKHGGGVAGALNKATNNAMQVESDDYIATNGPLKVGGSCVLSGHNLAKHCLHVVGPNVNKGEDIQLLKSAYENFNQHEVLLAPLLSAGIFGADPIHSLRVCVDTVRTNVYLAVFDKNLYDKLVSSFLEMKSEKQVEQKIAEIPKEEVKPFITESKPSVEQRKQDDKKIKACVEEVTTTLEETKFLTENLLLYIDINGNLHPDSATLVSDIDITFLKKDAPYIVGDVVQEGVLTAVVIPTKKAGGTTEMLAKALRKVPTDNYITTYPGQGLNGYTVEEAKTVLKKCKSAFYILPSIISNEKQEILGTVSWNLREMLAHAEETRKLMPVCVETKAIVSTIQRKYKGIKIQEGVVDYGARFYFYTSKTTVASLINTLNDLNETLVTMPLGYVTHGLNLEEAARYMRSLKVPATVSVSSPDAVTAYNGYLTSSSKTPEEHFIETISLAGSYKDWSYSGQSTQLGIEFLKRGDKSVYYTSNPTTFHLDGEVITFDNLKTLLSLREVRTIKVFTTVDNINLHTQVVDMSMTYGQQFGPTYLDGADVTKIKPHNSHEGKTFYVLPNDDTLRVEAFEYYHTTDPSFLGRYMSALNHTKKWKYPQVNGLTSIKWADNNCYLATALLTLQQIELKFNPPALQDAYYRARAGEAANFCALILAYCNKTVGELGDVRETMSYLFQHANLDSCKRVLNVVCKTCGQQQTTLKGVEAVMYMGTLSYEQFKKGVQIPCTCGKQVTKYLVQQESPFVMMSAPPAQYELKHGTFICASEYTGNYQCGHYKHITSKETLYCIDGALLTKSSEYKGPITDVFYKENSYTTTIKPVTYKLDGVVCTEIDPKLDNYYKKDNSYFTEQPIDLVPNQPYPNASFDNFKFVCDNIKFADDLNQLTGYKKPASRELKVTFFPDLNGDVVAIDYKHYTPSFKKGAKLLHKPIVWHVNNATNKATYKPNTWCIRCLWSTKPVETSNSFDVLKSEDAQGMDNLACEDLKPVSEEVVENPTIQKDVLECNVKTTEVVGDIILKPANNSLKITEEVGHTDLMAAYVDNSSLTIKKPNELSRVLGLKTLATHGLAAVNSVPWDTIANYAKPFLNKVVSTTTNIVTRCLNRVCTNYMPYFFTLLLQLCTFTRSTNSRIKASMPTTIAKNTVKSVGKFCLEASFNYLKSPNFSKLINIIIWFLLLSVCLGSLIYSTAALGVLMSNLGMPSYCTGYREGYLNSTNVTIATYCTGSIPCSVCLSGLDSLDTYPSLETIQITISSFKWDLTAFGLVAEWFLAYILFTRFFYVLGLAAIMQLFFSYFAVHFISNSWLMWLIINLVQMAPISAMVRMYIFFASFYYVWKSYVHVVDGCNSSTCMMCYKRNRATRVECTTIVNGVRRSFYVYANGGKGFCKLHNWNCVNCDTFCAGSTFISDEVARDLSLQFKRPINPTDQSSYIVDSVTVKNGSIHLYFDKAGQKTYERHSLSHFVNLDNLRANNTKGSLPINVIVFDGKSKCEESSAKSASVYYSQLMCQPILLLDQALVSDVGDSAEVAVKMFDAYVNTFSSTFNVPMEKLKTLVATAEAELAKNVSLDNVLSTFISAARQGFVDSDVETKDVVECLKLSHQSDIEVTGDSCNNYMLTYNKVENMTPRDLGACIDCSARHINAQVAKSHNIALIWNVKDFMSLSEQLRKQIRSAAKKNNLPFKLTCATTRQVVNVVTTKIALKGG

SEQ ID NO: 15915 - protein, 1946 aa, Artificial Sequence
  SARS-CoV-2__MT831632.1__non-structural protein 3 (NSP3)
MAPTKVTFGDDTVIEVQGYKSVNITFELDERIDKVLNEKCSAYTVELGTEVNEFACVVADAVIKTLQPVSELLTPLGIDLDEWSMATYYLFDESGEFKLASHMYCSFYPPDEDEEEGDCEEEEFEPSTQYEYGTEDDYQGKPLEFGATSAALQPEEEQEEDWLDDDSQQTVGQQDGSEDNQTTTIQTIVEVQPQLEMELTPVVQTIEVNSFSGYLKLTDNVYIKNADIVEEAKKVKPTVVVNAANVYLKHGGGVAGALNKATNNAMQVESDDYIATNGPLKVGGSCVLSGHNLAKHCLHVVGPNVNKGEDIQLLKSAYENFNQHEVLLAPLLSAGIFGADPIHSLRVCVDTVRTNVYLAVFDKNLYDKLVSSFLEMKSEKQVEQKIAEIPKEEVKPFITESKPSVEQRKQDDKKIKACVEEVTTTLEETKFLTENLLLYIDINGNLHPDSATLVSDIDITFLKKDAPYIVGDVVQEGVLTAVVIPTKKAGGTTEMLAKALRKVPTDNYITTYPGQGLNGYTVEEAKTVLKKCKSAFYILPSIISNEKQEILGTVSWNLREMLAHAEETRKLMPVCVETKAIVSTIQRKYKGIKIQEGVVDYGARFYFYTSKTTVASLINTLNDLNETLVTMPLGYVTHGLNLEEAARYMRSLKVPATVSVSSPDAVTAYNGYLTSSSKTPEEHFIETISLAGSYKDWSYSGQSTQLGIEFLKRGDKSVYYTSNPTTFHLDGEVITFDNLKTLLSLREVRTIKVFTTVDNINLHTQVVDMSMTYGQQFGPTYLDGADVTKIKPHNSHEGKTFYVLPNDDTLRVEAFEYYHTTDPSFLGRYMSALNHTKKWKYPQVNGLTSIKWADNNCYLATALLTLQQIELKFNPPALQDAYYRARAGEAANFCALILAYCNKTVGELGDVRETMSYLFQHANLDSCKRVLNVVCKTCGQQQTTLKGVEAVMYMGTLSYEQFKKGVQIPCTCGKQATKYLVQQESPFVMMSAPPAQYELKHGTFTCASEYTGNYQCGHYKHITSKETLYCIDGALLTKSSEYKGPITDVFYKENSYTTTIKPVTYKLDGVVCTEIDPKLDNYYKKDNSYFTEQPIDLVPNQPYPNASFDNFKFVCDNIKFADDLNQLTGYKKPASRELKVTFFPDLNGDVVAIDYKHYTPSFKKGAKLLHKPIVWHVNNATNKATYKPNTWCIRCLWSTKPVETSNSFDVLKSEDAQGMDNLACEDLKPVSEEVVENPTIQKDVLECNVKTTEVVGDIILKPANNSLKITEEVGHTDLMAAYVDNSSLTIKKPNELSRVLGLKTLAIHGLAAVNSVPWDTIANYAKPFLNKVVSTTTNIVTRCLNRVCTNYMPYFFTLLLQLCTFTRSTNSRIKASMPTTIAKNTVKSVGKFCLEASFNYLKSPNFSKLINIIIWFLLLSVCLGSLIYSTAALGVLMSNLGMPSYCTGYREGYLNSTNVTIATYCTGSIPCSVCLSGLDSLDTYPSLETIQITISSFKWDLTAFGLVAEWFLAYILFTRFFYVLGLAAIMQLFFSYFAVHFISNSWLMWLIINLVQMAPISAMVRMYIFFASFYYVWKSYVHVVDGCNSSTCMMCYKRNRATRVECTTIVNGVRRSFYVYANGGKGFCKLHNWNCVNCDTFCAGSTFISDEVARDLSLQFKRPINPTDQSSYIVDSVTVKNGSIHLYFDKAGQKTYERHSLSHFVNLDNLRANNTKGSLPINVIVFDGKSKCEESSAKSASVYYSQLMCQPILLLDQALVSDVGDSAEVAVKMFDAYVNTFSSTFNIPMEKLKTLVATAEAELAKNVSLDNVLSTFISAARQGFVDSDVETKDVVECLKLSHQSDIEVTGDSCNNYMLTYNKVENMTPRDLGACIDCSARHINAQVAKSHNIALIWNVKDFMSLSEQLRKQIRSAAKKNNLPFKLTCATTRQVVNVVTTKIALKGG

SEQ ID NO: 15916 - protein, 1946 aa, Artificial Sequence
  SARS-CoV-2__MT831729.1__non-structural protein 3 (NSP3)
MAPTKVTFGDDTVIEVQGYKSVNITFELDERIDKVLNEKCSAYTVELGTEVNEFACVVADAVIKTLQPVSELLTPLGIDLDEWSMATYYLFDESGEFKLASHMYCSFYPPDEDEEEGDCEEEEFEPSTQYEYGTEDDYQGKPLEFGATSAALQPEEEQEEDWLDDDSQQTVGQQDGSEDNQTTTIQTIVEVQPQLEMELTPVVQTIEVNSFSGYLKLTDNVYIKNADIVEEAKKVKPTVVVNAANVYLKHGGGVAGALNKATNNAMQVESDDYIATNGPLKVGGSCVLSGHNLAKHCLHVVGPNVNKGEDIQLLKSAYENFNQHEVLLAPLLSAGIFGADPIHSLRVCVDTVRTNVYLAVFDKNLYDKLVSSFLEMKSEKQVEQKIAEIPKEEVKPFITESKPSVEQRKQDDKKIKACVEEVTTTLEETKFLTENLLLYIDINGNLHPDSATLVSDIDITFLKKDAPYIVGDVVQEGVLTAVVIPTKKAGGTTEMLAKALRKVPTDNYITTYPGQGLNGYTVEEAKTVLKKCKSAFYILPSIISNEKQEILGTVSWNLREMLAHAEETRKLMPVCVETKAIVSTIQRKYKGIKIQEGVVDYGARFYFYTSKTTVASLINTLNDLNETLVTMPLGYVTHGLNLEEAARYMRSLKVPATVSVSSPDAVTAYNGYLTSSSKTPEEHFIETISLAGSYKDWSYSGQSTQLGIEFLKRGDKSVYYTSNPTTFHLDGEVITFDNLKTLLSLREVRTIKVFTTVDNINLHTQVVDMSMTYGQQFGPTYLDGADVTKIKPHNSHEGKTFYVLPNDDTLRVEAFEYYHTTDPSFLGRYMSALNHTKKWKYPQVNGLTSIKWADNNCYLATALLTLQQIELKFNPPALQDAYYRARAGEAANFCALILAYCNKTVGELGDVRETMSYLFQHANLDSCKRVLNVVCKTCGQQQTTLKGVEAVMYMGTLSYEQFKKGVQIPCTCGKQATKYLVQQESPFVMMSAPPAQYELKHGTFTCASEYTGNYQCGHYKHITSKETLYCIDGALLTKSSEYKGPITDVFYKENSYTTTIKPVTYKLDGVVCTEIDPKLDNYYKKDNSYFTEQPIDLVPNQPYPNASFDNFKFVCDNIKFADDLNQLTGYKKPASRELKVTFFPDLNGDVVAIDYKHYTPSFKKGAKLLHKPIVWHVNNATNKATYKPNTWCIRCLWSTKPVETSNSFDVLKSEDAQGMDNLACEDLKPVSEEVVENPTIQKDVLECNVKTTEVVGDIILKPANNSLKITEEVGHTDLMAAYVDNSSLTIKKPNELSRVLGLKTLATHGLAAVNSVPWDTIANYAKPFLNKVVSTTTNIVTRCLNRVCTNYMPYFFTLLLQLCTFTRSTNSRIKASMPTTIAKNTVKSVGKFCLEASFNYLKSPNFSKLINIIIWFLLLSVCLGSLIYSTAALGVLMSNLGMPSYCTGYREGYLNSTNVTIATYCTGSIPCSVCLSGLDSLDTYPSLETIQITISSFKWDLTAFGLVAEWFLAYILFTRFFYVLGLAAIMQLFFSYFAVHFISNSWLIWLIINLVQMAPISAMVRMYIFFASFYYVWKSYVHVVDGCNSSTCMMCYKRNRATRVECTTIVNGVRRSFYVYANGGKGFCKLHNWNCVNCDTFCAGSTFISDEVARDLSLQFKRPINPTDQSSYIVDSVTVKNGSIHLYFDKAGQKTYERHSLSHFVNLDNLRANNTKGSLPINVIVFDGKSKCEESSAKSASVYYSQLMCQPILLLDQALVSDVGDSAEVAVKMFDAYVNTFSSTFNVPMEKLKTLVATAEAELAKNVSLDNVLSTFISAARQGFVDSDVETKDVVECLKLSHQSDIEVTGDSCNNYMLTYNKVENMTPRDLGACIDCSARHINAQVAKSHNIALIWNVKDFMSLSEQLRKQIRSAAKKNNLPFKLTCATTRQVVNVVTTKIALKGG

SEQ ID NO: 15917 - protein, 1946 aa, Artificial Sequence
  SARS-CoV-2__MT831867.1__non-structural protein 3 (NSP3)
MAPTKVTFGDDTVIEVQGYKSVNITFELDERIDKVLNEKCSAYTVELGTEVNEFACVVADAVIKTLQPVSELLTPLGIDLDEWSMATYYLFDESGEFKLASHMYCSFYPPDEDEEEGDCEEEEFEPSTQYEYGTEDDYQGKPLEFGATSAALQPEEEQEEDWLDDDSQQTVGQQDGSEDNQTTTIQTIVEVQPQLEMELTPVVQTIEVNSFSGYLKLTDNVYIKNADIVEEAKKVKPTVVVNAANVYLKHGGGVAGALNKATNNAMQVESDDYIATNGPLKVGGSCVLSGHNLAKHCLHVVGPNVNKGEDIQLLKSAYENFNQHEVLLAPLLSAGIFGADPIHSLRVCVDTVRTNVYLAVFDKNLYDKLVSSFLEMKSEKQVEQKIAEIPKEEVKPFITESKPSVEQRKQDDKKIKACVEEVTTTLEETKFLTENLLLYIDINGNLHPDSATLVSDIDITFLKKDAPYIVGDVVQEGVLTAVVIPTKKAGGTTEMLAKALRKVPTDNYITTYPGQGLNGYTVEEAKTVLKKCKSAFYILPSIISNEKQEILGTVSWNLREMLAHAEETRKLMPVCVETKAIVSTIQRKYKGIKIQEGVVDYGARFYFYTSKTTVASLINTLNDLNETLVTMPLGYVTHGLNLEEAARYMRSLKVPATVSVSSPDAVTAYNGYLTSSSKTPEEHFIETISLAGSYKDWSYSGQSTQLGIEFLKRGDKSVYYTSNPTTFHLDGEVITFDNLKTLLSLREVRTIKVFTTVDNINLHTQVVDMSMTYGQQFGPTYLDGADVTKIKPHNSHEGKTFYVLPNDDTLRVEAFEYYHTTDPSFLGRYMSALNHTKKWKYPQVNGLTSIKWADNNCYLATALLTLQQIELKFNPPALQDAYYRARAGEAANFCALILAYCNKTVGELGDVRETMSYLFQHANLDSCKRVLNVVCKTCGQQQTTLKGVEAVMYMGTLSYEQFKKGVQIPCTCGKQATKYLVQQESPFVMMSAPPAQYELKHGTFTCASEYTGNYQCGHYKHITSKETLYCIDGALLTKSSEYKGPITDVFYKENSYTTTIKPVTYKLDGVVCTEIDPKLDNYYKKDNSYFTEQPIDLVPNQPYPNASFDNFKFVCDNIKFADDLNQLTGYKKPASRELKVTFFPDLNGDVVAIDYKHYTPSFKKGAKLLHKPIVWHVNNATNKATYKPNTWCIRCLWSTKPVETSNSFDVLKSEDAQGMDNLACEDLKPVSEEVVENPTIQKDVLECNVKTTEVVGDIILKPANNSLKITEEVGHTDLMAAYVDNSSLTIKKPNELSRVLGLKTLATHGLAAVNSVPWDTIANYAKPFLNKVVSTTTNIVTRCLNRVCTNYMPYFFTLLLQLCTFTRSTNSRIKASMPTTIAKNTVKSVGKFCLEASFNYLKSPNFSKLINIIIWFLLLSVCLGSLIYSTAALGVLMSNLGMPSYCTGYREGYLNSTNVTIATYCTGSIPCSVCLSGLDSLDTYPSLETIQITISSFKWDLTAFGLVAEWFLAYILFTRFFYVLGLAAIMQLFFSYFAVHFISNSWLMWLIINLVQMAPISAMVRMYIFFASFYYVWKSYVHVVDGCNSSTCMMCYKRNRATRVECTTIVNGVRRSFYVYANGGKGFCKLHNWNCVNCDTFCAGSTFISDEVARDLSLQFKRPINPTDQSSYIVDSVTVKNGSIHLYFDKAGQKTYERHSLSHFVNLDNLRANNTKGSLPINVIVFDGKSKCEESSAKSASVYYSQLMCQPILLLDQALVSDVGDSAEVAVKMFDAYVNTFSLTFNVPMEKLKTLVATAEAELAKNVSLDNVLSTFISAARQGFVDSDVETKDVVECLKLSHQSDIEVTGDSCNNYMLTYNKVENMTPRDLGACIDCSARHINAQVAKSHNIALIWNVKDFMSLSEQLRKQIRSAAKKNNLPFKLTCATTRQVVNVVTTKIALKGG

SEQ ID NO: 15918 - protein, 1946 aa, Artificial Sequence
  SARS-CoV-2__MT833962.1__non-structural protein 3 (NSP3)
MAPTKVTFGDDTVIEVQGYKSVNITFELDERIDKVLNEKCSAYTVELGTEVNEFACVVADAVIKTLQPVSELLTPLGIDLDEWSMATYYLFDESGEFKLASHMYCSFYPPDEDEEEGDCEEEEFEPSTQYEYGTEDDYQGKPLEFGATSAALQPEEEQEEDWLDDDSQQTVGQQDGSEDNQTTTIQTIVEVQPQLEMELTPVVQTIEVNSFSGYLKLTDNVYIKNADIVEEAKKVKPTVVVNAANVYLKHGGGVAGALNKATNNAMQVESDDYIATNGPLKVGGSCVLSGHNLAKHCLHVVGPNVNKGEDIQLLKSAYENFNQHEVLLAPLLSAGIFGADPIHSLRVCVDTVRTNVYLAVFDKNLYDKLVSSFLEMKSEKQVEQKIAEIPKEEVKPFIIESKPSVEQRKQDDKKIKACVEEVTTTLEETKFLTENLLLYIDINGNLHPDSATLVSDIDITFLKKDAPYIVGDVVQEGVLTAVVIPTKKAGGTTEMLAKALRKVPTDNYITTYPGQGLNGYTVEEAKTVLKKCKSAFYILPSIISNEKQEILGTVSWNLREMLAHAEETRKLMPVCVETKAIVSTIQRKYKGIKIQEGVVDYGARFYFYTSKTTVASLINTLNDLNETLVTMPLGYVTHGLNLEEAARYMRSLKVPATVSVSSPDAVTAYNGYLTSSSKTPEEHFIETISLAGSYKDWSYSGQSTQLGIEFLKRGDKSVYYTSNPTTFHLDGEVITFDNLKTLLSLREVRTIKVFTTVDNINLHTQVVDMSMTYGQQFGPTYLDGADVTKIKPHNSHEGKTFYVLPNDDTLRVEAFEYYHTTDPSFLGRYMSALNHTKKWKYPQVNGLTSIKWADNNCYLATALLTLQQIELKFNPPALQDAYYRARAGEAANFCALILAYCNKTVGELGDVRETMSYLFQHANLDSCKRVLNVVCKTCGQQQTTLKGVEAVMYMGTLSYEQFKKGVQIPCTCGKQATKYLVQQESPFVMMSAPPAQYELKHGTFTCASEYTGNYQCGHYKHITSKETLYCIDGALLTKSSEYKGPITDVFYKENSYTTTIKPVTYKLDGVVCTEIDPKLDNYYKKDNSYFTEQPIDLVPNQPYPNASFDNFKFVCDNIKFADDLNQLTGYKKPASRELKVTFFPDLNGDVVAIDYKHYTPSFKKGAKLLHKPIVWHVNNATNKATYKPNTWCIRCLWSTKPVETSNSFDVLKSEDAQGMDNLACEDLKLVSEEVVENPTIQKDVLECNVKTTEVVGDIILKPANNSLKIIEEVGHTDLMAAYVDNSSLTIKKPNELSRVLGLKTLATHGLAAVNSVPWDTIANYAKPFLNKVVSTTTNIVTRCLNRVCTNYMPYFFTLLLQLCTFTRSTNSRIKASMPTTIAKNTVKSVGKFCLEASFNYLKSPNFSKLINIIIWFLLLSVCLGSLIYSTAALGVLMSNLGMPSYCTGYREGYLNSTNVTIATYCTGSIPCSVCLSGLDSLDTYPSLETIQITISSFKWDLTAFGLVAEWFLAYILFTRFFYVLGLAAIMQLFFSYFAVHFISNSWLMWLIINLVQMAPISAMVRMYIFFASFYYVWKSYVHVVDGCNSSTCMMCYKRNRATRVECTTIVNGVRRSFYVYANGGKGFCKLHNWNCVNCDTFCAGSTFISDEVARDLSLQFKRPINPTDQSSYIVDSVTVKNGSIHLYFDKAGQKTYERHSLSHFVNLDNLRANNTKGSLPINVIVFDGKSKCEESSAKSASVYYSQLMCQPILLLDQALVSDVGDSAEVAVKMFDAYVNTFSSTFNVPMEKLKTLVATAEAELAKNVSLDNVLSTFISAARQGFVDSDVETKDVVECLKLSHQSDIEVTGDSCNNYMLTYNKVENMTPRDLGACIDCSARHINAQVAKSHNIALIWNVKDFMSLSEQLRKQIRSAAKKNNLPFKLTCATTRQVVNVVTTKIALKGG

SEQ ID NO: 15919 - protein, 1946 aa, Artificial Sequence
  SARS-CoV-2__MT833985.1__non-structural protein 3 (NSP3)
MAPTKVTFGDDTVIEVQGYKSVNITFELDERIDKVLNEKCSAYTVELGTEVNEFACVVADAVIKTLQPVSELLTPLGIDLDEWSMATYYLFDESGEFKLASHMYCSFYPPDEDEEEGDCEEEEFEPSTQYEYGTEDDYQGKPLEFGATSAALQPEEEQEEDWLDDDSQQTVGQQDGSEDNQTTTIQTIVEVQPQLEMELTPVVQTIEVNSFSGYLKLTDNVYIKNADIVEEAKKVKPTVVVNAANVYLKHGGGVAGALNKATNNAMQVESDDYIATNGPLKVGGSCVLSGHNLAKHCLHVVGPNVNKGEDIQLLKSAYENFNQHEVLLAPLLSAGIFGADPIHSLRVCVDTVRTNVYLAVFDKNLYDKLVSSFLEMKSEKQVEQKIAEIPKEEVKPFITESKPSVEQRKQDDKKIKACVEEVTTTLEETKFLTENLLLYIDINGNLHPDSATLVSDIDITFLKKDAPYIVGDVVQEGVLTAVVIPTKKAGGTTEMLAKALRKVPTDNYITTYPGQGLNGYTVEEAKTVLKKCKSAFYILPSIISNEKQEILGTVSWNLREMLAHAEETRKLMPVCVETKAIVSTIQRKYKGIKIQEGVVDYGARFYFYTSKTTVASLINTLNDLNETLVTMPLGYVTHGLNLEEAARYMRSLKVPATVSVSSPDAVTAYNGYLTSSSKTPEEHFIETISLAGSYKDWSYSGQSTQLGIEFLKRGDKSVYYTSNPTTFHLDGEVITFDNLKTLLSLREVRTIKVFTTVDNINLHTQVVDMSMTYGQQFGPTYLDGADVTKIKPHNSHEGKTFYVLPNDDTLRVEAFEYYHTTDPSFLGRYMSALNHTKKWKYPQVNGLTSIKWADNNCYLATALLTLQQIELKFNPPALQDAYYRARAGEAANFCALILAYCNKTVGELGDVRETMSYLFQHANLDSCKRVLNVVCKTCGQQQTTLKGVEAVMYMGTLSYEQFKKGVQIPCTCGKQATKYLVQQESPFVMMSAPPAQYELKHGTFTCASEYTGNYQCGHYKHITSKETLYCIDGALLTKSSEYKGPITDVFYKENSYTTTIKPVTYKLDGVVCTEIDPKLDNYYKKDNSYFTEQPIDLVPNQPYPNASFDNFKFVCDNIKFADDLNQLTGYKKPASRELKVTFFPDLNGDVVAIDYKHYTPSFKKGAKLLHKPIVWHVNNATNKATYKPNTWCIRCLWSTKPVETSNSFDVLKSEDAQGMDNLACEDLKPVSEEVVENPTIQKDVLECNVKTTEVVGDIILKPANNSLKIIEEVGHTDLMAAYVDNSSLTIKKPNELSRVLGLKTLATHGLAAVNSVPWDTIANYAKPFLNKVVSTTTNIVTRCLNRVCTNYMPYFFTLLLQLCTFTRSTNSRIKASMPTTIAKNTVKSVGKFCLEASFNYLKSPNFSKLINIIIWFLLLSVCLGSLIYSTAALGVLMSNLGMPSYCTGYREGYLNSTNVTIATYCTGSIPCSVCLSGLDSLDTYPSLETIQITISSFKWDLTAFGLVAEWFLAYILFTRFFYVLGLAAIMQLFFSYFAVHFISNSWLMWLIINLVQMAPISAMVRMYIFFASFYYVWKSYVHVVDGCNSSTCMMCYKRNRATRVECTTIVNGVRRSFYVYANGGKGFCKLHNWNCVNCDTFCAGSTFISDEVARDLSLQFKRPINPTDQSSYIVDSVTVKNGSIHLYFDKAGQKTYERHSLSHFVNLDNLRANNTKGSLPINVIVFDGKSKCEESSAKSASVYYSQLMCQPILLLDQALVSDVGDSAEVAVKMFDAYVNTFSSTFNVPMEKLKTLVATAEAELAKNVSLDNVLSTFISAARQGFVDSDVETKDVVECLKLSHQSDIEVTGDSCNNYMLTYNKVENMTPRDLGACIDCSARHINAQVAKSHNIALIWNVKDFMSLSEQLRKQIRSAAKKNNLPFKLTCATTRQVVNVVTTKIALKGG

SEQ ID NO: 15920 - protein, 1946 aa, Artificial Sequence
  SARS-CoV-2__MT834038.1__non-structural protein 3 (NSP3)
MAPTKVTFGDDTVIEVQGYKSVNITFELDERIDKVLNEKCSAYTVELGTEVNEFACVVADAVIKTLQPVSELLTPLGIDLDEWSMATYYLFDESGEFKLASHMYCSFYPPDEDEEEGDCEEEEFEPSTQYEYGTEDDYQGKPLEFGATSAALQPEEEQEEDWLDDDSQQTVGQQDGSEDNQTTTIQTIVEVQPQLEMELTPVVQTIEVNSFSGYLKLTDNVYIKNADIVEEAKKVKPTVVVNAANVYLKHGGGVAGALNKATNNAMQVESDDYIATNGPLKVGGSCVLSGHNLAKHCLHVVGPNVNKGEDIQLLKSAYENFNQHEVLLAPLLSAGIFGADPIHSLRVCVDTVRTNVYLAVFDKNLYDKLVSSFLEMKSEKQVEQKIAEIPKEEVKPFITESKPSVEQRKQDDKKIKACVEEVTTTLEETKFLTENLLLYIDINGNLHPDSATLVSDIDITFLKKDAPYIVGDVVQEGVLTAVVIPTKKAGGTTEMLAKALRKVPTDNYITTYPGQGLNGYTVEEAKTVLKKCKSAFYILPSIISNEKQEILGTVSWNLREMLAHAEETRKLMPVCVETKAIVSTIQRKYKGIKIQEGVVDYGARFYFYTSKTTVASLINTLNDLNETLVTMPLGYVTHGLNLEEAARYMRSLKVPATVSVSSPDAVTAYNGYLTSSSKTPEEHFIETISLAGSYKDWSYSGQSTQLGIEFLKRGDKSVYYTSNPTTFHLDGEVITFDNLKTLLSLREVRTIKVFTTVDNINLHTQVVDMSMTYGQQFGPTYLDGADVTKIKPHNSHEGKTFYVLPNDDTLRVEAFEYYHTTDPSFLGRYMSALNHTKKWKYPQVNGLTSIKWADNNCYLATALLTLQQIELKFNPPALQDAYYRARAGEAANFCALILAYCNKTVGELGDVRETMSYLFQHANLDSCKRVLNVVCKTCGQQQTTLKGVEAVMYMGTLSYEQFKKGVQIPCTCGKQATKYLVQQESPFVMMSAPPAQYELKHGTFTCASEYTGNYQCGHYKHITSKETLYCIDGALLTKSSEYKGPITDVFYKENSYTTTIKPVTYKLDGVVCTEIDPKLDNYYKKDNSYFTEQPIDLVPNQPYPNASFDNFKFVCDNIKFADDLNQLTGYKKPASRELKVTFFPDLNGDVVAIDYKHYTPSFKKGAKLLHKPIVWHVNNATNKATYKPNTWCIRCLWSTKPVETSNSFDVLKSEDAQGMDNLACEDLKPVSEEVVENPTIQKDVLECNVKTTEVVGDIILKPANNSLKITEEVGHTDLMAAYVDNSSLTIKKPNELSRVLGLKTLATHGLAAVNSVPWDTIANYAKPFLNKVVSTTTNIVTRCLNRVCTNYMPYFFTLLLQLCTFTRSTNSRIKASMPTTIAKNTVKSVGKFCLEASFNYLKSPNFSKLINIIIWFLLLSVCLGSLIYSTAALGVLMSNLGMPSYCTGYREGYLNSTNVTIATYCTGSIPCSVCLSGLDSLDIYPSLETIQITISSFKWDLTAFGLVAEWFLAYILFTRFFYVLGLAAIMQLFFSYFAVHFISNSWLMWLIINLVQMAPISAMVRMYIFFASFYYVWKSYVHVVDGCNSSTCMMCYKRNRATRVECTTIVNGVRRSFYVYANGGKGFCKLHNWNCVNCDTFCAGSTFISDEVARDLSLQFKRPINPTDQSSYIVDSVTVKNGSIHLYFDKAGQKTYERHSLSHFVNLDNLRANNTKGSLPINVIVFDGKSKCEESSAKSASVYYSQLMCQPILLLDQALVSDVGDSAEVAVKMFDAYVNTFSSTFNVPMEKLKTLVATAEAELAKNVSLDNVLSTFISAARQGFVDSDVETKDVVECLKLSHQSDIEVTGDSCNNYMLTYNKVENMTPRDLGACIDCSARHINAQVAKSHNIALIWNVKDFMSLSEQLRKQIRSAAKKNNLPFKLTCATTRQVVNVVTTKIALKGG

SEQ ID NO: 15921 - protein, 1946 aa, Artificial Sequence
  SARS-CoV-2__MT834080.1__non-structural protein 3 (NSP3)
MAPTKVTFGDDTVIEVQGYKSVNITFELDERIDKVLNEKCSAYTVELGTEVNEFACVVADAVIKTLQPVSELLTPLGIDLDEWSMATYYLFDESGEFKLASHMYCSFYPPDEDEEEGDCEEEEFEPSTQYEYGTEDDYQGKPLEFGATSAALQPEEEQEEDWLDDDSQQTVGQQDGSEDNQTTTIQTIVEVQPQLEMELTPVVQTIEVNSFSGYLKLTDNVYIKNADIVEEAKKVKPTVVVNAANVYLKHGGGVAGALNKATNNAMQVESDDYIATNGPLKVGGSCVLSGHNLAKHCLHVVGPNVNKGEDIQLLKSAYENFNQHEVLLAPLLSAGIFGADPIHSLRVCVDTVRTNVYLAVFDKNLYDKLVSSFLEMKSEKQVEQKIAEIPKEEVKPFITESKPSVEQRKQDDKKIKACVEEVTTTLEETKFLTENLLLYIDINGNLHPDSATLVSDIDITFLKKDAPYIVGDVVQEGVLTAVVIPTKKAGGTTEMLAKALRKVPTDNYITTYPGQGLNGYTVEEAKTVLKKCKSAFYILPSIISNEKQEILGTVSWNLREMLAHAEETRKLMPVCVETKAIVSTIQRKYKGIKIQEGVVDYGARFYFYTSKTTVASLINTLNDLNETLVTMPLGYVTHGLNLEEAARYMRSLKVPATVSVSSPDAVTAYNGYLTSSSKTPEEHFIETISLAGSYKDWSYSGQSTQLGIEFLKRGDKSVYYTSNPTTFHLDGEVITFDNLKTLLSLREVRTIKVFTTVDNINLHTQVVDMSMTYGQQFGPTYLDGADVTKVKPHNSHEGKTFYVLPNDDTLRVEAFEYYHTTDPSFLGRYMSALNHTKKWKYPQVNGLTSIKWADNNCYLATALLTLQQIELKFNPPALQDAYYRARAGEAANFCALILAYCNKTVGELGDVRETMSYLFQHANLDSCKRVLNVVCKTCGQQQTTLKGVEAVMYMGTLSYEQFKKGVQIPCTCGKQATKYLVQQESPFVMMSAPPAQYELKHGTFTCASEYTGNYQCGHYKHITSKETLYCIDGALLTKSSEYKGPITDVFYKENSYTTTIKPVTYKLDGVVCTEIDPKLDNYYKKDNSYFTEQPIDLVPNQPYPNASFDNFKFVCDNIKFADDLNQLTGYKKPASRELKVTFFPDLNGDVVAIDYKHYTPSFKKGAKLLHKPIVWHVNNATNKATYKPNTWCIRCLWSTKPVETSNSFDVLKSEDAQGMDNLACEDLKPVSEEVVENPTIQKDVLECNVKTTEVVGDIILKPANNSLKITEEVGHTDLMAAYVDNSSLTIKKPNELSRVLGLKTLATHGLAAVNSVPWDTIANYAKPFLNKVVSTTTNIVTRCLNRVCTNYMPYFFTLLLQLCTFTRSTNSRIKASMPTTIAKNTVKSVGKFCLEASFNYLKSPNFSKLINIIIWFLLLSVCLGSLIYSTAALGVLMSNLGMPSYCTGYREGYLNSTNVTIATYCTGSIPCSVCLSGLDSLDTYPSLETIQITISSFKWDLTAFGLVAEWFLAYILFTRFFYVLGLAAIMQLFFSYFAVHFISNSWLMWLIINLVQMAPISAMVRMYIFFASFYYVWKSYVHVVDGCNSSTCMMCYKRNRATRVECTTIVNGVRRSFYVYANGGKGFCKLHNWNCVNCDTFCAGSTFISDEVARDLSLQFKRPINPTDQSSYIVDSVTVKNGSIHLYFDKAGQKTYERHSLSHFVNLDNLRANNTKGSLPINVIVFDGKSKCEESSAKSASVYYSQLMCQPILLLDQALVSDVGDSAEVAVKMFDAYVNTFSSTFNVPMEKLKTLVATAEAELAKNVSLDNVLSTFISAARQGFVDSDVETKDVVECLKLSHQSDIEVTGDSCNNYMLTYNKVENMTPRDLGACIDCSARHINAQVAKSHNIALIWNVKDFMSLSEQLRKQIRSAAKKNNLPFKLTCATTRQVVNVVTTKIALKGG

SEQ ID NO: 15922 - protein, 1946 aa, Artificial Sequence
  SARS-CoV-2__MT834097.1__non-structural protein 3 (NSP3)
MAPTKVTFGDDTVIEVQGYKSVNITFELDERIDKVLNEKCSAYTVELGTEVNEFACVVADAVIKTLQPVSELLTPLGIDLDEWSMATYYLFDESGEFKLASHMYCSFYPPDEDEEEGDCEEEEFEPSTQYEYGTEDDYQGKPLEFGATSAALQPEEEQEEDWLDDDSQQTVGQQDGSEDNQTTTIQTIVEVQPQLEMELTPVVQTIEVNSFSGYLKLTDNVYIKNADIVEEAKKVKPTVVVNAANVYLKHGGGVAGALNKATNNAMQVESDDYIATNGPLKVGGSCVLSGHNLAKHCLHVVGPNVNKGEDIQLLKSAYENFNQHEVLLAPLLSAGIFGADPIHSLRVCVDTVRTNVYLAVFDKNLYDKLVSSFLEMKSEKQVEQKIAEIPKEEVKPFITESKPSVEQRKQDDKKIKACVEEVTTTLEETKFLTENLLLYIDINGNLHPDSATLVSDIDITFLKKDAPYIVGDVVQEGVLTAVVIPTKKAGGTTGMLAKALRKVPTDNYITTYPGQGLNGYTVEEAKTVLKKCKSAFYILPSIISNEKQEILGTVSWNLREMLAHAEETRKLMPVCVETKAIVSTIQRKYKGIKIQEGVVDYGARFYFYTSKTTVASLINTLNDLNETLVTMPLGYVTHGLNLEEAARYMRSLKVPATVSVSSPDAVTAYNGYLTSSSKTPEEHFIETISLAGSYKDWSYSGQSTQLGIEFLKRGDKSVYYTSNPTTFHLDGEVITFDNLKTLLSLREVRTIKVFTTVDNINLHTQVVDMSMTYGQQFGPTYLDGADVTKIKPHNSHEGKTFYVLPNDDTLRVEAFEYYHTTDPSFLGRYMSALNHTKKWKYPQVNGLTSIKWADNNCYLATALLTLQQIELKFNPPALQDAYYRARAGEAANFCALILAYCNKTVGELGDVRETMSYLFQHANLDSCKRVLNVVCKTCGQQQTTLKGVEAVMYMGTLSYEQFKKGVQIPCTCGKQATKYLVQQESPFVMMSAPPAQYELKHGTFTCASEYTGNYQCGHYKHITSKETLYCIDGALLTKSSEYKGPITDVFYKENSYTTTIKPVTYKLDGVVCTEIDPKLDNYYKKDNSYFTEQPIDLVPNQPYPNASFDNFKFVCDNIKFADDLNQLTGYKKPASRELKVTFFPDLNGDVVAIDYKHYTPSFKKGAKLLHKPIVWHVNNATNKATYKPNIWCIRCLWSTKPVETSNSFDVLKSEDAQGMDNLACEDLKPVSEEVVENPTIQKDVLECNVKTTEVVGDIILKPANNSLKITEEVGHTDLMAAYVDNSSLTIKKPNELSRVLGLKTLATHGLAAVNSVPWDTIANYAKPFLNKVVSTTTNIVTRCLNRVCTNYMPYFFTLLLQLCTFTRSTNSRIKASMPTTIAKNTVKSVGKFCLEASFNYLKSPNFSKLINIIIWFLLLSVCLGSLIYSTAALGVLMSNLGMPSYCTGYREGYLNSTNVTIATYCTGSIPCSVCLSGLDSLDTYPSLETIQITISSFKWDLTAFGLVAEWFLAYILFTRFFYVLGLAAIMQLFFSYFAVHFISNSWLMWLIINLVQMAPISAMVRMYIFFASFYYVWKSYVHVVDGCNSSTCMMCYKRNRATRVECTTIVNGVRRSFYVYANGGKGFCKLHNWNCVNCDTFCAGSTFISDEVARDLSLQFKRPINPTDQSSYIVDSVTVKNGSIHLYFDKAGQKTYERHSLSHFVNLDNLRANNTKGSLPINVIVFDGKSKCEESSAKSASVYYSQLMCQPILLLDQALVSDVGDSAEVAVKMFDAYVNTFSSTFNVPMEKLKTLVATAEAELAKNVSLDNVLSTFISAARQGFVDSDVETKDVVECLKLSHQSDIEVTGDSCNNYMLTYNKVENMTPRDLGACIDCSARHINAQVAKSHNIALIWNVKDFMSLSEQLRKQIRSAAKKNNLPFKLTCATTRQVVNVVTTKIALKGG

SEQ ID NO: 15923 - protein, 1946 aa, Artificial Sequence
  SARS-CoV-2__MT834119.1__non-structural protein 3 (NSP3)
MAPTKVTFGDDTVIEVQGYKSVNITFELDERIDKVLNEKCSAYTVELGTEVNEFACVVADAVIKTLQPVSELLTPLGIDLDEWSMATYYLFDESGEFKLASHMYCSFYPPDEDEEEGDCEEEEFEPSTQYEYGTEDDYQGKPLEFGATSAALQPEEEQEEDWLDDDSQQTVGQQDGSEDNQTTTIQTIVEVQPQLEMELTPVVQTIEVNSFSGYLKLTDNVYIKNADIVEEAKKVKPTVVVNAANVYLKHGGGVAGALNKATNNAMQVESDDYIATNGPLKVGGSCVLSGHNLAKHCLHVVGPNVNKGEDIQLLKSAYENFNQHEVLLAPLLSAGIFGADPIHSLRVCVDTVRTNVYLAVFDKNLYDKLVSSFLEMKSEKQVEQKIAEIPKEEVKPFITESKPSVEQRKQDDKKIKACVEEVTTTLEETKFLTENLLLYIDINGNLHPDSATLVSDIDITFLKKDAPYIVGDVVQEGVLTAVVIPTKKAGGTTEMLAKALRKVPTDNYITTYPGQGLNGYTVEEAKTVLKKCKSAFYILPSIISNEKQEILGTVSWNLREMLAHAEETRKLMPVCVETKAIVSTIQRKYKGIKIQEGVVDYGARFYFYTSKTTVASLINTLNDLNETLVTMPLGYVTHGLNLEEAARYMRSLKVPATVSVSSPDAVTAYNGYLTSSSKTPEEHFIETISLAGSYKDWSYSGQSTQLGIEFLKRGDKSVYYTSNPTTFHLDGEVITFDNLKTLLSLREVRTIKVFTTVDNINLHTQVVDMSMTYGQQFGPTYLDGADVTKIKPHNSHEGKTFYVLPNDDTLRVEAFEYYHTTDPSFLGRYMSALNHTKKWKYPQVNGLTSIKWADNNCYLATALLTLQQIELKFNPPALQDAYYRARAGEAANFCALILAYCNKTVGELGDVRETMSYLFQHANLDSCKRVLNVVCKTCGQQQTTLKGVEAVMYMGTLSYEQFKKGVQIPCTCGKQATKYLVQQESPFVMMSAPPAQYELKHGTFTCASEYTGNYQCGHYKHITSKETLYCIDGALLTKSSEYKGPITDVFYKENSYTTTIKPVTYKLDGVVCTEIDPKLDNYYKKDNSYFTEQPIDLVPNQPYPNASFDNFKFVCDNIKFADDLNQLTGYKKPASRELKVTFFPDLNGDVVAIDYKHYTPSFKKGAKLLHKPIVWHVNNATNKATYKPNTWCIRCLWSTKPVETSNSFDVLKSEDAQGMDNLACEDLKPVSEEVVENPTIQKDVLECNVKTTEVVGDIILKPANNSLKITEEVGHTDLMAAYVDNSSLTIKKPNELSRVLGLKTLATHGLAAVNSVPWDTIANYAKPFLNKVVSTTTNIVTRCLNRVCTNYMPYFFTLLLQLCTFTRSTNSRIKASMPTTIAKNTVKSVSKFCLEASFNYLKSPNFSKLINIIIWFLLLSVCLGSLIYSTAALGVLMSNLGMPSYCTGYREGYLNSTNVTIATYCTGSIPCSVCLSGLDSLDTYPSLETIQITISSFKWDLTAFGLVAEWFLAYILFTRFFYVLGLAAIMQLFFSYFAVHFISNSWLMWLIINLVQMAPISAMVRMYIFFASFYYVWKSYVHVVDGCNSSTCMMCYKRNRATRVECTTIVNGVRRSFYVYANGGKGFCKLHNWNCVNCDTFCAGSTFISDEVARDLSLQFKRPINPTDQSSYIVDSVTVKNGSIHLYFDKAGQKTYERHSLSHFVNLDNLRANNTKGSLPINVIVFDGKSKCEESSAKSASVYYSQLMCQPILLLDQALVSDVGDSAEVAVKMFDAYVNTFSSTFNVPMEKLKTLVATAEAELAKNVSLDNVLSTFISAARQGFVDSDVETKDVVECLKLSHQSDIEVTGDSCNNYMLTYNKVENMTPRDLGACIDCSARHINAQVAKSHNIALIWNVKDFMSLSEQLRKQIRSAAKKNNLPFKLTCATTRQVVNVVTTKIALKGG

SEQ ID NO: 15924 - protein, 1946 aa, Artificial Sequence
  SARS-CoV-2__MT834129.1__non-structural protein 3 (NSP3)
MAPTKVTFGDDTVIEVQGYKSVNITFELDERIDKVLNEKCSAYTVELGTEVNEFACVVADAVIKTLQPVSELLTPLGIDLDEWSMATYYLFDESGEFKLASHMYCSFYPPDEDEEEGDCEEEEFEPSTQYEYGTEDDYQGKPLEFGATSAALQPEEEQEEDWLDDDSQQTVGQQDGSEDNQTTTIQTIVEVQPQLEMELTPVVQTIEVNSFSGYLKLTDNVYIKNADIVEEAKKVKPTVVVNAANVYLKHGGGVAGALNKATNNAMQVESDDYIATNGPLKVGGSCVLSGHNLAKHCLHVVGPNVNKGEDIQLLKSAYENFNQHEVLLAPLLSAGIFGADPIHSLRVCVDTVRTNVYLAVFDKNLYDKLVSSFLEMKSEKQVEQKIAEIPKEEVKPFITESKPSVEQRKQDDKKIKACVEEVTTTLEETKFLTENLLLYIDINGNLHPDSASLVSDIDITFLKKDAPYIVGDVVQEGVLTAVVIPTKKAGGTTEMLAKALRKVPTDNYITTYPGQGLNGYTVEEAKTVLKKCKSAFYILPSIISNEKQEILGTVSWNLREMLAHAEETRKLMPVCVETKAIVSTIQRKYKGIKIQEGVVDYGARFYFYTSKTTVASLINTLNDLNETLVTMPLGYVTHGLNLEEAARYMRSLKVPATVSVSSPDAVTAYNGYLTSSSKTPEEHFIETISLAGSYKDWSYSGQSTQLGIEFLKRGDKSVYYTSNPTTFHLDGEVITFDNLKTLLSLREVRTIKVFTTVDNINLHTQVVDMSMTYGQQFGPTYLDGADVTKIKPHNSHEGKTFYVLPNDDTLRVEAFEYYHTTDPSFLGRYMSALNHTKKWKYPQVNGLTSIKWADNNCYLATALLTLQQIELKFNPPALQDAYYRARAGEAANFCALILAYCNKTVGELGDVRETMSYLFQHANLDSCKRVLNVVCKTCGQQQTTLKGVEAVMYMGTLSYEQFKKGVQIPCTCGKQATKYLVQQESPFVMMSAPPAQYELKHGTFTCASEYTGNYQCGHYKHITSKETLYCIDGALLTKSSEYKGPITDVFYKENSYTTTIKPVTYKLDGVVCTEIDPKLDNYYKKDNSYFTEQPIDLVPNQPYPNASFDNFKFVCDNIKFADDLNQLTGYKKPASRELKVTFFPDLNGDVVAIDYKHYTPSFKKGAKLLHKPIVWHVNNATNKATYKPNTWCIRCLWSTKPVETSNSFDVLKSEDAQGMDNLACEDLKPVSEEVVENPTIQKDVLECNVKTTEVVGDIILKPANNSLKITEEVGHTDLMAAYVDNSSLTIKKPNELSRVLGLKTLATHGLAAVNSVPWDTIANYAKPFLNKVVSTTTNIVTRCLNRVCTNYMPYFFTLLLQLCTFTRSTNSRIKASMPTTIAKNTVKSVGKFCLEASFNYLKSPNFSKLINIIIWFLLLSVCLGSLIYSTAALGVLMSNLGMPSYCTGYREGYLNSTNVTIATYCTGSIPCSVCLSGLDSLDTYPSLETIQITISSFKWDLTAFGLVAEWFLAYILFTRFFYVLGLAAIMQLFFSYFAVHFISNSWLMWLIINLVQMAPISAMVRMYIFFASFYYVWKSYVHVVDGCNSSTCMMCYKRNRATRVECTTIVNGVRRSFYVYANGGKGFCKLHNWNCVNCDTFCAGSTFISDEVARDLSLQFKRPINPTDQSSYIVDSVTVKNGSIHLYFDKAGQKTYERHSLSHFVNLDNLRANNTKGSLPINVIVFDGKSKCEESSAKSASVYYSQLMCQPILLLDQALVSDVGDSAEVAVKMFDAYVNTFSSTFNVPMEKLKTLVATAEAELAKNVSLDNVLSTFISAARQGFVDSDVETKDVVECLKLSHQSDIEVTGDSCNNYMLTYNKVENMTPRDLGACIDCSARHINAQVAKSHNIALIWNVKDFMSLSEQLRKQIRSAAKKNNLPFKLTCATTRQVVNVVTTKIALKGG

SEQ ID NO: 15925 - protein, 1946 aa, Artificial Sequence
  SARS-CoV-2__MT834626.1__non-structural protein 3 (NSP3)
MAPTKVTFGDDTVIEVQGYKSVNITFELDERIDKVLNEKCSAYTVELGTEVNEFACVVADAVIKTLQPVSELLTPLGIDLDEWSMATYYLFDESGEFKLASHMYCSFYPPDEDEEEGDCEEEEFEPSTQYEYGTEDDYQGKPLEFGATSAALQPEEEQEEDWLDDDSQQTVGQQDGSEDNQTTTIQTIVEVQPQLEMELTPVVQTIEVNSFSGYLKLTDNVYIKNADIVEEAKKVKPTVVVNAANVYLKHGGGVAGALNKATNNAMQVESDDYIATNGPLKVGGSCVLSGHNLAKHCLHVVGPNVNKGEDIQLLKSAYENFNQHEVLLAPLLSAGIFGADPIHSLRVCVDTVRTNVYLAVFDKNLYDKLVSSFLEMKSEKQVEQKIAEIPKEEVKPFITESKPSVEQRKQDDKKIKACVEEVTTTLEETKFLTENLLLYIDINGNLHPDSATLVSDIDITFLKKDAPYIVGDVVQEGVLTAVVIPTKKAGGTTEMLAKALRKVPTDNYITTYPGQGLNGYTVEEAKTVLKKCKSAFYILPSIISNEKQEILGTVSWNLREMLAHAEETRKLMPVCVETKAIVSTIQRKYKGIKIQEGVVDYGARFYFYTSKTTVASLINTLNDLNETLVTMPLGYVTHGLNLEEAARYMRSLKVPATVSVSSPDAVTAYNGYLTSSSKTPEEHFIETISLAGSYKDWSYSGQSTQLGIEFLKRGDKSVYYTSNPTTFHLDGEVITFDNLKTLLSLREVRTIKVFTTVDNINLHTQVVDMSMTYGQQFGPTYLDGADVTKIKPHNSHEGKTFYVLPNDDTLRVEAFEYYHTTDPSFLGRYMSALNHTKKWKYPQVNGLTSIKWADNNCYLATALLTLQQIELKFNPPALQDAYYRARAGEAANFCALILAYCNKTVGELGDVRETMSYLFQHANLDSCKRVLNVVCKTCGQQQTTLKGVEAVMYMGTLSYEQFKKGVQIPCTCGKQATKYLVQQESPFVMMSAPPAQYELKHGTFTCASEYTGNYQCGHYKHITSKETLYCIDGALLTKSSEYKGPITDVFYKENSYTTTIKPVTYKLDGVVCTEIDPKLDNYYKKDNSYFTEQPIDLVPNQPYPNASFDNFKFVCDNIKFADDLNQLTGYKKPASRELKVTFFPDLNGDVVAIDYKHYTPSFKKGAKLLHKPIVWHVNNATNKATYKPNTWCIRCLWSTKPVETSNSFDVLKSEDAQGMDNLACEDLKPVSEEVVENPTIQKDVLECNVKTTEVVGDIILKPANNSLKITEEVGHTDLMAAYVDNSSLTIKKPNELSRVLGLKTLATHGLAAVNSVPWDTIANYAKPFLNKVVSTTTNIVTRCLNRVCTNYMPYFFTLLLQLCTFTRSTNSRIKASMPTTIAKNTVKSVGKFCLEASFNYLKSPNFSKLINIIIWFLLLSVCLGSLIYSTAALGVLMSNLGMPSYCTGYREGYLNSTNVTIATYCTGSIPCSVCLSGLDSLDTYPSLETIQITISSFKWDLTAFGLVAEWFLAYILFTRFFYVLGLAAIMQLFFSYFAVHFISNSWLMWLIINLVQMAPISAMVRMYIFFASFYYVWKSYVHVVDGCNSSTCMMCYKRNRATRVECTTIVNGVRRSFYVYANGGKGFCKLHNWNCVNCDTFCAGSTFISDEVARDLSLQFKRPINPTDQSSYIVDSVTVKDGSIHLYFDKAGQKTYERHSLSHFVNLDNLRANNTKGSLPINVIVFDGKSKCEESSAKSASVYYSQLMCQPILLLDQALVSDVGDSAEVAVKMFDAYVNTFSSTFNVPMEKLKTLVATAEAELAKNVSLDNVLSTFISAARQGFVDSDVETKDVVECLKLSHQSDIEVTGDSCNNYMLTYNKVENMTPRDLGACIDCSARHINAQVAKSHNIALIWNVKDFMSLSEQLRKQIRSAAKKNNLPFKLTCATTRQVVNVVTTKIALKGG

SEQ ID NO: 15926 - protein, 1946 aa, Artificial Sequence
  SARS-CoV-2__MT834646.1__non-structural protein 3 (NSP3)
MAPTKVTFGDDTVIEVQGYKSVNITFELDERIDKVLNEKCSAYTVELGTEVNEFACVVADAVIKTLQPVSELLTPLGIDLDEWSMATYYLFDESGEFKLASHMYCSFYPPDEDEEEGDCEEEEFEPSTQYEYGTEDDYQGKPLEFGATSAALQPEEEQEEDWLDDDSQQTVGQQDGSEDNQTTTIQTIVEVQPQLEMELTPVVQTIEVNSFSGYLKLTDNVYIKNADIVEEAKKVKPTVVVNAANVYLKHGGGVAGALNKATNNAMQVESDDYIATNGPLKVGGSCVLSGHNLAKHCLHVVGPNVNKGEDIQLLKSAYENFNQHEVLLAPLLSAGIFGADPIHSLRVCVDTVRTNVYLAVFDKNLYDKLVSSFLEMKSEKQVEQKIAEIPKEEVKPFITESKPSVEQRKQDDKKIKACVEEVTTTLEETKFLTENLLLYIDINGNLHPDSATLVSDIDITFLKKDAPYIVGDVVQEGVLTAVVIPTKKAGGTTEMLAKALRKVPTDNYITTYPGQGLNGYTVEEAKTVLKKCKSAFYILPSIISNEKQEILGTVSWNLREMLAHAEETRKLMPVCVETKAIVSTIQRKYKGIKIQEGVVDYGARFYFYTSKTTVASLINTLNDLNETLVTMPLGYVTHGLNLEEAARYMRSLKVPATVSVSSPDAVTAYNGYLTSSSKTPEEHFIETISLAGSYKDWSYSGQSTQLGIEFLKRGDKSVYYTSNPTTFHLDGDVITFDNLKTLLSLREVRTIKVFTTVDNINLHTQVVDMSMTYGQQFGPTYLDGADVTKIKPHNSHEGKTFYVLPNDDTLRVEAFEYYHTTDPSFLGRYMSALNHTKKWKYPQVNGLTSIKWADNNCYLATALLTLQQIELKFNPPALQDAYYRARAGEAANFCALILAYCNKTVGELGDVRETMSYLFQHANLDSCKRVLNVVCKTCGQQQTTLKGVEAVMYMGTLSYEQFKKGVQIPCTCGKQATKYLVQQESPFVMMSAPPAQYELKHGTFTCASEYTGNYQCGHYKHITSKETLYCIDGALLTKSSEYKGPITDVFYKENSYTTTIKPVTYKLDGVVCTEIDPKLDNYYKKDNSYFTEQPIDLVPNQPYPNASFDNFKFVCDNIKFADDLNQLTGYKKPASRELKVTFFPDLNGDVVAIDYKHYTPSFKKGAKLLHKPIVWHVNNATNKATYKPNTWCIRCLWSTKPVETSNSFDVLKSEDAQGMDNLACEDLKPVSEEVVENPTIQKDVLECNVKTTEVVGDIILKPANNSLKITEEVGHTDLMAAYVDNSSLTIKKPNELSRVLGLKTLATHGLAAVNSVPWDTIANYAKPFLNKVVSTTTNIVTRCLNRVCTNYMPYFFTLLLQLCTFTRSTNSRIKASMPTTIAKNTVKSVGKFCLEASFNYLKSPNFSKLINIIIWFLLLSVCLGSLIYSTAALGVLMSNLGMPSYCTGYREGYLNSTNVTIATYCTGSIPCSVCLSGLDSLDTYPSLETIQITISSFKWDLTAFGLVAEWFLAYILFTRFFYVLGLAAIMQLFFSYFAVHFISNSWLMWLIINLVQMAPISAMVRMYIFFASFYYVWKSYVHVVDGCNSSTCMMCYKRNRATRVECTTIVNGVRRSFYVYANGGKGFCKLHNWNCVNCDTFCAGSTFISDEVARDLSLQFKRPINPTDQSSYIVDSVTVKNGSIHLYFDKAGQKTYERHSLSHFVNLDNLRANNTKGSLPINVIVFDGKSKCEESSAKSASVYYSQLMCQPILLLDQALVSDVGDSAEVAVKMFDAYVNTFSSTFNVPMEKLKTLVATAEAELAKNVSLDNVLSTFISAARQGFVDSDVETKDVVECLKLSHQSDIEVTGDSCNNYMLTYNKVENMTPRDLGACIDCSARHINAQVAKSHNIALIWNVKDFMSLSEQLRKQIRSAAKKNNLPFKLTCATTRQVVNVVTTKIALKGG

SEQ ID NO: 15927 - protein, 1946 aa, Artificial Sequence
  SARS-CoV-2__MT834656.1__non-structural protein 3 (NSP3)
MAPTKVTFGDDTVIEVQGYKSVNITFELDERIDKVLNEKCSAYTVELGTEVNEFACVVADAVIKTLQPVSELLTPLGIDLDEWSMATYYLFDESGEFKLASHMYCSFYPPDEDEEEGDCEEEEFEPSTQYEYGTEDDYQGKPLEFGATSAALQPEEEQEEDWLDDDSQQTVGQQDGSEDNQTTTIQTIVEVQPQLEMELTPVVQTIEVNSFSGYLKLTDNVYIKNADIVEEAKKVKPTVVVNAANVYLKHGGGVAGALNKATNNAMQVESDDYIATNGPLKVGGSCVLSGHNLAKHCLHVVGPNVNKGEDIQLLKSAYENFNQHEVLLAPLLSAGIFGADPIHSLRVCVDTVRTNVYLAVFDKNLYDKLVSSFLEMKSEKQVEQKIAEIPKEEVKPFITESKPSVEQRKQDDKKIKACVEEVTTTLEETKFLTENLLLYIDINGNLHPDSATLVSDIDITFLKKDAPYIVGDVVQEGVLTAVVIPTKKAGGTTEMLAKALRKVPTDNYITTYPGQGLNGYTVEEAKTVLKKCKSAFYILPSIISNEKQEILGTVSWNLREMLAHAEETRKLMPVCVETKAIVSTIQRKYKGIKIQEGVVDYGARFYFYTSKTTVASLINTLNDLNETLVTMPLGYVTHGLNLEEAARYMRSLKVPATVSVSSPDAVTAYNGYLTSSSKTPEEHFIETISLAGSYKDWSYSGQSTQLGIEFLKRGDKSVYYTSNPTTFHLDGEVITFDNLKTLLSLREVRTIKVFTTVDNINLHTQVVDMSMTYGQQFGPTYLDGADVTKIKPHNSHEGKTFYVLPNDDTLRVEAFEYYHTTDPSFLGRYMSALNHTKKWKYPQVNGLTSIKWADNNCYLATALLTLQQIELKFNPPALQDAYYRARAGEAANFCALILAYCNKTVGELGDVRETMSYLFQHANLDSCKRVLNVVCKTCGQQQTTLKGVEAVMYMGTLSYEQFKKGVQIPCTCGKQATKYLVQQESPFVMMSAPPAQYELKHGTFTCASEYTGNYQCGHYKHITSKETLYCIDGALLTKSSEYKGPITDVFYKENSYTTTIKPVTYKLDGVVCTEIDPKLDNYYKKDNSYFTEQPIDLVPNQPYPNAGFDNFKFVCDNIKFADDLNQLTGYKKPASRELKVTFFPDLNGDVVAIDYKHYTPSFKKGAKLLHKPIVWHVNNATNKATYKPNTWCIRCLWSTKPVETSNSFDVLKSEDAQGMDNLACEDLKPVSEEVVENPTIQKDVLECNVKTTEVVGDIILKPANNSLKITEEVGHTDLMAAYVDNSSLTIKKPNELSRVLGLKTLATHGLAAVNSVPWDTIANYAKPFLNKVVSTTTNIVTRCLNRVCTNYMPYFFTLLLQLCTFTRSTNSRIKASMPTTIAKNTVKSVGKFCLEASFNYLKSPNFSKLINIIIWFLLLSVCLGSLIYSTAALGVLMSNLGMPSYCTGYREGYLNSTNVTIATYCTGSIPCSVCLSGLDSLDTYPSLETIQITISSFKWDLTAFGLVAEWFLAYILFTRFFYVLGLAAIMQLFFSYFAVHFISNSWLMWLIINLVQMAPISAMVRMYIFFASFYYVWKSYVHVVDGCNSSTCMMCYKRNRATRVECTTIVNGVRRSFYVYANGGKGFCKLHNWNCVNCDTFCAGSTFISDEVARDLSLQFKRPINPTDQSSYIVDSVTVKNGSIHLYFDKAGQKTYERHSLSHFVNLDNLRANNTKGSLPINVIVFDGKSKCEESSAKSASVYYSQLMCQPILLLDQALVSDVGDSAEVAVKMFDAYVNTFSSTFNVPMEKLKTLVATAEAELAKNVSLDNVLSTFISAARQGFVDSDVETKDVVECLKLSHQSDIEVTGDSCNNYMLTYNKVENMTPRDLGACIDCSARHINAQVAKSHNIALIWNVKDFMSLSEQLRKQIRSAAKKNNLPFKLTCATTRQVVNVVTTKIALKGG

SEQ ID NO: 15928 - protein, 1946 aa, Artificial Sequence
  SARS-CoV-2__MT834661.1__non-structural protein 3 (NSP3)
MAPTKVTFGDDTVIEVQGYKSVNITFELDERIDKVLNEKCSAYTVELGTEVNEFACVVADAVIKTLQPVSELLTPLGIDLDEWSMATYYLFDESGEFKLASHMYCSFYPPDEDEEEGDCEEEEFEPSTQYEYGTEDDYQGKPLEFGATSAALQPEEEQEEDWLDDDSQQTVGQQDGSEDNQTTTIQTIVEVQPQLEMELTPVVQTIEVNSFSGYLKLTDNVYIKNADIVEEAKKVKPTVVVNAANVYLKHGGGVAGALNKATNNAMQVESDDYIATNGPLKVGGSCVLSGHNLAKHCLHVVGPNVNKGEDIQLLKSAYENFNQHEVLLAPLLSAGIFGADPIHSLRVCVDTVRTNVYLAVFDKNLYDKLVSSFLEMKSEKQVEQKIAEIPKEEVKPFITESKPSVEQRKQDDKKIKACVEEVTTTLEETKFLTENLLLYIDINGNLHPDSATLVSDIDITFLKKDAPYIVGDVVQEGVLTAVVIPTKKAGGTTEMLAKALRKVPTDNYITTYPGQGLNGYTVEEAKTVLKKCKSAFYILPSIISNEKQEILGTVSWNLREMLAHAEETRKLMPVCVETKAIVSTIQRKYKGIKIQEGVVDYGARFYFYTSKTTVASLINTLNDLNETLVTMPLGYVTHGLNLEEAARYMRSLKVPATVSVSSPDAVTAYNGYLTSSSKTPEEHFIETISLAGSYKDWSYSGQSTQLGIEFLKRGDKSVYYTSNPTTFHLDGEVITFDNLKTLLSLREVRTIKVFTTVDNINLHTQVVDMSMTYGQQFGPTYLDGADVTKIKPHNSHEGKTFYVLPNDDTLRVEAFEYYHTTDPSFLGRYMSALNHTKKWKYPQVNGLTSIKWADNNCYLATALLTLQQIELKFNPPALQDAYYRARAGEAANFCALILAYCNKTVGELGDVRETMSYLFQHANLDSCKRVLNVVCKTCGQQQTTLKGVEAVMYMGTLSYEQFKKGVQIPCTCGKQATKYLVQQESPFVMMSAPPAQYELKHGTFTCASEYTGNYQCGHYKHITSKETLYCIDGALLTKSSEYKGPITDVFYKENSYTTTIKPVTYKLDGVVCTEIDPKLDNYYKKDNSYFTEQPIDLVPNQPYPNASFDNFKFVCDNIKFADDLNQLTGYKKPASRELKVTFFPDLNGDVVAIDYKHYTPSFKKGAKLLHKPIVWHVNNATNKATYKPNTWCIRCLWSTKPVETSNSFDVLKSEDAQGMDNLACEDLKPVSEEVVENPTIQKDVLECNVKTTEVVGDIILKPANNSLKITEEVGHTDLMAAYVDNSSLTIKKPNELSRVLGLKTLATHGLAAVNSVPWDTIANYAKPFLNKVVSTTTNIVTRCLNRVCTNYMPYFFTLLLQLCTFTRSTNSRIKASMPTTIAKNTVKSVGKFCLEASFNYLKSPNFSKLINIIIWFLLLSVCLGSLIYSTAALGVLMSNLGMPSYCTGYREGYLNSTNVTIATYCTGSIPCSVCLSGLDSLDTYPSLETIQITISSFKWDLTAFGLVAEWFLAYILFTRFFYVLGLAAIMQLFFSYFAVHFISNSWLMWLIINLVQMAPISAMVRMYIFFASFYYVWKSYVHVVDGCNSSTCMMCYKRNRATRVECTTIVNGVRRSFYVYANGGKGFCKLHNWNCVNCDTFCAGSTFISDEVARDLSLQFKRPINPTDQSFYIVDSVTVKNGSIHLYFDKAGQKTYERHSLSHFVNLDNLRANNTKGSLPINVIVFDGKSKCEESSAKSASVYYSQLMCQPILLLDQALVSDVGDSAEVAVKMFDAYVNTFSSTFNVPMEKLKTLVATAEAELAKNVSLDNVLSTFISAARQGFVDSDVETKDVVECLKLSHQSDIEVTGDSCNNYMLTYNKVENMTPRDLGACIDCSARHINAQVAKSHNIALIWNVKDFMSLSEQLRKQIRSAAKKNNLPFKLTCATTRQVVNVVTTKIALKGG

SEQ ID NO: 15929 - protein, 1946 aa, Artificial Sequence
  SARS-CoV-2__MT834662.1__non-structural protein 3 (NSP3)
MAPTKVTFGDDTVIEVQGYKSVNITFELDERIDKVLNEKCSAYTVELGTEVNEFACVVADAVIKTLQPVSELLTPLGIDLDEWSMATYYLFDESGEFKLASHMYCSFYPPDEDEEEGDCEEEEFEPSTQYEYGTEDDYQGKPLEFGATSAALQPEEEQEEDWLDDDSQQTVGQQDGSEDNQTTTIQTIVEVQPQLEMELTPVVQTIEVNSFSGYLKLTDNVYIKNADIVEEAKKVKPTVVVNAANVYLKHGGGVAGALNKATNNAMQVESDDYIATNGPLKVGGSCVLSGHNLAKHCLHVVGPNVNKGEDIQLLKSAYENFNQHEVLLAPLLSAGIFGADPIHSLRVCVDTVRTNVYLAVFDKNLYDKLVSSFLEMKSEKQVEQKIAEIPKEEVKPFITESKPSVEQRKQDDKKIKACVEEVTTTLEETKFLTENLLLYIDINGNLHPDSATLVSDIDITFLKKDAPYIVGDVVQEGVLTAVVIPTKKAGGTTEMLAKALRKVPTDNYITTYPGQGLNGYTVEEAKTVLKKCKSAFYILPSIISNEKQEILGTVSWNLREMLAHAEETRKLMPVCVETKAIVSTIQRKYKGIKIQEGVVDYGARFYFYTSKTTVASLINTLNDLNETLVTMPLGYVTHGLNLEEAARYMRSLKVPATVSVSSPDAVTAYNGYLTSSSKTPEEHFIETISLAGSYKDWSYSGQSTQLGIEFLKRGDKSVYYTSNPTTFHLDGEVITFDNLKTLLSLREVRTIKVFTTVDNINLHTQVVDMSMTYGQQFGPTYLDGADVTKIKPHNSHEGKTFYVLPNDDTLRVEAFEYYHTTDPSFLGRYMSALNHTKKWKYPQVNGLTSIKWADNNCYLATALLTLQQIELKFNPPALQDAYYRARAGEAANFCALILAYCNKTVGELGDVRETMSYLFQHANLDSCKRVLNVVCKTCGQQQTTLKGVEAVMYMGTLSYEQFKKGVQIPCTCGKQATKYLVQQESPFVMMSAPPAQYELKHGTFTCASEYTGNYQCGHYKHITSKETLYCIDGALLTKSSEYKGPITDVFYKENSYTTTIKPVTYKLDGVVCTEIDPKLDNYYKKDNSYFTEQPIDLVPNQPYPNASFDNFKFVCDNIKFADDLNQLTGYKKPASRELKVTFFPDLNGDVVAIDYKHYTPSFKKGAKLLHKPIVWHVNNATNKATYKPNTWCIRCLWSTKPVETSNSFDVLKSEDAQGMDNLACEDLKPVSEEVVENPTIQKDVLECNVKTTEVVGDIILKPANNSLKITEEVGHTDLMAAYVDNSSLTIKKPNELSRVLGLKTLATHGLAAVNSVPWDTIANYAKPFLNKVVSTTTNIVTRCLNRVCTNYMPYFFTLLLQLCTFTRSTNSRIKASMPTTIAKNTVKSVGKFCLEASFNYLKSPNFSKLINIIIWFLLLSVCLGSLIYSTAALGVLMSNLGMPSYCTGYREGYLNSTNVTIATYCTGSIPCSVCLSGLDSLDTYPSLETIQITISSFKWDLTAFGLVAEWFLAYILFTRFFYVLGLAAIMQLFFSYFAVHFISNSWLMWLIINLVQMAPISAMVRMYIFFASFYYVWKSYVHVVDGCNSSTCMMCYKRNRATRVECTTIVNGVRRSFYVYANGGKGFCKLHNWNCVNCDTFCAGSTFISDEVARDLSLQFKRPINPTDQSSYIVDSVTVKNGSIHLYFDKAGQKTYERHSLSHFVNLDNLRANNTKGSLPINVIVFDGKSKCEESSAKSASVYYSQLMCQPILLLDQALVSDVGDSAEVAVKMFDAYVNTFSSTFNVPMEKLKTLVATAEAELAKNVSLDNVLSTFISAARQGFVDSDVETKDVVECLKLSHQSDIEVTGDSCNNYMLTYNKVENMTPRDFGACIDCSARHINAQVAKSHNIALIWNVKDFMSLSEQLRKQIRSAAKKNNLPFKLTCATTRQVVNVVTTKIALKGG

SEQ ID NO: 15930 - protein, 1946 aa, Artificial Sequence
  SARS-CoV-2__MT834668.1__non-structural protein 3 (NSP3)
MAPTKVTFGDDTVIEVQGYKSVNITFELDERIDKVLNEKCSAYTVELGTEVNEFACVVADAVIKTLQPVSELLTPLGIDLDEWSMATYYLFDESGEFKLASHMYCSFYPPDEDEEEGDCEEEEFEPSTQYEYGTEDDYQGKPLEFGATSAALQPEEEQEEDWLDDDSQQTVGQQDGSEDNQTTTIQTIVEVQPQLEMELTPVVQTIEVNSFSGYLKLTDNVYIKNADIVEEAKKVKPTVVVNAANVYLKHGGGVAGALNKATNNAMQVESDDYIATNGPLKVGGSCVLSGHNLAKHCLHVVGPNVNKGEDIQLLKSAYENFNQHEVLLAPLLSAGIFGADPIHSLRVCVDTVRTNVYLAVFDKNLYDKLVSSFLEMKSEKQVEQKIAEIPKEEVKPFITESKPSVEQRKQDDKKIKACVEEVTTTLEETKFLTENLLLYIDINGNLHPDSATLVSDIDITFLKKDAPYIVGDVVQEGVLTAVVIPTKKAGGTTEMLAKALRKVPTDNYITTYPGQGLNGYTVEEAKTVLKKCKSAFYILPSIISNEKQEILGTVSWNLREMLAHAEETRKLMPVCVETKAIVSTIQRKYKGIKIQEGVVDYGARFYFYTSKTTVASLINTLNDLNETLVTMPLGYVTHGLNLEEAARYMRSLKVPATVSVSSPDAVTAYNGYLTSSSKTPEEHFIETISLAGSYKDWSYSGQSTQLGIEFLKRGDKSVYYTSNPTTFHLDGEVITFDNLKTLLSLREVRTIKVFTTVDNINLHTQVVDMSMTYGQQFGPTYLDGADVTKIKSHNSHEGKTFYVLPNDDTLRVEAFEYYHTTDPSFLGRYMSALNHTKKWKYPQVNGLTSIKWADNNCYLATALLTLQQIELKFNPPALQDAYYRARAGEAANFCALILAYCNKTVGELGDVRETMSYLFQHANLDSCKRVLNVVCKTCGQQQTTLKGVEAVMYMGTLSYEQFKKGVQIPCTCGKQATKYLVQQESPFVMMSAPPAQYELKHGTFTCASEYTGNYQCGHYKHITSKETLYCIDGALLTKSSEYKGPITDVFYKENSYTTTIKPVTYKLDGVVCTEIDPKLDNYYKKDNSYFTEQPIDLVPNQPYPNASFDNFKFVCDNIKFADDLNQLTGYKKPASRELKVTFFPDLNGDVVAIDYKHYTPSFKKGAKLLHKPIVWHVNNATNKATYKPNTWCIRCLWSTKPVETSNSFDVLKSEDAQGMDNLACEDLKPVSEEVVENPTIQKDVLECNVKTTEVVGDIILKPANNSLKITEEVGHTDLMAAYVDNSSLTIKKPNELSRVLGLKTLATHGLAAVNSVPWDTIANYAKPFLNKVVSTTTNIVTRCLNRVCTNYMPYFFTLLLQLCTFTRSTNSRIKASMPTTIAKNTVKSVGKFCLEASFNYLKSPNFSKLINIIIWFLLLSVCLGSLIYSTAALGVLMSNLGMPSYCTGYREGYLNSTNVTIATYCTGSIPCSVCLSGLDSLDTYPSLETIQITISSFKWDLTAFGLVAEWFLAYILFTRFFYVLGLAAIMQLFFSYFAVHFISNSWLMWLIINLVQMAPISAMVRMYIFFASFYYVWKSYVHVVDGCNSSTCMMCYKRNRATRVECTTIVNGVRRSFYVYANGGKGFCKLHNWNCVNCDTFCAGSTFISDEVARDLSLQFKRPINPTDQSSYIVDSVTVKNGSIHLYFDKAGQKTYERHSLSHFVNLDNLRANNTKGSLPINVIVFDGKSKCEESSAKSASVYYSQLMCQPILLLDQALVSDVGDSAEVAVKMFDAYVNTFSSTFNVPMEKLKTLVATAEAELAKNVSLDNVLSTFISAARQGFVDSDVETKDVVECLKLSHQSDIEVTGDSCNNYMLTYNKVENMTPRDLGACIDCSARHINAQVAKSHNIALIWNVKDFMSLSEQLRKQIRSAAKKNNLPFKLTCATTRQVVNVVTTKIALKGG

SEQ ID NO: 15931 - protein, 1946 aa, Artificial Sequence
  SARS-CoV-2__MT834697.1__non-structural protein 3 (NSP3)
MAPTKVTFGDDTVIEVQGYKSVNITFELDERIDKVLNEKCSAYTVELGTEVNEFACVVADAVIKTLQPVSELLTPLGIDLDEWSMATYYLFDESGEFKLASHMYCSFYPPDEDEEEGDCEEEEFEPSTQYEYGTEDDYQGKPLEFGATSAALQPEEEQEEDWLDDDSQQTVGQQDGSEDNQTTTIQTIVEVQPQLEMELTPVVQTIEVNSFSGYLKLTDNVYIKNADIVEEAKKVKPTVVVNAANVYLKHGGGVAGALNKATNNAMQVESDDYIATNGPLKVGGSCVLSGHNLAKHCLHVVGPNVNKGEDIQLLKSAYENFNQHEVLLAPLLSAGIFGADPIHSLRVCVDTVRTNVYLAVFDKNLYDKLVSSFLEMKSEKQVEQKIAEIPKEEVKPFITESKPSVEQRKQDDKKIKACVEEVTTTLEETKFLTENLLLYIDINGNLHPDSATLVSDIDITFLKKDAPYIVGDVVQEGVLTAVVIPTKKAGGTTEMLAKALRKVPTDNYITTYPGQGLNGYTVEEAKTVLKKCKSAFYILPSIISNEKQEILGTVSWNLREMLAHAEETRKLMPVCVETKAIVSTIQRKYKGIKIQEGVVDYGARFYFYTSKTTVASLINTLNDLNETLVTMPLGYVTHGLNLEEAARYMRSLKVPATVSVSSPDAVTAYNGYLTSSSKTPEEHFIETISLAGSYKDWSYSGQSTQLGIEFLKRGDKSVYYTSNPTTFHLDGEVITFDNLKTLLSLREVRTIKVFTTVDNINLHTQVVDMSMTYGQQFGPTYLDGADVTKIKPHNSHEGKTFYVLPNDDTLRVEAFEYYHTTDPSFLGRYMSALNHTKKWKYPQVNGLTSIKWADNNCYLATALLTLQQIELKFNPPALQDAYYRARAGEAANFCALILAYCNKTVGELGDVRETMSYLFQHANLDSCKRVLNVVCKTCGQQQTTLKGVEAVMYMGTLSYEQFKKGVQIPCTCGKQATKYLVQQESPFVMMSAPPAQYELKHGTFTCASEYTGNYQCGHYKHITSKETLYCIDGALLTKSSEYKGPITDVFYKENSYTTTIKPVTYKLDGVVCTEIDPKLDNYYKKDNSYFTEQPIDLVPNQPYPNAIFDNFKFVCDNIKFADDLNQLTGYKKPASRELKVTFFPDLNGDVVAIDYKHYTPSFKKGAKLLHKPIVWHVNNATNKATYKPNTWCIRCLWSTKPVETSNSFDVLKSEDAQGMDNLACEDLKPVSEEVVENPTIQKDVLECNVKTTEVVGDIILKPANNSLKITEEVGHTDLMAAYVDNSSLTIKKPNELSRVLGLKTLATHGLAAVNSVPWDTIANYAKPFLNKVVSTTTNIVTRCLNRVCTNYMPYFFTLLLQLCTFTRSTNSRIKASMPTTIAKNTVKSVGKFCLEASFNYLKSPNFSKLINIIIWFLLLSVCLGSLIYSTAALGVLMSNLGMPSYCTGYREGYLNSTNVTIATYCTGSIPCSVCLSGLDSLDTYPSLETIQITISSFKWDLTAFGLVAEWFLAYILFTRFFYVLGLAAIMQLFFSYFAVHFISNSWLMWLIINLVQMAPISAMVRMYIFFASFYYVWKSYVHVVDGCNSSTCMMCYKRNRATRVECTTIVNGVRRSFYVYANGGKGFCKLHNWNCVNCDTFCAGSTFISDEVARDLSLQFKRPINPTDQSSYIVDSVTVKNGSIHLYFDKAGQKTYERHSLSHFVNLDNLRANNTKGSLPINVIVFDGKSKCEESSAKSASVYYSQLMCQPILLLDQALVSDVGDSAEVAVKMFDAYVNTFSSTFNVPMEKLKTLVATAEAELAKNVSLDNVLSTFISAARQGFVDSDVETKDVVECLKLSHQSDIEVTGDSCNNYMLTYNKVENMTPRDLGACIDCSARHINAQVAKSHNIALIWNVKDFMSLSEQLRKQIRSAAKKNNLPFKLTCATTRQVVNVVTTKIALKGG

SEQ ID NO: 15932 - protein, 1946 aa, Artificial Sequence
  SARS-CoV-2__MT834733.1__non-structural protein 3 (NSP3)
MAPTKVTFGDDTVIEVQGYKSVNITFELDERIDKVLNEKCSAYTVELGTEVNEFACVVADAVIKTLQPVSELLTPLGIDLDEWSMATYYLFDESGEFKLASHMYCSFYPPDEDEEEGDCEEEEFGPSTQYEYGTEDDYQGKPLEFGATSAALQPEEEQEEDWLDDDSQQTVGQQDGSEDNQTTTIQTIVEVQPQLEMELTPVVQTIEVNSFSGYLKLTDNVYIKNADIVEEAKKVKPTVVVNAANVYLKHGGGVAGALNKATNNAMQVESDDYIATNGPLKVGGSCVLSGHNLAKHCLHVVGPNVNKGEDIQLLKSAYENFNQHEVLLAPLLSAGIFGADPIHSLRVCVDTVRTNVYLAVFDKNLYDKLVSSFLEMKSEKQVEQKIAEIPKEEVKPFITESKPSVEQRKQDDKKIKACVEEVTTTLEETKFLTENLLLYIDINGNLHPDSATLVSDIDITFLKKDAPYIVGDVVQEGVLTAVVIPTKKAGGTTEMLAKALRKVPTDNYITTYPGQGLNGYTVEEAKTVLKKCKSAFYILPSIISNEKQEILGTVSWNLREMLAHAEETRKLMPVCVETKAIVSTIQRKYKGIKIQEGVVDYGARFYFYTSKTTVASLINTLNDLNETLVTMPLGYVTHGLNLEEAARYMRSLKVPATVSVSSPDAVTAYNGYLTSSSKTPEEHFIETISLAGSYKDWSYSGQSTQLGIEFLKRGDKSVYYTSNPTTFHLDGEVITFDNLKTLLSLREVRTIKVFTTVDNINLHTQVVDMSMTYGQQFGPTYLDGADVTKIKPHNSHEGKTFYVLPNDDTLRVEAFEYYHTTDPSFLGRYMSALNHTKKWKYPQVNGLTSIKWADNNCYLATALLTLQQIELKFNPPALQDAYYRARAGEAANFCALILAYCNKTVGELGDVRETMSYLFQHANLDSCKRVLNVVCKTCGQQQTTLKGVEAVMYMGTLSYEQFKKGVQIPCTCGKQATKYLVQQESPFVMMSAPPAQYELKHGTFTCASEYTGNYQCGHYKHITSKETLYCIDGALLTKSSEYKGPITDVFYKENSYTTTIKPVTYKLDGVVCTEIDPKLDNYYKKDNSYFTEQPIDLVPNQPYPNASFDNFKFVCDNIKFADDLNQLTGYKKPASRELKVTFFPDLNGDVVAIDYKHYTPSFKKGAKLLHKPIVWHVNNATNKATYKPNTWCIRCLWSTKPVETSNSFDVLKSEDAQGMDNLACEDLKPVSEEVVENPTIQKDVLECNVKTTEVVGDIILKPANNSLKITEEVGHTDLMAAYVDNSSLTIKKPNELSRVLGLKTLATHGLAAVNSVPWDTIANYAKPFLNKVVSTTTNIVTRCLNRVCTNYMPYFFTLLLQLCTFTRSTNSRIKASMPTTIAKNTVKSVGKFCLEASFNYLKSPNFSKLINIIIWFLLLSVCLGSLIYSTAALGVLMSNLGMPSYCTGYREGYLNSTNVTIATYCTGSIPCSVCLSGLDSLDTYPSLETIQITISSFKWDLTAFGLVAEWFLAYILFTRFFYVLGLAAIMQLFFSYFAVHFISNSWLMWLIINLVQMAPISAMVRMYIFFASFYYVWKSYVHVVDGCNSSTCMMCYKRNRATRVECTTIVNGVRRSFYVYANGGKGFCKLHNWNCVNCDTFCAGSTFISDEVARDLSLQFKRPINPTDQSSYIVDSVTVKNGSIHLYFDKAGQKTYERHSLSHFVNLDNLRANNTKGSLPINVIVFDGKSKCEESSAKSASVYYSQLMCQPILLLDQALVSDVGDSAEVAVKMFDAYVNTFSSTFNVPMEKLKTLVATAEAELAKNVSLDNVLSTFISAARQGFVDSDVETKDVVECLKLSHQSDIEVTGDSCNNYMLTYNKVENMTPRDLGACIDCSARHINAQVAKSHNIALIWNVKDFMSLSEQLRKQIRSAAKKNNLPFKLTCATTRQVVNVVTTKIALKGG

SEQ ID NO: 15933 - protein, 1946 aa, Artificial Sequence
  SARS-CoV-2__MT704820.1__non-structural protein 3 (NSP3)
MAPTKVTFGDDTVIEVQGYKSVNITFELDERIDKVLNEKCSAYTVELGTEVNEFACVVADAVIKTLQPVSELLTPLGIDLDEWSMATYYLFDESGEFKLASHMYCSFYPPDEDEEEGDCEEEEFEPSTQYEYGTEDDYQGKPLEFGATSAALQPEEEQEEDWLDDDSQQTVGQQDGSEDNQTTTIQTIVEVQPQLEMELTPVVQTIEVNSFSGYLKLTDNVYIKNADIVEEAKKVKPTVVVNAANVYLKHGGGVAGALNKATNNAMQVESDDYIATNGPLKVGGSCVLSGHNLAKHCLHVVGPNVNKGEDIQLLKSAYENFNQHEVLLAPLLSAGIFGADPIHSLRVCVDTVRTNVYLAVFDKNLYDKLVSSFLEMKSEKQVEQKIAEIPKEEVKPFITESKPSVEQRKQDDNKIKACVEEVTTTLEETKFLTENLLLYIDINGNLHPDSATLVSDIDITFLKKDAPYIVGDVVQEGVLTAVVIPTKKAGGTTEMLAKALRKVPTDNYITTYPGQGLNGYTVEEAKTVLKKCKSAFYILPSIISNEKQEILGTVSWNLREMLAHAEETRKLMPVCVETKAIVSTIQRKYKGIKIQEGVVDYGARFYFYTSKTTVASLINTLNDLNETLVTMPLGYVTHGLNLEEAARYMRSLKVPATVSVSSPDAVTAYNGYLTSSSKTPEEHFIETISLAGSYKDWSYSGQSTQLGIEFLKRGDKSVYYTSNPTTFHLDGEVITFDNLKTLLSLREVRTIKVFTTVDNINLHTQVVDMSMTYGQQFGPTYLDGADVTKIKPHNSHEGKTFYVLPNDDTLRVEAFEYYHTTDPSFLGRYMSALNHTKKWKYPQVNGLTSIKWADNNCYLATALLTLQQIELKFNPPALQDAYYRARAGEAANFCALILAYCNKTVGELGDVRETMSYLFQHANLDSCKRVLNVVCKTCGQQQTTLKGVEAVMYMGTLSYEQFKKGVQIPCTCGKQATKYLVQQESPFVMMSAPPAQYELKHGTFTCASEYTGNYQCGHYKHITSKETLYCIDGALLTKSSEYKGPITDVFYKENSYTTTIKPVTYKLDGVVCTEIDPKLDNYYKKDNSYFTEQPIDLVPNQPYPNASFDNFKFVCDNIKFADDLNQLTGYKKPASRELKVTFFPDLNGDVVAIDYKHYTPSFKKGAKLLHKPIVWHVNNATNKATYKPNTWCIRCLWSTKPVETSNSFDVLKSEDAQGMDNLACEDLKPVSEEVVENPTIQKDVLECNVKTTEVVGDIILKPANNSLKITEEVGHTDLMAAYVDNSSLTIKKPNELSRVLGLKTLATHGLAAVNSVPWDTIANYAKPFLNKVVSTTTNIVTRCLNRVCTNYMPYFFTLLLQLCTFTRSTNSRIKASMPTTIAKNTVKSVGKFCLEASFNYLKSPNFSKLINIIIWFLLLSVCLGSLIYSTAALGVLMSNLGMPSYCTGYREGYLNSTNVTIATYCTGSIPCSVCLSGLDSLDTYPSLETIQITISSFKWDLTAFGLVAEWFLAYILFTRFFYVLGLAAIMQLFFSYFAVHFISNSWLMWLIINLVQMAPISAMVRMYIFFASFYYVWKSYVHVVDGCNSSTCMMCYKRNRATRVECTTIVNGVRRSFYVYANGGKGFCKLHNWNCVNCDTFCAGSTFISDEVARDLSLQFKRPINPTDQSSYIVDSVTVKNGSIHLYFDKAGQKTYERHSLSHFVNLDNLRANNTKGSLPINVIVFDGKSKCEESSAKSASVYYSQLMCQPILLLDQALVSDVGDSAEVAVKMFDAYVNTFSSTFNVPMEKLKTLVATAEAELAKNVSLDNVLSTFISAARQGFVDSDVETKDVVECLKLSHQSDIEVTGDSCNNYMLTYNKVENMTPRDLGACIDCSARHINAQVAKSHNIALIWNVKDFMSLSEQLRKQIRSAAKKNNLPFKLTCATTRQVVNVVTTKIALKGG

SEQ ID NO: 15934 - protein, 1946 aa, Artificial Sequence
  SARS-CoV-2__MT827209.1__non-structural protein 3 (NSP3)
MAPTKVTFGDDTVIEVQGYKSVNITFELDERIDKVLNEKCSAYTVELGTEVNEFACVVADAVIKTLQPVSELLTPLGIDLDEWSMATYYLFDESGEFKLASHMYCSFYPPDEDEEEGDCEEEEFEPSTQYEYGTEDDYQGKPLEFGATSAALQPEEEQEEDWLDDDSQQTVGQQDGSEDNQTTTIQTIVEVQPQLEMELTPVVQTIEVNSFSGYLKLTDNVYIKNADIVEEAKKVKPTVVVNAANVYLKHGGGVAGALNKATNNAMQVESDDYIATNGPLKVGGSCVLSGHNLAKHCLHVVGPNVNKGEDIQLLKSAYENFNQHEVLLAPLLSAGIFGADPIHSLRVCVDTVRTNVYLAVFDKNLYDKLVSSFLEMKSEKQVEQKIAEIPKEEVKPFITESKPSVEQRKQDDKKIKACVEEVTTTLEETKFLTENLLLYIDINGNLHPDSATLVSDIDITFLKKDAPYIVGDVVQEGVLTAVVIPTKKAGGTTEMLAKALRKVPTDNYITTYPGQGLNGYTVEEAKTVLKKCKSAFYILPSIISNEKQEILGTVSWNLREMLAHAEETRKLMPVCVETKAIVSTIQRKYKGIKIQEGVVDYGARFYFYTSKTTVASLINTLNDLNETLVTMPLGYVTHGLNLEEAARYMRSLKVPATVSVSSPDAVTAYNGYLTSSSKTPEEHFIETISLAGSYKDWSYSGQSTQLGIEFLKRGDKSVYYTSNPTTFHLDGEVITFDNLKTLLSLREVRTIKVFTTVDNINLHTQVVDMSMTYGQQFGPTYLDGADVTKIKPHNSHEGKTFYVLPNDDTLRVEAFEYYHTTDPSFLGRYMSALNHTKKWKYPQVNGLTSIKWADNNCYLATALLTLQQIELKFNPPALQDAYYRARAGEAANFCALILAYCNKTVGELGDVRETMSYLFQHANLDSCKRVLNVVCKTCGQQQTTLKGVEAVMYMGTLSYEQFKKGVQIPCTCGKQATKYLVQQESPFVMMSAPPAQYELKHGTFTCASEYTGNYQCGHYKHITSKETLYCIDGALLTKSSEYKGPITDVFYKENSYTTTIKPVTYKLDGVVCTEIDPKLDNYYKKDNSYFTEQPIDLVPNQPYPNASFDNFKFVCDNIKFADDLNQLTGYKKPASRELKVTFFPDLNGDVVAIDYKHYTPSFKKGAKLLHKPIVWHVNNATNKVTYKPNTWCIRCLWSTKPVETSNSFDVLKSEDAQGMDNLACEDLKPVSEEVVENPTIQKDVLECNVKTTEVVGDIILKPANNSLKITEEVGHTDLMAAYVDNSSLTIKKPNELSRVLGLKTLATHGLAAVNSVPWDTIANYAKPFLNKVVSTTTNIVTRCLNRVCTNYMPYFFTLLLQLCTFTRSTNSRIKASMPTTIAKNTVKSVGKFCLEASFNYLKSPNFSKLINIIIWFLLLSVCLGSLIYSTAALGVLMSNLGMPSYCTGYREGYLNSTNVTIATYCTGSIPCSVCLSGLDSLDTYPSLETIQITISSFKWDLTAFGLVAEWFLAYILFTRFFYVLGLAAIMQLFFSYFAVHFISNSWLMWLIINLVQMAPISAMVRMYIFFASFYYVWKSYVHVVDGCNSSTCMMCYKRNRATRVECTTIVNGVRRSFYVYANGGKGFCKLHNWNCVNCDTFCAGSTFISDEVARDLSLQFKRPINPTDQSSYIVDSVTVKNGSIHLYFDKAGQKTYERHSLSHFVNLDNLRANNTKGSLPINVIVFDGKSKCEESSAKSASVYYSQLMCQPILLLDQALVSDVGDSAEVAVKMFDAYVNTFSSTFNVPMEKLKTLVATAEAELAKNVSLDNVLSTFISAARQGFVDSDVETKDVVECLKLSHQSDIEVTGDSCNNYMLTYNKVENMTPRDLGACIDCSARHINAQVAKSHNIALIWNVKDFMSLSEQLRKQIRSAAKKNNLPFKLTCATTRQVVNVVTTKIALKGG

SEQ ID NO: 15935 - protein, 1946 aa, Artificial Sequence
  SARS-CoV-2__MT827213.1__non-structural protein 3 (NSP3)
MAPTKVTFGDDTVIEVQGYKSVNITFELDERIDKVLNEKCSAYTVELGTEVNEFACVVADAVIKTLQPVSELLTPLGIDLDEWSMATYYLFDESGEFKLASHMYCSFYPPDEDEEEGDCEEEEFEPSTQYEYGTEDDYQGKPLEFGATSAALQPEEEQEEDWLDDDSQQTVGQQDGSEDNQTTTIQTIVEVQPQLEMELTPVVQTIEVNSFSGYLKLTDNVYIKNADIVEEAKKVKPTVVVNAANVYLKHGGGVAGALNKATNNAMQVESDDYIATNGPLKVGGSCVLSGHNLAKHCLHVVGPNVNKGEDIQLLKSAYENFNQHEVLLAPLLSAGIFGADPIHSLRVCVDTVRTNVYLAVFDKNLYDKLVSSFLEMKSEKQVEQKIAEIPKEEVKPFITESKPSVEQRKQDDKKIKACVEEVTTTLEETKFLTENLLLYIDINGNLHPDSATLVSDIDITFLKKDAPYIVGDVVQEGVLTAVVIPTKKAGGTTEMLAKALRKVPTDNYITTYPGQGLNGYTVEEAKTVLKKCKSAFYILPSIISNEKQEILGTVSWNLREMLAHAEETRKLMPVCVETKAIVSTIQRKYKGIKIQEGVVDYGARFYFYTSKTTVASLINTLNDLNETLVTMPLGYVTHGLNLEEAARYMRSLKVPATVSVSSPDAVTAYNGYLTSSSKTPEEHFIETISLAGSYKDWSYSGQSTQLGIEFLKRGDKSVYYTSNPTTFHLDGEVITFDNLKTLLSLREVRTIKVFTTVDNINLHTQVVDMSMTYGQQFGPTYLDGADVTKIKPHNSHEGKTFYVLPNDDTLRVEAFEYYHTTDPSFLGRYMSALNHTKKWKYPQVNGLTSIKWADNNCYLATALLTLQQIELKFNPPALQDAYYRARAGEAANFCALILAYCNKTVGELGDVRETMSYLFQHANLDSCKRVLNVVCKTCGQQQTTLKGVEAVMYMGTLSYEQFKKGVQIPCTCGKQATKYLVQQESPFVMMSAPPAQYELKHGTFTCASEYTGNYQCGHYKHITSKETLYCIDGALLTKSSEYKGPITDVFYKENSYTTTIKPVTYKLDGVVCTEIDPKLDNYYKKDNSYFTEQPIDLVPNQPYPNASFDNFKFVCDNIKFADDLNQLTGYKKPASRELKVTFFPDLNGDVVAIDYKHYTPSFKKGAKLLHKPIVWHVNNATNKATYKPNTWCIRCLWSTKPVETSNSFDVLKSEDAQGMDNLACEDLKPVSEEVVENPTIQKDVLECNVKTTEVVGDIILKPANNSLKITEEVGHTDLMAAYVDNSSLTIKKPNELSRVLGLKTLATHGLAAVNSVPWDTIANYAKPFLNKVVSTTTNIVTRCLNRVCTNYMPYFFTLLLQLCTFTRSTNSRIKASMPTTIAKNTVKSVGKFCLEASFNYLKSPNFSKLINIIIWFLLLSVCLGSLIYSTAALGVLMSNLGMPSYCTGYREGYLNSTNVTIATYCTGSIPCSVCLSGLDSLDTYPSLETIQITISSFKWDLTAFGLVAEWFLAYILFTRFFYVLGLAAIMQLFFSYFAVHFISNSWLMWLIINLVQMAPISAMVRMYIFFASFYYVWKSYVHVVDGCNSSTCMMCYKRNRATRVECTTIVNGVRRSFYVYANGGKGFCKLHNWNCVNCDTFCAGSTFISDEVARDLSLQFKRPINPTDQSSYIVDSVTVKNGSIHLYFDKAGQKTYERHSLSHFVNLDNLRANNTKGSLPINVIVFDGKSKCEESSAKSASVYYSQLMCQPILLLDQALVSDVGDSVEVAVKMFDAYVNTFSSTFNVPMEKLKTLVATAEAELAKNVSLDNVLSTFISAARQGFVDSDVETKDVVECLKLSHQSDIEVTGDSCNNYMLTYNKVENMTPRDLGACIDCSARHINAQVAKSHNIALIWNVKDFMSLSEQLRKQIRSAAKKNNLPFKLTCATTRQVVNVVTTKIALKGG

SEQ ID NO: 15936 - protein, 1946 aa, Artificial Sequence
  SARS-CoV-2__MT827229.1__non-structural protein 3 (NSP3)
MAPTKVTFGDDTVIEVQGYKSVNITFELDERIDKVLNEKCSAYTVELGTEVNEFACVVADAVIKTLQPVSELLTPLGIDLDEWSMATYYLFDESGEFKLASHMYCSFYPPDEDEEEGDCEEEEFEPSTQYEYGTEDDYQGKPLEFGATSAALQPEEEQEEDWLDDDSQQTVGQQDGSEDNQTTTIQTIVEVQPQLEMELTPVVQTIEVNSFSGYLKLTDNVYIKNADIVEEAKKVKPTVVVNAANVYLKHGGGVAGALNKATNNAMQVESDDYIATNGPLKVGGSCVLSGHNLAKHCLHVVGPNVNKGEDIQLLKSAYENFNQHEVLLAPLLSAGIFGADPIHSLRVCVDTVRTNVYLAVFDKNLYDKLVSSFLEMKSEKQVEQKIAEIPKEEVKPFITESKPSVEQRKQDDKKIKACVEEVTTTLEETKFLTENLLLYIDINGNLHPDSATLVSDIDITFLKKDAPYIVGDVVQEGVLTAVVIPTKKAGGTTEMLAKALRKVPTDNYITTYPGQGLNGYTVEEAKTVLKKCKSAFYILPSIISNEKQEILGTVSWNLREMLAHAEETRKLMPVCVETKAIVSTIQRKYKGIKIQEGVVDYGARFYFYTSKTTVASLINTLNDLNETLVTMPLGYVTHGLNLEEAARYMRSLKVPATVSVSSPDAVTAYNGYLTSSSKTPEEHFIETISLAGSYKDWSYSGQSTQLGIEFLKRGDKSVYYTSNPTTFHLDGEVITFDNLKTLLSLREVRTIKVFTTVDNINLHTQVVDMSMTYGQQFGPTYLDGADVTKIKPHNSHEGKTFYVLPNDDTLRVEAFEYYHTTDPSFLGRYMSALNHTKKWKYPQVNGLTSIKWADNNCYLATALLTLQQIELKFNPPALQDAYYRARAGEAANFCALILAYCNKTVGELGDVRETMSYLFQHANLDSCKRVLNVVCKTCGQQQTTLKGVEAVMYMGTLSYEQFKKGVQIPCTCGKQATKYLVQQESPFVMMSAPPAQYELKHGTFTCASEYTGNYQCGHYKHITSKETLYCIDGALLTKSSEYKGPITDVFYKENSYTTTIKPVTYKLDGVVCTEIDPKLDNYYKKDNSYFTEQPIDLVPNQPYPNASFDNFKFVCDNIKFADDLNQLTGYKKPASRELKVTFFPDLNGDVVAIDYKHYTPSFKKGAKLLHKPIVWHVNNATNKATYKPNTWCIRCLWSTKPVETSNSFDVLKSEDAQGMDNLACEDLKPVSEEVVENPTIQKDVLECNVKTTEVVGDIILKPANNSLKITEEVGHTDLMAAYVDNSSLTIKKPNELSRVLGLKTLATHGLAAVNSVPWDTIANYAKPFLNKVVSITTNIVTRCLNRVCTNYMPYFFTLLLQLCTFTRSTNSRIKASMPTTIAKNTVKSVGKFCLEASFNYLKSPNFSKLINIIIWFLLLSVCLGSLIYSTAALGVLMSNLGMPSYCTGYREGYLNSTNVTIATYCTGSIPCSVCLSGLDSLDTYPSLETIQITISSFKWDLTAFGLVAEWFLAYILFTRFFYVLGLAAIMQLFFSYFAVHFISNSWLMWLIINLVQMAPISAMVRMYIFFASFYYVWKSYVHVVDGCNSSTCMMCYKRNRATRVECTTIVNGVRRSFYVYANGGKGFCKLHNWNCVNCDTFCAGSTFISDEVARDLSLQFKRPINPTDQSSYIVDSVTVKNGSIHLYFDKAGQKTYERHSLSHFVNLDNLRANNTKGSLPINVIVFDGKSKCEESSAKSASVYYSQLMCQPILLLDQALVSDVGDSAEVAVKMFDAYVNTFSSTFNVPMEKLKTLVATAEAELAKNVSLDNVLSTFISAARQGFVDSDVETKDVVECLKLSHQSDIEVTGDSCNNYMLTYNKVENMTPRDLGACIDCSARHINAQVAKSHNIALIWNVKDFMSLSEQLRKQIRSAAKKNNLPFKLTCATTRQVVNVVTTKIALKGG

SEQ ID NO: 15937 - protein, 1946 aa, Artificial Sequence
  SARS-CoV-2__MT827234.1__non-structural protein 3 (NSP3)
MAPTKVTFGDDTVIEVQGYKSVNITFELDERIDKVLNEKCSAYTVELGTEVNEFACVVADAVIKTLQPVSELLTPLGIDLDEWSMATYYLFDESGEFKLASHMYCSFYPPDEDEEEGDCEEEEFEPSTQYEYGTEDDYQGKPLEFGATSAALQPEEEQEEDWLDDDSQQTVGQQDGSEDNQTTTIQTIVEVQPQLEMELTPVVQTIEVNSFSGYLKLTDNVYIKNADIVEEAKKVKPTVVVNAANVYLKHGGGVAGALNKATNNAMQVESDDYIATNGPLKVGGSCVLSGHNLAKHCLHVVGPNVNKGEDIQLLKSAYENFNQHEVLLAPLLSAGIFGADPIYSLRVCVDTVRTNVYLAVFDKNLYDKLVSSFLEMKSEKQVEQKIAEIPKEEVKPFITESKPSVEQRKQDDKKIKACVEEVTTTLEETKFLTENLLLYIDINGNLHPDSATLVSDIDITFLKKDAPYIVGDVVQEGVLTAVVIPTKKAGGTTEMLAKALRKVPTDNYITTYPGQGLNGYTVEEAKTVLKKCKSAFYILPSIISNEKQEILGTVSWNLREMLAHAEETRKLMPVCVETKAIVSTIQRKYKGIKIQEGVVDYGARFYFYTSKTTVASLINTLNDLNETLVTMPLGYVTHGLNLEEAARYMRSLKVPATVSVSSPDAVTAYNGYLTSSSKTPEEHFIETISLAGSYKDWSYSGQSTQLGIEFLKRGDKSVYYTSNPTTFHLDGEVITFDNLKTLLSLREVRTIKVFTTVDNINLHTQVVDMSMTYGQQFGPTYLDGADVTKIKPHNSHEGKTFYVLPNDDTLRVEAFEYYHTTDPSFLGRYMSALNHTKKWKYPQVNGLTSIKWADNNCYLATALLTLQQIELKFNPPALQDAYYRARAGEAANFCALILAYCNKTVGELGDVRETMSYLFQHANLDSCKRVLNVVCKTCGQQQTTLKGVEAVMYMGTLSYEQFKKGVQIPCTCGKQATKYLVQQESPFVMMSAPPAQYELKHGTFTCASEYTGNYQCGHYKHITSKETLYCIDGALLTKSSEYKGPITDVFYKENSYTTTIKPVTYKLDGVVCTEIDPKLDNYYKKDNSYFTEQPIDLVPNQPYPNASFDNFKFVCDNIKFADDLNQLTGYKKPASRELKVTFFPDLNGDVVAIDYKHYTPSFKKGAKLLHKPIVWHVNNATNKATYKPNTWCIRCLWSTKPVETSNSFDVLKSEDAQGMDNLACEDLKPVSEEVVENPTIQKDVLECNVKTTEVVGDIILKPANNSLKITEEVGHTDLMAAYVDNSSLTIKKPNELSRVLGLKTLATHGLAAVNSVPWDTIANYAKPFLNKVVSTTTNIVTRCLNRVCTNYMPYFFTLLLQLCTFTRSTNSRIKASMPTTIAKNTVKSVGKFCLEASFNYLKSPNFSKLINIIIWFLLLSVCLGSLIYSTAALGVLMSNLGMPSYCTGYREGYLNSTNVTIATYCTGSIPCSVCLSGLDSLDTYPSLETIQITISSFKWDLTAFGLVAEWFLAYILFTRFFYVLGLAAIMQLFFSYFAVHFISNSWLMWLIINLVQMAPISAMVRMYIFFASFYYVWKSYVHVVDGCNSSTCMMCYKRNRATRVECTTIVNGVRRSFYVYANGGKGFCKLHNWNCVNCDTFCAGSTFISDEVARDLSLQFKRPINPTDQSSYIVDSVTVKNGSIHLYFDKAGQKTYERHSLSHFVNLDNLRANNTKGSLPINVIVFDGKSKCEESSAKSASVYYSQLMCQPILLLDQALVSDVGDSAEVAVKMFDAYVNTFSSTFNVPMEKLKTLVATAEAELAKNVSLDNVLSTFISAARQGFVDSDVETKDVVECLKLSHQSDIEVTGDSCNNYMLTYNKVENMTPRDLGACIDCSARHINAQVAKSHNIALIWNVKDFMSLSEQLRKQIRSAAKKNNLPFKLTCATTRQVVNVVTTKIALKGG

SEQ ID NO: 15938 - protein, 1946 aa, Artificial Sequence
  SARS-CoV-2__MT827253.1__non-structural protein 3 (NSP3)
MAPTKVTFGDDTVIEVQGYKSVNITFELDERIDKVLNEKCSAYTVELGTEVNEFACVVADAVIKTLQPVSELLTPLGIDLDEWSMATYYLFDESGEFKLASHMYCSFYPPDEDEEEGDCEEEEFEPSTQYEYGTEDDYQGKPLEFGATSAALQPEEEQEEDWLDDDSQQTVGQQDGSEDNQTTTIQTIVEVQPQLEMELTPVVQTIEVNSFSGYLKLTDNVYIKNADIVEEAKKVKPTVVVNAANVYLKHGGGVAGALNKATNNAMQVESDDYIATNGPLKVGGSCVLSGHNLAKHCLHVVGPNVNKGEDIQLLKSAYENFNQHEVLLAPLLSAGIFGADPIHSLRVCVDTVRTNVYLAVFDKNLYDKLVSSFLEMKSEKQVEQKIAEIPKEEVKPFITESKPSVEQRKQDDKKIKACVEEVTTTLEETKFLTENLLLYIDINGNLHPDSATLVSDIDITFLKKDAPYIVGDVVQEGVLTAVVIPTKKAGGTTEMLAKALRKVPTDNYITTYPGQGLNGYTVEEAKTVLKKCKSAFYILPSIISNEKQEILGTVSWNLREMLAHAEETRKLMPVCVETKAIVSTIQRKYKGIKIQEGVVDYGARFYFYTSKTTVASLINTLNDLNETLVTMPLGYVTHGLNLEEAARYMRSLKVPATVSVSSPDAVTAYNGYLTSSSKTPEEHFIETISLAGSYKDWSYSGQSTQLGIEFLKRGDKSVYYTSNPTTFHLDGEVITFDNLKTLLSLREVRTIKVFTTVDNINLHTQVVDMSMTYGQQFGPTYLDGADVTKIKPHNSHEGKTFYVLPNDDTLRVEAFEYYHTTDPSFLGRYMSALNHTKKWKYPQVNGLTSIKWADNNCYLATALLTLQQIELKFNPPALQDAYYRARAGEAANFCALILAYCNKTVGELGDVRETMSYLFQHANLDSCKRVLNVVCKTCGQQQTTLKGVEAVMYMGTLSYEQFKKGVQIPCTCGKQATKYLVQQESPFVMMSAPPAQYELKHGTFTCASEYTGNYQCGHYKHITSKETLYCIDGALLTKSSEYKGPITDVFYKENSYTTTIKPVTYKLDGVVCTEIDPKLDNYYKKDNSYFTEQPIDLVPNQPYPNASFDNFKFVCDNIKFADDLNQLTGYKKPASRELKVTFFPDLNGDVVAIDYKHYTPSFKKGAKLLHKPIVWHVNNATNKATYKPNTWCIRCLWSTKPVETSNSFDVLKSEDAQGMDNLACEDLKPVSEEVVENPTIQKDVLECNVKTTEVVGDIILKPANNSLKITEEVGHTDLMAAYVDNSSLTIKKPNELSRVLGLKTLATHGLAAVNSVPWDTIANYAKPFLNKVVSTTTNIVTRCLNRVCTNYMPYFFTLLLQLCTFTRSTNSRIKASMPTTIANNTVKSVGKFCLEASFNYLKSPNFSKLINIIIWFLLLSVCLGSLIYSTAALGVLMSNLGMPSYCTGYREGYLNSTNVTIATYCTGSIPCSVCLSGLDSLDTYPSLETIQITISSFKWDLTAFGLVAEWFLAYILFTRFFYVLGLAAIMQLFFSYFAVHFISNSWLMWLIINLVQMAPISAMVRMYIFFASFYYVWKSYVHVVDGCNSSTCMMCYKRNRATRVECTTIVNGVRRSFYVYANGGKGFCKLHNWNCVNCDTFCAGSTFISDEVARDLSLQFKRPINPTDQSSYIVDSVTVKNGSIHLYFDKAGQKTYERHSLSHFVNLDNLRANNTKGSLPINVIVFDGKSKCEESSAKSASVYYSQLMCQPILLLDQALVSDVGDSAEVAVKMFDAYVNTFSSTFNVPMEKLKTLVATAEAELAKNVSLDNVLSTFISAARQGFVDSDVETKDVVECLKLSHQSDIEVTGDSCNNYMLTYNKVENMTPRDLGACIDCSARHINAQVAKSHNIALIWNVKDFMSLSEQLRKQIRSAAKKNNLPFKLTCATTRQVVNVVTTKIALKGG

SEQ ID NO: 15939 - protein, 1946 aa, Artificial Sequence
  SARS-CoV-2__MT827840.1__non-structural protein 3 (NSP3)
MAPTKVTFGDDTVIEVQGYKSVNITFELDERIDKVLNEKCSAYTVELGTEVNEFACVVADAVIKTLQPVSELLTPLGIDLDEWSMATYYLFDESGEFKLASHMYCSFYPPDEDEEEGDCEEEEFEPSTQYEYGTEDDYQGKPLEFGATSAALQPEEEQEEDWLDDDSQQTVGQQDGSEDNQTTTIQTIVEVQPQLEMELTPVVQTIEVNSFSGYLKLTDNVYIKNADIVEEAKKVKPTVVVNAANVYLKHGGGVAGALNKATNNAMQVESDDYIATNGPLKVGGSCVLSGHNLAKHCLHVVGPNVNKGEDIQLLKSAYENFNQHEVLLAPLLSAGIFGADPIHSLRVCVDTVRTNVYLAVFDKNLYDKLVSSFLEMKSEKQVEQKIAEIPKEEVKPFITESKPSVEQRKQDDKKIKACVEEVTTTLEETKFLTENLLLYIDINGNLHPDSATLVSDIDITFLKKDAPYIVGDVVQEGVLTAVVIPTKKAGGTTEMLAKALRKVPTDNYITTYPGQGLNGYTVEEAKTVLKKCKSAFYILPSIISNEKQEILGTVSWNLREMLAHAEETRKLMPVCVETKAIVSTIQRKYKGIKIQEGVVDYGARFYFYTSKTTVASLINTLNDLNETLVTMPLGYVTHGLNLEEAARYMRSLKVPATVSVSSPDAVTAYNGYLTSSSKTPEEHFIETISLAGSYKDWSYSGQSTQLGIEFLKRGDKSVYYTNPTTFHLDGEVITFDNLKTLLSLREVRTIKVFTTVDNINLHTQVVDMSMTYGQQFGPTYLDGADVTKIKPHNSHEGKTFYVLPNDDTLRVEAFEYYHTTDPSFLGRYMSALNHTKKWKYPQVNGLTSIKWADNNCYLATALLTLQQIELKFNPPALQDAYYRARAGEAANFCALILAYCNKTVGELGDVRETMSYLFQHANLDSCKRVLNVVCKTCGQQQTTLKGVEAVMYMGTLSYEQFKKGVQIPCTCGKQATKYLVQQESPFVMMSAPPAQYELKHGTFTCASEYTGNYQCGHYKHITSKETLYCIDGALLTKSSEYKGPITDVFYKENSYTTTIKPVTYKLDGVVCTEIDPKLDNYYKKDNSYFTEQPIDLVPNQPYPNASFDNFKFVCDNIKFADDLNQLTGYKKPASRELKVTFFPDLNGDVVAIDYKHYTPSFKKGAKLLHKPIVWHVNNATNKATYKPNTWCIRCLWSTKPVETSNSFDVLKSEDAQGMDNLACEDLKPVSEEVVENPTIQKDVLECNVKTTEVVGDIILKPANNSLKITEEVGHTDLMAAYVDNSSLTIKKPNELSRVLGLKTLATHGLAAVNSVPWDTIANYAKPFLNKVVSTTTNIVTRCLNRVCTNYMPYFFTLLLQLCTFTRSTNSRIKASMPTTIAKNTVKSVGKFCLEASFNYLKSPNFSKLINIIIWFLLLSVCLGSLIYSTAALGVLMSNLGMPSYCTGYREGYLNSTNVTIATYCTGSIPCSVCLSGLDSLDTYPSLETIQITISSFKWDLTAFGLVAEWFLAYILFTRFFYVLGLAAIMQLFFSYFAVHFISNSWLMWLIINLVQMAPISAMVRMYIFFASFYYVWKSYVHVVDGCNSSTCMMCYKRNRATRVECTTIVNGVRRSFYVYANGGKGFCKLHNWNCVNCDTFCAGSTFISDEVARDLSLQFKRPINPTDQSSYIVDSVTVKNGSIHLYFDKAGQKTYERHSLSHFVNLDNLRANNTKGSLPINVIVFDGKSKCEESSAKSASVYYSQLMCQPILLLDQALVSDVGDSAEVAVKMFDAYVNTFSSTFNVPMEKLKTLVATAEAELAKNVSLDNVLSTFISAARQGFVDSDVETKDVVECLKLSHQSDIEVTGDSCNNYMLTYNKVENMTPRDLGACIDCSARHINAQVAKSHNIALIWNVKDFMSLSEQLRKQIRSAAKKNNLPFKLTCATTRQVVNVVTTKIALKGGK

SEQ ID NO: 15940 - protein, 1946 aa, Artificial Sequence
  SARS-CoV-2__MT825091.1__non-structural protein 3 (NSP3)
MAPTKVTFGDDTVIEVQGYKSVNITFELDERIDKVLNEKCSAYTVELGTEVNEFACVVADAVIKTLQPVSELLTPLGIDLDEWSMATYYLFDESGEFKLASHMYCSFYPPDEDEEEGDCEEEEFEPSTQYEYGTEDDYQGQPLEFGATSAALQPEEEQEEDWLDDDSQQTVGQQDGSEDNQTTTIQTIVEVQPQLEMELTPVVQTIEVNSFSGYLKLTDNVYIKNADIVEEAKKVKPTVVVNAANVYLKHGGGVAGALNKATNNAMQVESDDYIATNGPLKVGGSCVLSGHNLAKHRLHVVGPNVNKGEDIQLLKSAYENFNQHEVLLAPLLSAGIFGADPIHSLRVCVDTVRTNVYLAVFDKNLYDKLVSSFLEMKSVKQVEQKIAEIPKEEVKPFITESKPSVEQRKQDDKKIKACVEEVTTTLEETKFLTENLLLYIDINGNLHPDSATLVSDIDITFLKKDAPYTVGDVVQEGVLTAVVIPTKKAGGTTEMLAKALRKVPTDNYITTYPGQGLNGYTVEEAKTVLKKCKSAFYILPSIISNEKQEILGTVSWNLPEMLAHAEETRKLMPVCVETKAIVSTIQRKYKGIKIQEGVVDYGARFYFYTSKTTVASLINTLNDLNETLVTMPLGYVTHGLNLEEAARYMRSLKVPATVSVSSPDAVTAYNGYLTYSSKTPEEHFIETISLAGSYKDWSYSGQSTQLGIEFLKRGDKSVYYTNNPTTFHLDGEVITFDNLKTLLSLREVRTIKVFTTVDNINLHTQVVDMSMTYGQQFGPTYSDGADVTKIKPHNSHEGKTFYVLPNDDTLRVEAFEYYHTTDPSFLGRYMSALNHTKKWKYPQVNGLTSIKWADNNCYLATALLTLQQIELKFNPPALQDAYYRARDGEAANFCALILAYCNKTVGELGDVRETMSYLFQHANLDSCKRVLNVVCKTCGQQQTTLKGVEAVMYMGTLSYEQFKKGVQIPCTCGKQATKYLVQQESPFVMMSAPPAQYELKHGTFTCASEYTGNYQCGHYKHITSKETLYCIDGALLTKSSEYKGPITDVFYKENSYTTTIKPVTYKLDGVVCTEIDPKLDNYYKKDNSYFTEQPIDLVPNQPYPNGSFDNFKFVCDNIKFADDLNQLTGYKKPASRELKVTFFPDLNGDVVAIDYKHYTPSFKKGAKLLHKPIVWHVNNATNKATYKPNTWCIRCLWSTKPVETSNSFDVLKSEDAQGMDNLACEDLKPVSEEVVENPTIQKDVLECNVKTTEVVGDIILKPANNSLKITEEVGHTDLMDAYVDNSSLTIKKPNELSRVLGLKTLATHGLAAVNSVPWDTIANYAKPFLNKVVSTTTNIVTLCLNLVCTNYMPYFFTLLLQLCTFTRSTNSRIKASMPTTIAKNTVKSVDKFCLEASFNYLKSPNFSKLINIIIWFLLLSVCLGSLIYSTAALGVLMSNLGMPSYCTGYREGYLNSTNVTIATYCTGSIPCSVCLSGLDSLDIYPSLETIQITISSFKWDLTAFGLVAEWFLAYILFTRFFYVHGLAAIMQLFFSYFAVHFISNSWLMWLIINLVQMAPISAMVRMYIFFASFYYVWKSYVHVVDGCNSSTCMMCYRRNRATRVECTTIVNGVRRSFYVYANGGKGFCKLHNWNCVNCDTFCAGSTFISDEVARDLSLQFKRPINPTDQSSYIDDSVTVKNGSIHLYFDKAGQKTYERHSLSHFVNLDNLRANNTRGSLPINVIVFDGKSKCEESSAKSASVYYSQLMCQPILLLDQALVSDVGDSAEVAVKMFDAYVSTFSSTFNVPMEKLKTLVATAEAELAKNVSLDNVLSTFISAARQGFVDSDVETKDVVECLRLSHQSDIEVTGDSCNNYMLTYNKVENTTPRDLGACIDCSARHINAQVAKSHNIALIWNVKDFMSLSEQLRKQIRSAAKKNNLPFKLTCATTRQVVNVVTTKIALKVG

SEQ ID NO: 15941 - protein, 1946 aa, Artificial Sequence
  SARS-CoV-2__MT821531.1__non-structural protein 3 (NSP3)
MAPTKVTFGDDTVIEVQGYKSVNITFELDERIDKVLNEKCSAYTVELGTEVNEFACVVADAVIKTLQPVSELLTPLGIDLDEWSMATYYLFDESGEFKLASHMYCSFYPPDEDEEEGDCEEEEFEPSTQYEYGTEDDYQGKPLEFGATSAALQPEEEQEEDWLDDDSQQTVGQQDGSEDNQTTTIQTIVEVQPQLEMELTPVVQTIEVNSFSGYLKLTDNVYIKNADIVEEAKKVKPTVVVNAANVYLKHGGGVAGALNKATNNAMQVESDDYIATNGPLKVGGSCVLSGHNLAKHCLHVVGPNVNKGEDIQLLKSAYENFNQHEVLLAPLLSAGIFGADPIHSLRVCVDTVRTNVYLAVFDKNLYDKLVSSFLEMKSEKQVEQKIAEIPKEEVKPFITESKPSVEQRKQDDKKIKACVEEVTTTLEETKFLTENLLLYIDINGNLHPDSATLVSDIDITFLKKDAPYIVGDVVQEGVLTAVVIPTKKAGGTTEMLAKALRKVPTDNYITTYPGQGLNGYTVEEAKTVLKKCKSAFYILPSIISNEKQEILGTVSWNLREMLAHAEETRKLMPVCVETKAIVSTIQRKYKGIKIQEGVVDYGVRFYFYTSKTTVASLINTLNDLNETLVTMPLGYVTHGLNLEEAARYMRSLKVPATVSVSSPDAVTAYNGYLTSSSKTPEEHFIETISLAGSYKDWSYSGQSTQLGIEFLKRGDKSVYYTSNPTTFHLDGEVITFDNLKTLLSLREVRTIKVFTTVDNINLHTQVVDMSMTYGQQFGPTYLDGADVTKIKPHNSHEGKTFYVLPNDDTLRVEAFEYYHTTDPSFLGRYMSALNHTKKWKYPQVNGLTSIKWADNNCYLATALLTLQQIELKFNPPALQDAYYRARAGEAANFCALILAYCNKTVGELGDVRETMSYLFQHANLDSCKRVLNVVCKTCGQLQTTLKGVEAVMYMGTLSYEQFKKGVQIPCTCGKQATKYLVQQESPFVMMSAPPAQYELKHGTFTCASEYTGNYQCGHYKHITSKETLYCIDGALLTKSSEYKGPITDVFYKENSYTTTIKPVTYKLDGVVCTEIDPKLDNYYKKDNSYFTEQPIDLVPNQPYPNASFDNFKFVCDNIKFADDLNQLTGYKKPASRELKVTFFPDLNGDVVAIDYKHYTPSFKKGAKLLHKPIVWHVNNATNKATYKPNTWCIRCLWSTKPVETSNSFDVLKSEDAQGMDNLACEDLKPVSEEVVENPTIQKDVLECNVKTTEVVGDIILKPANNSLKITEEVGHTDLMAAYVDNSSLTIKKPNELSRVLGLKTLATHGLAAVNSVPWDTIANYAKPFLNKVVSTTTNIVTRCLNRVCTNYMPYFFTLLLQLCTFTRSTNSRIKASMPTTIAKNTVKSVGKFCLEASFNYLKSPNFSKLINIIIWFLLLSVCLGSLIYSTAALGVLMSNLGMPSYCTGYREGYLNSTNVTIATYCTGSIPCSVCLSGLDSLDTYPSLETIQITISSFKWDLTAFGLVAEWFLAYILFTRFFYVLGLAAIMQLFFSYFAVHFISNSWLMWLIINLVQMAPISAMVRMYIFFASFYYVWKSYVHVVDGCNSSTCMMCYKRNRATRVECTTIVNGVRRSFYVYANGGKGFCKLHNWNCVNCDTFCAGSTFISDEVARDLSLQFKRPINPTDQSSYIVDSVTVKNGSIHLYFDKAGQKTYERHSLSHFVNLDNLRANNTKGSLPINVIVFDGKSKCEESSAKSASVYYSQLMCQPILLLDQALVSDVGDSAEVAVKMFDAYVNTFSSTFNVPMEKLKTLVATAEAELAKNVSLDNVLSTFISAARQGFVDSDVETKDVVECLKLSHQSDIEVTGDSCNNYMLTYNKVENMTPRDLGACIDCSARHINAQVAKSHNIALIWNVKDFMSLSEQLRKQIRSAAKKNNLPFKLTCATTRQVVNVVTTKIALKGG

SEQ ID NO: 15942 - protein, 1946 aa, Artificial Sequence
  SARS-CoV-2__MT821535.1__non-structural protein 3 (NSP3)
MAPTKVTFGDDTVIEVQGYKSVNITFELDERIDKVLNEKCSAYTVELGTEVNEFACVVADAVIKTLQPVSELLTPLGIDLDEWSMATYYLFDESGEFKLASHMYCSFYPPDEDEEEGDCEEEEFEPSTQYEYGTEDDYQGKPLEFGATSAALQPEEEQEEDWLDDDSQQTVGQQDGSEDNQTTTIQTIVEVQPQLEMELTPVVQTIEVNSFSGYLKLTDNVYIKNADIVEEAKKVKPTVVVNAANVYLKHGGGVAGALNKATNNAMQVESDDYIATNGPLKVGGSCVLSGHNLAKHCLHVVGPNVNKGEDIQLLKSAYENFNQHEVLLAPLLSAGIFGADPIHSLRVCVDTVRTNVYLAVFDKNLYDKLVSSFLEMKSEKQVEQKIAEIPKEEVKPFITESKPSVEQRKQDDKKIKACVEEVTTTLEETKFLTENLLLYIDINGNLHPDSATLVSDIDITFLKKDAPYIVGDVVQEGVLTAVVIPTKKAGGTTEMLAKALRKVPTDNYITTYPGQGLNGYTVEEAKTVLKKCKSAFYILPSIISNEKQEILGTVSWNLREMLAHAEETRKLMPVCVETKAIVSTIQRKYKGIKIQEGVVDYGARFYFYTSKTTVASLINTLNDLNETLVTMPLGYVTHGLNLEEAARYMRSLKVPATVSVSSPDAVTAYNGYLTSSSKTPEEHFIETISLAGSYKDWSYSGQSTQLGIEFLKRGDKSVYYTSNPTTFHLDGEVITFDNLKTLLSLREVRTIKVFTTVDNINLHTQVVDMSMTYGQQFGPTYLDGADVTKIKPHNSHEGKTFYVLPNDDTLRVEAFEYYHTTDPSFLGRYMSALNHTKKWKYPQVNGLTSIKWADNNCYLATALLTLQQIELKFNPPALQDAYYRARAGEAANFCALILAYCNKTVGELGDVRETMSYLFQHANLDSCKRVLNVVCKTCGQLQTTLKGVEAVMYMGTLSYEQFKKGVQIPCTCGKQATKYLVQQESPFVMMSAPPAQYELKHGTFTCASEYTGNYQCGHYKHITSKETLYCIDGALLTKSSEYKGPITDVFYKENSYTTTIKPVTYKLDGVVCTEIDPKLDNYYKKDNSYFTEQPIDLVPNQPYPNASFDNFKFVCDNIKFADDLNQLTGYKKPASRELKVTFFPDLNGDVVAIDYKHYTPSFKKGAKLLHKPIVWHVNNATNKATYKPNTWCIRCLWSTKPVETSNSFDVLKSEDAQGMDNLACEDLKPVSEEVVENPTIQKDVLECNVKTTEVVGDIILKPANNSLKITEEVGHTDLMAAYVDNSSLTIKKPNELSRVLGLKTLATHGLAAVNSVPWDTIANYAKPFLNKVVSTTTNIVTRCLNRVCTNYMPYFFTLLLQLCTFTRSTNSRIKASMPTTIAKNTVKSVGKFCLEASFNYLKSPNFSKLINIIIWFLLLSVCLGSLIYSTAALGVLMSNLGMPSYCTGYREGYLNSTNVTIATYCTGSIPCSVCLSGLDSLDTYPSLETIQITISSFKWDLTAFGLVAEWFLAYILFTRFFYVLGLAAIMQLFFSYFAVHFISNSWLMWLIINLVQMAPISAMVRMYIFFASFYYVWKSYVHVVDGCNSSTCMMCYKRNRATRVECTTIVNGVRRSFYVYANGGKGFCKLHNWNCVNCDTFCAGSTFISDEVARDLSLQFKRPINPTDQSSYIVDSVTVKNGSIHLYFDKAGQKTYERHSLSHFVNLDNLRANNTKGSLPINVIVFDGKSKCEESSAKSASVYYSQLMCQPILLLDQALVSDVGDSAEVAVKMFDAYVNTFSSTFNVPMEKLKTLVATAEAELAKNVSLDNVLSTFISAARQGFVDSDVETKDVVECLKLSHQSDIEVTGDSCNNYMLTYNKVENMTPRDLGACIDCSARHINAQVAKSHNIALIWNVKDFMSLSEQLRKQIRSAAKKNNLPFKLTCATTRQVVNVVTTKIALKGG

SEQ ID NO: 15943 - protein, 1946 aa, Artificial Sequence
  SARS-CoV-2__MT821537.1__non-structural protein 3 (NSP3)
MAPTKVTFGDDTVIEVQGYKSVNITFELDERIDKVLNEKCSAYTVELGTEVNEFACVVADAVIKTLQPVSELLTPLGIDLDEWSMATYYLFDESGEFKLASHMYCSFYPPDEDEEEGDCEEEEFEPSTQYEYGTEDDYQGKPLEFGATSAALQPEEEQEEDWLDDDSQQTVGQQDGSEDNQTTTIQTIVEVQPQLEMELTPVVQTIEVNSFSGYLKLTDNVYIKNADIVEEAKKVKPTVVVNAANVYLKHGGGVAGALNKATNNAMQVESDDYIATNGPLKVGGSCVLSGHNLAKHCLHVVGPNVNKGEDIQLLKSAYENFNQHEVLLAPLLSAGIFGADPIHSLRVCVDTVRTNVYLAVFDKNLYDKLVSSFLEMKSEKQVEQKIAEIPKEEVKPFITESKPSVEQRKQDDKKIKACVEEVTTTLEETKFLTENLLLYIDINGNLHPDSATLVSDIDITFLKKDAPYIVGDVVQEGVLTAVVIPTKKAGGTTEMLAKALRKVPTDNYITTYPGQGLNGYTVEEAKTVLKKCKSAFYILPSIISNEKQEILGTVSWNLREMLAHAEETRKLMPVCVETKAIVSTIQRKYKGIKIQEGVVDYGARFYFYTSKTTVASLINTLNDLNETLVTMPLGYVTHGLNLEEAARYMRSLKVPATVSVSSPDAVTAYNGYLTSSSKTPEEHFIETISLAGSYKDWSYSGQSTQLGIEFLKRGDKSVYYTSNPTTFHLDGEVITFDNLKTLLSLREVRTIKVFTTVDNINLHTQVVDMSMTYGQQFGPTYLDGADVTKIKPHNSHEGKTFYVLPNDDTLRVEAFEYYHTTDPSFLGRYMSALNHTKKWKYPQVNGLTSIKWADNNCYLATALLTLQQIELKFNPPALQDAYYRARAGEAANFCALILAYCNKTVGELGDVRETMSYLFQHANLDSCKRVLNVVCKTCGQQQTTLKGVEAVMYMGTLSYEQFKKGVQIPCTCGKQATKYLVQQESPFVMMSAPPAQYELKHGTFTCASEYTGNYQCGHYKHITSKETLYCIDGVLLTKSSEYKGPITDVFYKENSYTTTIKPVTYKLDGVVCTEIDPKLDNYYKKDNSYFTEQPIDLVPNQPYPNASFDNFKFVCDNIKFADDLNQLTGYKKPASRELKVTFFPDLNGDVVAIDYKHYTPSFKKGAKLLHKPIVWHVNNATNKATYKPNTWCIRCLWSTKPVETSNSFDVLKSEDAQGMDNLACEDLKPVSEEVVENPTIQKDVLECNVKTTEVVGDIILKPANNSLKITEEVGHTDLMAAYVDNSSLTIKKPNELSRVLGLKTLATHGLAAVNSVPWDTIANYAKPFLNKVVSTTTNIVTRCLNRVCTNYMPYFFTLLLQLCTFTRSTNSRIKASMPTTIAKNTVKSVGKFCLEASFNYLKSPNFSKLINIIIWFLLLSVCLGSLIYSTAALGVLMSNLGMPSYCTGYREGYLNSTNVTIATYCTGSIPCSVCLSGLDSLDTYPSLETIQITISSFKWDLTAFGLVAEWFLAYILFTRFFYVLGLAAIMQLFFSYFAVHFISNSWLMWLIINLVQMAPISAMVRMYIFFASFYYVWKSYVHVVDGCNSSTCMMCYKRNRATRVECTTIVNGVRRSFYVYANGGKGFCKLHNWNCVNCDTFCAGSTFISDEVARDLSLQFKRPINPTDQSSYIVDSVTVKNGSIHLYFDKAGQKTYERHSLSHFVNLDNLRANNTKGSLPINVIVFDGKSKCEESSAKSASVYYSQLMCQPILLLDQALVSDVGDSAEVAVKMFDAYVNTFSSTFNVPMEKLKTLVATAEAELAKNVSLDNVLSTFISAARQGFVDSDVETKDVVECLKLSHQSDIEVTGDSCNNYMLTYNKVENMTPRDLGACIDCSARHINAQVAKSHNIALIWNVKDFMSLSEQLRKQIRSAAKKNNLPFKLTCATTRQVVNVVTTKIALKGG

SEQ ID NO: 15944 - protein, 1946 aa, Artificial Sequence
  SARS-CoV-2__MT821555.1__non-structural protein 3 (NSP3)
MAPTKVTFGDDTVIEVQGYKSVNITFELDERIDKVLNEKCSAYTVELGTEVNEFACVVADAVIKTLQPVSELLTPLGIDLDEWSMATYYLFDESGEFKLASHMYCSFYPPDEDEEEGDCEEEEFEPSTQYEYGTEDDYQGKPLEFGATSAALQPEEEQEEDWLDDDSQQTVGQQDGSEDNQTTTIQTIVEVQPQLEMELTPVVQTIEVNSFSGYLKLTDNVYIKNADIVEEAKKVKPTVVVNAANVYLKHGGGVAGALNKATNNAMQVESDDYIATNGPLKVGGSCVLSGHNLAKHCLHVVGPNVNKGEDIQLLKSAYENFNQHEVLLAPLLSAGIFGADPIHSLRVCVDTVRTNVYLAVFDKNLYDKLVSSFLEMKSEKQVEQKIAEIPKEEVKPFITESKPSVEQRKQDDKKIKACVEEVTTTLEETKFLTENLLLYIDINGNLHPDSATLVSDIDITFLKKDAPYIVGDVVQEGVLTAVVIPTKKAGGTTEMLAKALRKVPTDNYITTYPGQGLNGYTVEEAKTVLKKCKSAFYILPSIISNEKQEILGTVSWNLREMLAHAEETRKLMPVCVETKVIVSTIQRKYKGIKIQEGVVDYGARFYFYTSKTTVASLINTLNDLNETLVTMPLGYVTHGLNLEEAARYMRSLKVPATVSVSSPDAVTAYNGYLTSSSKTPEEHFIETISLAGSYKDWSYSGQSTQLGIEFLKRGDKSVYYTSNPTTFHLDGEVITFDNLKTLLSLREVRTIKVFTTVDNINLHTQVVDMSMTYGQQFGPTYLDGADVTKIKPHNSHEGKTFYVLPNDDTLRVEAFEYYHTTDPSFLGRYMSALNHTKKWKYPQVNGLTSIKWADNNCYLATALLTLQQIELKFNPPALQDAYYRARAGEAANFCALILAYCNKTVGELGDVRETMSYLFQHANLDSCKRVLNVVCKTCGQQQTTLKGVEAVMYMGTLSYEQFKKGVQIPCTCGKQATKYLVQQESPFVMMSAPPAQYELKHGTFTCASEYTGNYQCGHYKHITSKETLYCIDGALLTKSSEYKGPITDVFYKENSYTTTIKPVTYKLDGVVCTEIDPKLDNYYKKDNSYFTEQPIDLVPNQPYPNASFDNFKFVCDNIKFADDLNQLTGYKKPASRELKVTFFPDLNGDVVAIDYKHYTPSFKKGAKLLHKPIVWHVNNATNKATYKPNTWCIRCLWSTKPVETSNSFDVLKSEDAQGMDNLACEDLKPVSEEVVENPTIQKDVLECNVKTTEVVGDIILKPANNSLKITEEVGHTDLMAAYVDNSSLTIKKPNELSRVLGLKTLATHGLAAVNSVPWDTIANYAKPFLNKVVSTTTNIVTRCLNRVCTNYMPYFFTLLLQLCTFTRSTNSRIKASMPTTIAKNTVKSVGKFCLEASFNYLKSPNFSKLINIIIWFLLLSVCLGSLIYSTAALGVLMSNLGMPSYCTGYREGYLNSTNVTIATYCTGSIPCSVCLSGLDSLDTYPSLETIQITISSFKWDLTAFGLVAEWFLAYILFTRFFYVLGLAAIMQLFFSYFAVHFISNSWLMWLIINLVQMAPISAMVRMYIFFASFYYVWKSYVHVVDGCNSSTCMMCYKRNRATRVECTTIVNGVRRSFYVYANGGKGFCKLHNWNCVNCDTFCAGSTFISDEVARDLSLQFKRPINPTDQSSYIVDSVTVKNGSIHLYFDKAGQKTYERHSLSHFVNLDNLRANNTKGSLPINVIVFDGKSKCEESSAKSASVYYSQLMCQPILLLDQALVSDVGDSAEVAVKMFDAYVNTFSSTFNVPMEKLKTLVATAEAELAKNVSLDNVLSTFISAARQGFVDSDVETKDVVECLKLSHQSDIEVTGDSCNNYMLTYNKVENMTPRDLGACIDCSARHINAQVAKSHNIALIWNVKDFMSLSEQLRKQIRSAAKKNNLPFKLTCATTRQVVNVVTTKIALKGG

SEQ ID NO: 15945 - protein, 1946 aa, Artificial Sequence
  SARS-CoV-2__MT821568.1__non-structural protein 3 (NSP3)
MAPTKVTFGDDTVIEVQGYKSVNITFELDERIDKVLNEKCSAYTVELGTEVNEFACVVADAVIKTLQPVSELLTPLGIDLDEWSMATYYLFDESGEFKLASHMYCSFYPPDEDEEEGDCEEEEFEPSTQYEYGTEDDYQGKPLEFGATSAALQPEEEQEEDWLDDDSQQTVGQQDGSEDNQTTTIQTIVEVQPQLEMELTPVVQTIEVNSFSGYLKLTDNVYIKNADIVEEAKKVKPTVVVNAANVYLKHGGGVAGALNKATNNAMQVESDDYIATNGPLKVGGSCVLSGHNLAKHCLHVVGPNVNKGEDIQLLKSAYENFNQHEVLLAPLLSAGIFGADPIHSLRVCVDTVRTNVYLAVFDKNLYDKLVSSFLEMKSEKQVEQKIAEIPKEEVKPFITESKPSVEQRKQDDKKIKACVEEVTTTLEETKFLTENLLLYIDINGNLHPDSATLVSDIDITFLKKDAPYIVGDVVQEGVLTAVVIPTKKAGGTTEMLAKALRKVPTDNYITTYPGQGLNGYTVEEAKTVLKKCKSAFYILPSIISNEKQEILGTVSWNLREMLAHAEETRKLMPVCVETKAIVSTIQRKYKGIKIQEGVVDYGARFYFYTSKTTVASLINTLNDLNETLVTMPLGYVTHGLNLEEAARYMRSLKVPATVSVSSPDAVTAYNGYLTSSSKTPEEHFIETISLAGSYKDWSYSGQSTQLGIEFLKRGDKSVYYTSNPTTFHLDGEVITFDNLKTLLSLREVRTIKVFTTVDNINLHTQVVDMSMTYGQQFGPTYLDGADVTKIKPHNSHEGKTFYVLPNDDTLRVEAFEYYHTTDPSFLGRYMSALNHTKKWKYPQVNGLTSIKWADNNCYLATALLTLQQIELKFNPPALQDAYYRARAGEAANFCALILAYCNKTVGELGDVRETMSYLFQHANLDSCKRVLNVVCKTCGQQQTTLKGVEAVMYMGTLSYEQFKKGVQIPCTCGKQATKYLVQQESPFVMMSAPPAQYELKHGTFTCASEYTGNYQCGHYKHITSKETLYCIDGALLTKSSEYKGPITDVFYKENSYTTTIKPVTYKLDGVVCTEIDPKLDNYYKKDNSYFTEQPIDLVPNQPHPNASFDNFKFVCDNIKFADDLNQLTGYKKPASRELKVTFFPDLNGDVVAIDYKHYTPSFKKGAKLLHKPIVWHVNNATNKATYKPNTWCIRCLWSTKPVETSNSFDVLKSEDAQGMDNLACEDLKPVSEEVVENPTIQKDVLECNVKTTEVVGDIILKPANNSLKITEEVGHTDLMAAYVDNSSLTIKKPNELSRVLGLKTLATHGLAAVNSVPWDTIANYAKPFLNKVVSTTTNIVTRCLNRVCTNYMPYFFTLLLQLCTFTRSTNSRIKASMPTTIAKNTVKSVGKFCLEASFNYLKSPNFSKLINIIIWFLLLSVCLGSLIYSTAALGVLMSNLGMPSYCTGYREGYLNSTNVTIATYCTGSIPCSVCLSGLDSLDTYPSLETIQITISSFKWDLTAFGLVAEWFLAYILFTRFFYVLGLAAIMQLFFSYFAVHFISNSWLMWLIINLVQMAPISAMVRMYIFFASFYYVWKSYVHVVDGCNSSTCMMCYKRNRATRVECTTIVNGVRRSFYVYANGGKGFCKLHNWNCVNCDTFCAGSTFISDEVARDLSLQFKRPINPTDQSSYIVDSVTVKNGSIHLYFDKAGQKTYERHSLSHFVNLDNLRANNTKGSLPINVIVFDGKSKCEESSAKSASVYYSQLMCQPILLLDQALVSDVGDSAEVAVKMFDAYVNTFSSTFNVPMEKLKTLVATAEAELAKNVSLDNVLSTFISAARQGFVDSDVETKDVVECLKLSHQSDIEVTGDSCNNYMLTYNKVENMTPRDLGACIDCSARHINAQVAKSHNIALIWNVKDFMSLSEQLRKQIRSAAKKNNLPFKLTCATTRQVVNVVTTKIALKGG

SEQ ID NO: 15946 - protein, 1946 aa, Artificial Sequence
  SARS-CoV-2__MT821572.1__non-structural protein 3 (NSP3)
MAPTKVTFGDDTVIEVQGYKSVNITFELDERIDKVLNEKCSAYTVELGTEVNEFACVVADAVIKTLQPVSELLTPLGIDLDEWSMATYYLFDESGEFKLASHMYCSFYPPDEDEEEGDCEEEEFEPSTQYEYGTEDDYQGKPLEFGATSAALQPEEEQEEDWLDDDSQQTVGQQDGSEDNQTTTIQTIVEVQPQLEMELTPVVQTIEVNSFSGYLKLTDNVYIKNADIVEEAKKVKPTVVVNAANVYLKHGGGVAGALNKATNNAMQVESDDYIATNGPLKVGGSCVLSGHNLAKHCLHVVGPNVNKGEDIQLLKSAYENFNQHEVLLAPLLSAGIFGADPIHSLRVCVDTVRTNVYLAVFDKNLYDKLVSSFLEMKSEKQVEQKIAEIPKEEVKPFITESKPSVEQRKQDDKKIKACVEEVTTTLEETKFLTENLLLYIDINGNLHPDSATLVSDIDITFLKKDAPYIVGDVVQEGVLTAVVIPTKKAGGTTEMLAKALRKVPTDNYITTYPGQGLNGYTVEEAKTVLKKCKSAFYILPSIISNEKQEILGTVSWNLREILAHAEETRKLMPVCVETKAIVSTIQRKYKGIKIQEGVVDYGARFYFYTSKTTVASLINTLNDLNETLVTMPLGYVTHGLNLEEAARYMRSLKVPATVSVSSPDAVTAYNGYLTSSSKTPEEHFIETISLAGSYKDWSYSGQSTQLGIEFLKRGDKSVYYTSNPTTFHLDGEVITFDNLKTLLSLREVRTIKVFTTVDNINLHTQVVDMSMTYGQQFGPTYLDGADVTKIKPHNSHEGKTFYVLPNDDTLRVEAFEYYHTTDPSFLGRYMSALNHTKKWKYPQVNGLTSIKWADNNCYLATALLTLQQIELKFNPPALQDAYYRARAGEAANFCALILAYCNKTVGELGDVRETMSYLFQHANLDSCKRVLNVVCKTCGQQQTTLKGVEAVMYMGTLSYEQFKKGVQIPCTCGKQATKYLVQQESPFVMMSAPPAQYELKHGTFTCASEYTGNYQCGHYKHITSKETLYCIDGALLTKSSEYKGPITDVFYKENSYTTTIKPVTYKLDGVVCTEIDPKLDNYYKKDNSYFTEQPIDLVPNQPYPNASFDNFKFVCDNIKFADDLNQLTGYKKPASRELKVTFFPDLNGDVVAIDYKHYTPSFKKGAKLLHKPIVWHVNNATNKATYKPNTWCIRCLWSTKPVETSNSFDVLKSEDAQGMDNLACEDLKPVSEEVVENPTIQKDVLECNVKTTEVVGDIILKPANNSLKITEEVGHTDLMAAYVDNSSLTIKKPNELSRVLGLKTLATHGLAAVNSVPWDTIANYAKPFLNKVVSTTTNIVTRCLNRVCTNYMPYFFTLLLQLCTFTRSTNSRIKASMPTTIAKNTVKSVGKFCLEASFNYLKSPNFSKLINIIIWFLLLSVCLGSLIYSTAALGVLMSNLGMPSYCTGYREGYLNSTNVTIATYCTGSIPCSVCLSGLDSLDTYPSLETIQITISSFKWDLTAFGLVAEWFLAYILFTRFFYVLGLAAIMQLFFSYFAVHFISNSWLMWLIINLVQMAPISAMVRMYIFFASFYYVWKSYVHVVDGCNSSTCMMCYKRNRATRVECTTIVNGVRRSFYVYANGGKGFCKLHNWNCVNCDTFCAGSTFISDEVARDLSLQFKRPINPTDQSSYIVDSVTVKNGSIHLYFDKAGQKTYERHSLSHFVNLDNLRANNTKGSLPINVIVFDGKSKCEESSAKSASVYYSQLMCQPILLLDQALVSDVGDSAEVAVKMFDAYVNTFSSTFNVPMEKLKTLVATAEAELAKNVSLDNVLSTFISAARQGFVDSDVETKDVVECLKLSHQSDIEVTGDSCNNYMLTYNKVENMTPRDLGACIDCSARHINAQVAKSHNIALIWNVKDFMSLSEQLRKQIRSAAKKNNLPFKLTCATTRQVVNVVTTKIALKGG

SEQ ID NO: 15947 - protein, 1946 aa, Artificial Sequence
  SARS-CoV-2__MT821610.1__non-structural protein 3 (NSP3)
MAPTKVTFGDDTVIEVQGYKSVNITFELDERIDKVLNEKCSAYTVELGTEVNEFACVVADAVIKTLQPVSELLTPLGIDLDEWSMATYYLFDESGEFKLASHMYCSFYPPDEDEEEGDCEEEEFEPSTQYEYGTEDDYQGKPLEFGATSAALQPEEEQEEDWLDDDSQQTVGQQDGSEDNQTTTIQTIVEVQPQLEMELTPVVHTIEVNSFSGYLKLTDNVYIKNADIVEEAKKVKPTVVVNAANVYLKHGGGVAGALNKATNNAMQVESDDYIATNGPLKVGGSCVLSGHNLAKHCLHVVGPNVNKGEDIQLLKSAYENFNQHEVLLAPLLSAGIFGADPIHSLRVCVDTVRTNVYLAVFDKNLYDKLVSSFLEMKSEKQVEQKIAEIPKEEVKPFITESKPSVEQRKQDDKKIKACVEEVTTTLEETKFLTENLLLYIDINGNLHPDSATLVSDIDITFLKKDAPYIVGDVVQEGVLTAVVIPTKKAGGTTEMLAKALRKVPTDNYITTYPGQGLNGYTVEEAKTVLKKCKSAFYILPSIISNEKQEILGTVSWNLREMLAHAEETRKLMPVCVETKAIVSTIQRKYKGIKIQEGVVDYGARFYFYTSKTTVASLINTLNDLNETLVTMPLGYVTHGLNLEEAARYMRSLKVPATVSVSSPDAVTAYNGYLTSSSKTPEEHFIETISLAGSYKDWSYSGQSTQLGIEFLKRGDKSVYYTSNPTTFHLDGEVITFDNLKTLLSLREVRTIKVFTTVDNINLHTQVVDMSMTYGQQFGPTYLDGADVTKIKPHNSHEGKTFYVLPNDDTLRVEAFEYYHTTDPSFLGRYMSALNHTKKWKYPQVNGLTSIKWADNNCYLATALLTLQQIELKFNPPALQDAYYRARAGEAANFCALILAYCNKTVGELGDVRETMSYLFQHANLDSCKRVLNVVCKTCGQQQTTLKGVEAVMYMGTLSYEQFKKGVQIPCTCGKQATKYLVQQESPFVMMSAPPAQYELKHGTFTCASEYTGNYQCGHYKHITSKETLYCIDGALLTKSSEYKGPITDVFYKENSYTTTIKPVTYKLDGVVCTEIDPKLDNYYKKDNSYFTEQPIDLVPNQPYPNASFDNFKFVCDNIKFADDLNQLTGYKKPASRELKVTFFPDLNGDVVAIDYKHYTPSFKKGAKLLHKPIVWHVNNATNKATYKPNTWCIRCLWSTKPVETSNSFDVLKSEDAQGMDNLACEDLKPVSEEVVENPTIQKDVLECNVKTTEVVGDIILKPANNSLKITEEVGHTDLMAAYVDNSSLTIKKPNELSRVLGLKTLATHGLAAVNSVPWDTIANYAKPFLNKVVSTTTNIVTRCLNRVCTNYMPYFFTLLLQLCTFTRSTNSRIKASMPTTIAKNTVKSVGKFCLEASFNYLKSPNFSKLINIIIWFLLLSVCLGSLIYSTAALGVLMSNLGMPSYCTGYREGYLNSTNVTIATYCTGSIPCSVCLSGLDSLDTYPSLETIQITISSFKWDLTAFGLVAEWFLAYILFTRFFYVLGLAAIMQLFFSYFAVHFISNSWLMWLIINLVQMAPISAMVRMYIFFASFYYVWKSYVHVVDGCNSSTCMMCYKRNRATRVECTTIVNGVRRSFYVYANGGKGFCKLHNWNCVNCDTFCAGSTFISDEVARDLSLQFKRPINPTDQSSYIVDSVTVKNGSIHLYFDKAGQKTYERHSLSHFVNLDNLRANNTKGSLPINVIVFDGKSKCEESSAKSASVYYSQLMCQPILLLDQALVSDVGDSAEVAVKMFDAYVNTFSSTFNVPMEKLKTLVATAEAELAKNVSLDNVLSTFISAARQGFVDSDVETKDVVECLKLSHQSDIEVTGDSCNNYMLTYNKVENMTPRDLGACIDCSARHINAQVAKSHNIALIWNVKDFMSLSEQLRKQIRSAAKKNNLPFKLTCATTRQVVNVVTTKIALKGG

SEQ ID NO: 15948 - protein, 1946 aa, Artificial Sequence
  SARS-CoV-2__MT821676.1__non-structural protein 3 (NSP3)
MAPTKVTFGDDTVIEVQGYKSVNITFELDERIDKVLNEKCSAYTVELGTEVNEFACVVADAVIKTLQPVSELLTPLGIDLDEWSMATYYLFDESGEFKLASHMYCSFYPPDEDEEEGDCEEEEFEPSTQYEYGTEDDYQGKPLEFGATSAALQPEEEQEEDWLDDDSQQTVGQQDGSEDNQTTTIQTIVEVQPQLEMELTPVVQTIEVNSFSGYLKLTDNVYIKNADIVEEAKKVKPTVVVNAANVYLKHGGGVAGALNKATNNAMQVESDDYIATNGPLKVGGSCVLSGHNLAKHCLHVVGPNVNKGEDIQLLKSAYENFNQHEVLLAPLLSAGIFGADPIHSLRVCVDTVRTNVYLAVFDKNLYDKLVSSFLEMKSEKQVEQKIAEIPKEEVKPFITESKPSVEQRKQDDKKIKACVEEVTTTLEETKFLTENLLLYIDINGNLHPDSATLVSDIDITFLKKDAPYIVGDVVQEGVLTAVVIPTKKAGGTTEMLAKALRKVPTDNYITTYPGQGLNGYTVEEAKTVLKKCKSAFYILPSIISNEKQEILGTVSWNLREMLAHAEETRKLMPVCVETKAIVSTIQRKYKGIKIQEGVVDYGARFYFYTSKTTVASLINTLNDLNETLVTMPLGYVTHGLNLEEAARYMRSLKVPATVSVSSPDAVTAYNGYLTSSSKTPEEHFIETISLAGSYKDWSYSGQSTQLGIEFLKRGDKSVYYTSNPTTFHLDGEVITFDNLKTLLSLREVRTIKVFTTVDNINLHTQVVDMSMTYGQQFGPTYLDGADVTKIKPHNSHEGKTFYVLPNDDTLRVEAFEYYHTTDPSFLGRYMSALNHTKKWKYPQVNGLTSIKWADNNCYLATALLTLQQIELKFNPPALQDAYYRARAGEAANFCALILAYCNKTVGELGDVRETMSYLFQHANLDSCKRVLNVVCKTCGQQQTTLKGVEAVMYMGTLSYEQFKKGVQIPCTCGKQATKYLVQQESPFVMMSAPPAQYELKHGTFTCASEYTGNYQCGHYKHITSKETLYCIDGALLTKSSEYKGPITDVFYKENSYTTTIKPVTYKLDGVVCTEIDPKLDNYYKKDNSYFTEQPIDLVPNQPYPNASFDNFKFVCDNIKFADDLNQLTGYKKPASRKLKVTFFPDLNGDVVAIDYKHYTPSFKKGAKLLHKPIVWHVNNATNKATYKPNTWCIRCLWSTKPVETSNSFDVLKSEDAQGMDNLACEDLKPVSEEVVENPTIQKDVLECNVKTTEVVGDIILKPANNSLKITEEVGHTDLMAAYVDNSSLTIKKPNELSRVLGLKTLATHGLAAVNSVPWDTIANYAKPFLNKVVSTTTNIVTRCLNRVCTNYMPYFFTLLLQLCTFTRSTNSRIKASMPTTIAKNTVKSVGKFCLEASFNYLKSPNFSKLINIIIWFLLLSVCLGSLIYSTAALGVLMSNLGMPSYCTGYREGYLNSTNVTIATYCTGSIPCSVCLSGLDSLDTYPSLETIQITISSFKWDLTAFGLVAEWFLAYILFTRFFYVLGLAAIMQLFFSYFAVHFISNSWLMWLIINLVQMAPISAMVRMYIFFASFYYVWKSYVHVVDGCNSSTCMMCYKRNRATRVECTTIVNGVRRSFYVYANGGKGFCKLHNWNCVNCDTFCAGSTFISDEVARDLSLQFKRPINPTDQSSYIVDSVTVKNGSIHLYFDKAGQKTYERHSLSHFVNLDNLRANNTKGSLPINVIVFDGKSKCEESSAKSASVYYSQLMCQPILLLDQALVSDVGDSAEVAVKMFDAYVNTFSSTFNVPMEKLKTLVATAEAELAKNVSLDNVLSTFISAARQGFVDSDVETKDVVECLKLSHQSDIEVTGDSCNNYMLTYNKVENMTPRDLGACIDCSARHINAQVAKSHNIALIWNVKDFMSLSEQLRKQIRSAAKKNNLPFKLTCATTRQVVNVVTTKIALKGG

SEQ ID NO: 15949 - protein, 1946 aa, Artificial Sequence
  SARS-CoV-2__MT821773.1__non-structural protein 3 (NSP3)
MAPTKVTFGDDTVIEVQGYKSVNITFELDERIDKVLNEKCSAYTVELGTEVNEFACVVADAVIKTLQPVSELLTPLGIDLDEWSMATYYLFDESGEFKLASHMYCSFYPPDEDEEEGDCEEEEFEPSTQYEYGTEDDYQGKPLEFGATSAALQPEEEQEEDWLDDDSQQTVGQQDGSEDNQTTTIQTIVEVQPQLEMELTPVVQTIEVNSFSGYLKLTDNVYIKNADIVEEAKKVKPTVVVNAANVYLKHGGGVAGALNKATNNAMQVESDDYIATNGPLKVGGSCVLSGHNLAKHCLHVVGPNVNKGEDIQLLKSAYENFNQHEVLLAPLLSAGIFGADPIHSLRVCVDTVRTNVYLAVFDKNLYDKLVSSFLEMKSEKQVEQKIAEIPKEEVKPFITESKPSVEQRKQDDKKIKACVEEVTTTLEETKFLTENLLLYIDINGNLHPDSATLVSDIDITFLKKDAPYIVGDVVQEGVLTAVVIPTKKAGGTTEMLAKALRKVPTDNYITTYPGQGLNGYTVEEAKTVLKKCKSAFYILPSIISNEKQEILGTVSWNLREMLAHAEETRKLMPVCVETKAIVSTIQRKYKGIKIQEGVVDYGARFYFYTSKTTVASLINTLNDLNETLVTMPLGYVTHGLNLEEAARYMRSLKVPATVSVSSPDAVTAYNGYLTSSSKTPEEHFIETISLAGSYKDWSYSGQSTQLGIEFLKRGDKSVYYTSNPTTFHLDGEVITFDNLKTLLSLREVRTIKVFTTVDNINLHTQVVDMSMTYGQQFGPTYLDGADVTKIKPHNSHEGKTFYVLPNDDTLRVEAFEYYHTTDPSFLGRYMSALNHTKKWKYPQVNGLTSIKWADNNCYLATALLTLQQIELKFNPPALQDAYYRARAGEAANFCALILAYCNKTVGELGDVRETMSYLFQHANLDSCKRVLNVVCKTCGQQQTTLKGVEAVMYMGTLSYEQFKKGVQIPCTCGKQATKYLVQQESPFVMMSAPPAQYELKHGTFTCASEYTGNYQCGHYKHIISKETLYCIDGALLTKSSEYKGPITDVFYKENSYTTTIKPVTYKLDGVVCTEIDPKLDNYYKKDNSYFTEQPIDLVPNQPYPNASFDNFKFVCDNIKFADDLNQLTGYKKPASRELKVTFFPDLNGDVVAIDYKHYTPSFKKGAKLLHKPIVWHVNNATNKATYKPNTWCIRCLWSTKPVETSNSFDVLKSEDAQGMDNLACEDLKPVSEEVVENPTIQKDVLECNVKTTEVVGDIILKPANNSLKITEEVGHTDLMAAYVDNSSLTIKKPNELSRVLGLKTLATHGLAAVNSVPWDTIANYAKPFLNKVVSTTTNIVTRCLNRVCTNYMPYFFTLLLQLCTFTRSTNSRIKASMPTTIAKNTVKSVGKFCLEASFNYLKSPNFSKLINIIIWFLLLSVCLGSLIYSTAALGVLMSNLGMPSYCTGYREGYLNSTNVTIATYCTGSIPCSVCLSGLDSLDTYPSLETIQITISSFKWDLTAFGLVAEWFLAYILFTRFFYVLGLAAIMQLFFSYFAVHFISNSWLMWLIINLVQMAPISAMVRMYIFFASFYYVWKSYVHVVDGCNSSTCMMCYKRNRATRVECTTIVNGVRRSFYVYANGGKGFCKLHNWNCVNCDTFCAGSTFISDEVARDLSLQFKRPINPTDQSSYIVDSVTVKNGSIHLYFDKAGQKTYERHSLSHFVNLDNLRANNTKGSLPINVIVFDGKSKCEESSAKSASVYYSQLMCQPILLLDQALVSDVGDSAEVAVKMFDAYVNTFSSTFNVPMEKLKTLVATAEAELAKNVSLDNVLSTFISAARQGFVDSDVETKDVVECLKLSHQSDIEVTGDSCNNYMLTYNKVENMTPRDLGACIDCSARHINAQVAKSHNIALIWNVKDFMSLSEQLRKQIRSAAKKNNLPFKLTCATTRQVVNVVTTKIALKGG

SEQ ID NO: 15950 - protein, 1946 aa, Artificial Sequence
  SARS-CoV-2__MT821778.1__non-structural protein 3 (NSP3)
MAPTKVTFGDDTVIEVQGYKSVNITFELDERIDKVLNEKCSAYTVELGTEVNEFACVVADAVIKTLQPVSELLTPLGIDLDEWSMATYYLFDESGEFKLASHMYCSFYPPDEDEEEGDCEEEEFEPSTQYEYGTEDDYQGKPLEFGATSAALQPEEEQEEDWLDDDSQQTVGQQDGSEDNQTTTIQTIVEVQPQLEMELTPVVQTIEVNSFSGYLKLTDNVYIKNADIVEEAKKVKPTVVVNAANVYLKHGGGVAGALNKATNNAMQVESDDYIATNGPLKVGGSCVLSGHNLAKHCLHVVGPNVNKGEDIQLLKSAYENFNQHEVLLAPLLSAGIFGADPIHSLRVCVDTVRTNVYLAVFDKNLYDKLVSSFLEMKSEKQVEQKIAEIPKEEVKPFITESKPSVEQRKQDDKKIKACVEEVTTTLEETKFLTENLLLYIDINGNLHPDSATLVSDIDITFLKKDAPYIVGDVVQEGVLTAVVIPTKKAGGTTEMLAKALRKVPTDNYITTYPGQGLNGYTVEEAKTVLKKCKSAFYILPSIISNEKQEILGTVSWNLREMLAHAEETRKLMPVCVETKAIVSTIQRKYKGIKIQEGVVDYGARFYFYTSKTTVASLINTLNDLNETLVTMPLGYVTHGLNLEEAARYMRSLKVPATVSVSSPDAVTAYNGYLTSSSKTPEEHFIETISLAGSYKDWSYSGQSTQLGIEFLKRGDKSVYYTSNPTTFHLDGEVITFDNLKTLLSLREVRTIKVFTTVDNINLHTQVVDMSMTYGQQFGPTYLDGADVTKIKPHNSHEGKTFYVLPNDDTLRVEAFEYYHTTDPSFLGRYMSALNHTKKWKYPQVNGLTSIKWADNNCYLATALLTLQQIELKFNPPALQDAYYRARAGEAANFCALILAYCNKTVGELGDVRETMSYLFQHANLDSCKRVLNVVCKTCGQQQTTLKGVEAVMYMGTLSYEQFKKGVQIPCTCGKQATKYLVQQESPFVMMSAPPAQYELKHGTFTCASEYTGNYQCGHYKHITSKETLYCIDGALLTKSSEYKGPITDVFYKENSYTTTIKPVTYKLDGVVCTEIDPKLDNYYKKDNSYFTEQPIDLVPNQPYPNASFDNFKFVCDNIKFADDLNQLTGYKKPASRELKVTFFPDLNGDVVAIDYKHYTPSFKKGAKLLHKPIVWHVNNATNKATYKPNTWCIRCLWSTKPVETPNSFDVLKSEDAQGMDNLACEDLKPVSEEVVENPTIQKDVLECNVKTTEVVGDIILKPANNSLKITEEVGHTDLMAAYVDNSSLTIKKPNELSRVLGLKTLATHGLAAVNSVPWDTIANYAKPFLNKVVSTTTNIVTRCLNRVCTNYMPYFFTLLLQLCTFTRSTNSRIKASMPTTIAKNTVKSVGKFCLEASFNYLKSPNFSKLINIIIWFLLLSVCLGSLIYSTAALGVLMSNLGMPSYCTGYREGYLNSTNVTIATYCTGSIPCSVCLSGLDSLDTYPSLETIQITISSFKWDLTAFGLVAEWFLAYILFTRFFYVLGLAAIMQLFFSYFAVHFISNSWLMWLIINLVQMAPISAMVRMYIFFASFYYVWKSYVHVVDGCNSSTCMMCYKRNRATRVECTTIVNGVRRSFYVYANGGKGFCKLHNWNCVNCDTFCAGSTFISDEVARDLSLQFKRPINPTDQSSYIVDSVTVKNGSIHLYFDKAGQKTYERHSLSHFVNLDNLRANNTKGSLPINVIVFDGKSKCEESSAKSASVYYSQLMCQPILLLDQALVSDVGDSAEVAVKMFDAYVNTFSSTFNVPMEKLKTLVATAEAELAKNVSLDNVLSTFISAARQGFVDSDVETKDVVECLKLSHQSDIEVTGDSCNNYMLTYNKVENMIPRDLGACIDCSARHINAQVAKSHNIALIWNVKDFMSLSEQLRKQIRSAAKKNNLPFKLTCATTRQVVNVVTTKIALKGG

SEQ ID NO: 15951 - protein, 1946 aa, Artificial Sequence
  SARS-CoV-2__MT821787.1__non-structural protein 3 (NSP3)
MAPTKVTFGDDTVIEVQGYKSVNITFELDERIDKVLNEKCSAYTVELGTEVNEFACVVADAVIKTLQPVSELLTPLGIDLDEWSMATYYLFDESGEFKLASHMYCSFYPPDEDEEEGDCEEEEFEPSTQYEYGTEDDYQGKPLEFGATSAALQPEEEQEEDWLDDDSQQTVGQQDGSEDNQTTTIQTIVEVQPQLEMELTPVVQTIEVNSFSGYLKLTDNVYIKNADIVEEAKKVKPTVVVNAANVYLKHGGGVAGALNKATNNAMQVESDDYIATNGPLKVGGSCVLSGHNLAKHCLHVVGPNVNKGEDIQLLKSAYENFNQHEVLLAPLLSAGIFGADPIHSLRVCVDTVRTNVYLAVFDKNLYDKLVSSFLEMKSEKQVEQKIAEIPKEEVKPFITESKPSVEQRKQDDKKIKACVEEVTTTLEETKFLTENLLLYIDINGNLHPDSATLVSDIDITFLKKDAPYIVGDVVQEGVLTAVVIPTKKAGGTTEMLAKALRKVPTDNYITTYPGQGLNGYTVEEAKTVLKKCKSAFYILPSIISNEKQEILGTVSWNLREMLAHAEETRKLMPVCVETKAIVSTIQRKYKGIKIQEGVVDYGARFYFYTSKTTVASLINTLNDLNETLVTMPLGYVTHGLNLEEAARYMRSLKVPATVSVSSPDAVTAYNGYLTSSSKTPEEHFIETISLAGSYKDWSYSGQSTQLGIEFLKRGDKSVYYTSNPTTFHLDGEVITFDNLKTLLSLREVRTIKVFTTVDNINLHTQVVDMSMTYGQQFGPTYLDGADVTKIKPHNSHEGKTFYVLPNDDTLRVEAFEYYHTTDPSFLGRYMSALNHTKKWKYPQVNGLTSIKWADNNCYLATALLTLQQIELKFNPPALQDAYYRARAGEAANFCALILAYCNKTVGELGDVRETMSYLFQHANLDSCKRVLNVVCKTCGQQQTTLKGVEAVMYMGTLSYEQFKKGVQIPCTCGKQATKYLVQQESPFVMMSAPPAQYELKHGTFTCASEYTGNYQCGHYKHITSKETLYCIDGALLTKSSEYKGPITDVFYKENSYTTTIKPVTYKLDGVVCTEIDPKLDNYYKKDNSYFTEQPIDLVPNQPYPNANFDNFKFVCDNIKFADDLNQLTGYKKPASRELKVTFFPDLNGDVVAIDYKHYTPSFKKGAKLLHKPIVWHVNNATNKATYKPNTWCIRCLWSTKPVETSNSFDVLKSEDAQGMDNLACEDLKPVSEEVVENPTIQKDVLECNVKTTEVVGDIILKPANNSLKITEEVGHTDLMAAYVDNSSLTIKKPNELSRVLGLKTLATHGLAAVNSVPWDTIANYAKPFLNKVVSTTTNIVTRCLNRVCTNYMPYFFTLLLQLCTFTRSTNSRIKASMPTTIAKNTVKSVGKFCLEASFNYLKSPNFSKLINIIIWFLLLSVCLGSLIYSTAALGVLMSNLGMPSYCTGYREGYLNSTNVTIATYCTGSIPCSVCLSGLDSLDTYPSLETIQITISSFKWDLTAFGLVAEWFLAYILFTRFFYVLGLAAIMQLFFSYFAVHFISNSWLMWLIINLVQMAPISAMVRMYIFFASFYYVWKSYVHVVDGCNSSTCMMCYKRNRATRVECTTIVNGVRRSFYVYANGGKGFCKLHNWNCVNCDTFCAGSTFISDEVARDLSLQFKRPINPTDQSSYIVDSVTVKNGSIHLYFDKAGQKTYERHSLSHFVNLDNLRANNTKGSLPINVIVFDGKSKCEESSAKSASVYYSQLMCQPILLLDQALVSDVGDSAEVAVKMFDAYVNTFSSTFNVPMEKLKTLVATAEAELAKNVSLDNVLSTFISAARQGFVDSDVETKDVVECLKLSHQSDIEVTGDSCNNYMLTYNKVENMTPRDLGACIDCSARHINAQVAKSHNIALIWNVKDFMSLSEQLRKQIRSAAKKNNLPFKLTCATTRQVVNVVTTKIALKGG

SEQ ID NO: 15952 - protein, 1946 aa, Artificial Sequence
  SARS-CoV-2__MT810483.1__non-structural protein 3 (NSP3)
MAPTKVTFGDDTVIEVQGYKSVNITFELDERIDKVLNEKCSAYTVELGTEVNEFACVVADAVIKTLQPVSELLTPLGIDLDEWSMATYYLFDESGEFKLASHMYCSFYPPDEDEEEGDCEEEEFEPSTQYEYGTEDDYQGKPLEFGATSAALQPEEEQEEDWLDDDSQQTVGQQDGSEDNQTTTIQTIVEVQPQLEMELTPVVQTIEVNSFSGYLKLTDNVYIKNADIVEEAKKVKPTVVVNAANVYLKHGGGVAGALNKATNNAMQVESDDYIATNGPLKVGGSCVLSGHNLAKHCLHVVGPNVNKGEDIQLLKSAYENFNQHEVLLAPLLSAGIFGADPIHSLRVCVDTVRTNVYLAVFDKNLYDKLVSSFLEMKSEKQVEQKIAEIPKEEVKPFITESKPSVEQRKQDDKKIKACVEEVTTTLEETKFLTENLLLYIDINGNLHPDSATLVSDIDITFLKKDAPYIVGDVVQEGVLTAVVIPTKKAGGTTEMLAKALRKVPTDNYITTYPGQGLNGYTVEEAKTVLKKCKSAFYILPSIISNEKQEILGTVSWNLREMLAHAEETRKLMPVCVETKAIVSTIQRKYKGIKIQEGVVDYGARFYFYTSKTTVASLINTLNDLNETLVTMPLGYVTHGLNLEEAARYMRSLKVPATVSVSSPDAVTAYNGYLTSSSKTPEEHFIETISLAGSYKDWSYSGQSTQLGIEFLKRGDKSVYYTSNPTTFHLDGEVITFDNLKTLLSLREVRTIKVFTTVDNINLHTQVVDMSMTYGQQFGPTYLDGADVTKIKPHNSHEGKTFYVLPNDDTLRVEAFEYYHTTDPSFLGRYMSALNHTKKWKYPQVNGLTSIKWADNNCYLATALLTLQQIELKFNPPALQDAYYRARAGEAANFCALILAYCNKTVGELGDVRETMSYLFQHANLDSCKRVLNVVCKTCGQQQTTLKGVEAVMYMGTLSYEQFKKGVQIPCTCGKQATKYLVQQESPFVMMSAPPAQYELKHGTFTCASVYTGNYQCGHYKHITSKETLYCIDGALLTKSSEYKGPITDVFYKENSYTTTIKPVTYKLDGVVCTEIDPKLDNYYKKDNSYFTEQPIDLVPNQPYPNASFDNFKFVCDNIKFADDLNQLTGYKKPASRELKVTFFPDLNGDVVAIDYKHYTPSFKKGAKLLHKPIVWHVNNATNKATYKPNTWCIRCLWSTKPVETSNSFDVLKSEDAQGMDNLACEDLKPVSEEVVENPTIQKDVLECNVKTTEVVGDIILKPANNSLKITEEVGHTDLMAAYVDNSSLTIKKPNELSRVLGLKTLATHGLAAVNSVPWDTIANYAKPFLNKVVSTTTNIVTRCLNRVCTNYMPYFFTLLLQLCTFTRSTNSRIKASMPTTIAKNTVKSVGKFCLEASFNYLKSPNFSKLINIIIWFLLLSVCLGSLIYSTAALGVLMSNLGMPSYCTGYREGYLNSTNVTIATYCTGSIPCSVCLSGLDSLDTYPSLETIQITISSFKWDLTAFGLVAEWFLAYILFTRFFYVLGLAAIMQLFFSYFAVHFISNSWLMWLIINLVQMAPISAMVRMYIFFASFYYVWKSYVHVVDGCNSSTCMMCYKRNRATRVECTTIVNGVRRSFYVYANGGKGFCKLHNWNCVNCDTFCAGSTFISDEVARDLSLQFKRPINPTDQSSYIVDSVTVKNGSIHLYFDKAGQKTYERHSLSHFVNLDNLRANNTKGSLPINVIVFDGKSKCEESSAKSASVYYSQLMCQPILLLDQALVSDVGDSAEVAVKMFDAYVNTFSSTFNVPMEKLKTLVATAEAELAKNVSLDNVLSTFISAARQGFVDSDVETKDVVECLKLSHQSDIEVTGDSCNNYMLTYNKVENMTPRDLGACIDCSARHINAQVAKSHNIALIWNVKDFMSLSEQLRKQIRSAAKKNNLPFKLTCATTRQVVNVVTTKIALKGG

SEQ ID NO: 15953 - protein, 1946 aa, Artificial Sequence
  SARS-CoV-2__MT810493.1__non-structural protein 3 (NSP3)
MAPTKVTFGDDTVIEVQGYKSVNITFELDERIDKVLNEKCSAYTVELGTEVNEFACVVADAVIKTLQPVSELLTPLGIDLDEWSMATYYLFDESGEFKLASHMYCSFYPPDEDEEEGDCEEEEFEPSTQYEYGTEDDYQGKPLEFGATSAALQPEEEQEEDWLDDDSQQTVGQQDGSEDNQTTTIQTIVEVQPQLEMELTPVVQTIEVNSFSGYLKLTDNVYIKNADIVEEAKKVKPTVVVNAANVYLKHGGGVAGTLNKATNNAMQVESDDYIATNGPLKVGGSCVLSGHNLAKHCLHVVGPNVNKGEDIQLLKSAYENFNQHEVLLAPLLSAGIFGADPIHSLRVCVDTVRTNVYLAVFDKNLYDKLVSSFLEMKSEKQVEQKIAEIPKEEVKPFITESKPSVEQRKQDDKKIKACVEEVTTTLEETKFLTENLLLYIDINGNLHPDSATLVSDIDITFLKKDAPYIVGDVVQEGVLTAVVIPTKKAGGTTEMLAKALRKVPTDNYITTYPGQGLNGYTVEEAKTVLKKCKSAFYILPSIISNEKQEILGTVSWNLREMLAHAEETRKLMPVCVETKAIVSTIQRKYKGIKIQEGVVDYGARFYFYTSKTTVASLINTLNDLNETLVTMPLGYVTHGLNLEEAARYMRSLKVPATVSVSSPDAVTAYNGYLTSSSKTPEEHFIETISLAGSYKDWSYSGQSTQLGIEFLKRGDKSVYYTSNPTTFHLDGEVITFDNLKTLLSLREVRTIKVFTTVDNINLHTQVVDMSMTYGQQFGPTYLDGADVTKIKPHNSHEGKTFYVLPNDDTLRVEAFEYYHTTDPSFLGRYMSALNHTKKWKYPQVNGLTSIKWADNNCYLATALLTLQQIELKFNPPALQDAYYRARAGEAANFCALILAYCNKTVGELGDVRETMSYLFQHANLDSCKRVLNVVCKTCGQQQTTLKGVEAVMYMGTLSYEQFKKGVQIPCTCGKQATKYLVQQESPFVMMSAPPAQYELKHGTFTCASEYTGNYQCGHYKHITSKETLYCIDGALLTKSSEYKGPITDVFYKENSYTTTIKPVTYKLDGVVCTEIDPKLDNYYKKDNSYFTEQPIDLVPNQPYPNASFDNFKFVCDNIKFADDLNQLTGYKKPASRELKVTFFPDLNGDVVAIDYKHYTPSFKKGAKLLHKPIVWHVNNATNKATYKPNTWCIRCLWSTKPVETSNSFGVLKSEDAQGMDNLACEDLKPVSEEVVENPTIQKDVLECNVKTTEVVGDIILKPANNSLKITEEVGHTDLMAAYVDNSSLTIKKPNELSRVLGLKTLATHGLAAVNSVPWDTIANYAKPFLNKVVSTTTNIVTRCLNRVCTNYMPYFFTLLLQLCTFTRSTNSRIKASMPTTIAKNTVKSVGKFCLEASFNYLKSPNFSKLINIIIWFLLLSVCLGSLIYSTAALGVLMSNLGMPSYCTGYREGYLNSTNVTIATYCTGSIPCSVCLSGLDSLDTYPSLETIQITISSFKWDLTAFGLVAEWFLAYILFTRFFYVLGLAAIMQLFFSYFAVHFISNSWLMWLIINLVQMAPISAMVRMYIFFASFYYVWKSYVHVVDGCNSSTCMMCYKRNRATRVECTTIVNGVRRSFYVYANGGKGFCKLHNWNCVNCDTFCAGSTFISDEVARDLSLQFKRPINPTDQSSYIVDSVTVKNGSIHLYFDKAGQKTYERHSLSHFVNLDNLRANNTKGSLPINVIVFDGKSKCEESSAKSASVYYSQLMCQPILLLDQALVSDVGDSAEVAVKMFDAYVNTFSSTFNVPMEKLKTLVATAEAELAKNVSLDNVLSTFISAARQGFVDSDVETKDVVECLKLSHQSDIEVTGDSCNNYMLTYNKVENMTPRDLGACIDCSARHINAQVAKSHNIALIWNVKDFMSLSEQLRKQIRSAAKKNNLPFKLTCATTRQVVNVVTTKIALKGG

SEQ ID NO: 15954 - protein, 1946 aa, Artificial Sequence
  SARS-CoV-2__MT810511.1__non-structural protein 3 (NSP3)
MAPTKVTFGDDTVIEVQGYKSVNITFELDERIDKVLNEKCSAYTVELGTEVNEFACVVADAVIKTLQPVSELLTPLGIDLDEWSMATYYLFDESGEFKLASHMYCSFYPPDEDEEEGDCEEEEFEPSTQYEYGTEDDYQGKPLEFGATSAALQPEEEQEEDWLDDDSQQTVGQQDGSEDNQTTTIQTIVEVQPQLEMELTPVVQTIEVNSFSGYLKLTDNVYIKNADIVEEAKKVKPTVVVNAANVYLKHGGGVAGALNKATNNAMQVESDDYIATNGPLKVGGSCVLSGHNLAKHCLHVVGPNVNKGEDIQLLKSAYENFNQHEVLLAPLLSAGIFGADPIHSLRVCVDTVRTNVYLAVFDKNLYDKLVSSFLEMKSEKQVEQKIAEIPKEEVKPFITESKPSVEQRKQDDKKIKACVEEVTTTLEETKFLTENLLLYIDINGNLHPDSATLVSDIDITFLKKDAPYIVGDVVQEGVLTAVVIPTKKAGGTTEMLAKALRKVPTDNYITTYPGQGLNGYTVEEAKTVLKKCKSAFYILPSIISNEKQEILGTVSWNLREMLAHAEETRKLMPVCVETKAIVSTIQRKYKGIKIQEGVVDYGARFYFYTSKTTVASLINTLNDLNETLVTMPLGYVTHGLNLEEAARYMRSLKVPATVSVSSPDAVTAYNGYLTSSSKTPEEHFIETISLAGSYKDWSYSGQSTQLGIEFLKRGDKSVYYTSNPTTFHLYGEVITFDNLKTLLSLREVRTIKVFTTVDNINLHTQVVDMSMTYGQQFGPTYLDGADVTKIKPHNSHEGKTFYVLPNDDTLRVEAFEYYHTTDPSFLGRYISALNHTKKWKYPQVNGLTSIKWADNNCYLATALLTLQQIELKFNPPALQDAYYRARAGEAANFCALILAYCNKTVGELGDVRETMSYLFQHANLDSCKRVLNVVCKTCGQQQTTLKGVEAVMYMGTLSYEQFKKGVQIPCTCGKQATKYLVQQESPFVMMSAPPAQYELKHGTFTCASEYTGNYQCGHYKHITSKETLYCIDGALLTKSSEYKGPITDVFYKENSYTTTIKPVTYKLDGVVCTEIDPKLDNYYKKDNSYFTEQPIDLVPNQPYPNASFDNFKFVCDNIKFADDLNQLTGYKKPASRELKVTFFPDLNGDVVAIDYKHYTPSFKKGAKLLHKPIVWHVNNATNKATYKPNTWCIRCLWSTKPVETSNSFDVLKSEDAQGMDNLACEDLKPVSEEVVENPTIQKDVLECNVKTTEVVGDIILKPANNSLKITEEVGHTDLMAAYVDNSSLTIKKPNELSRVLGLKTLATHGLAAVNSVPWDTIANYAKPFLNKVVSTTTNIVTRCLNRVCTNYMPYFFTLLLQLCTFTRSTNSRIKASMPTTIAKNTVKSVGKFCLEASFNYLKSPNFSKLINIIIWFLLLSVCLGSLIYSTAALGVLMSNLGMPSYCTGYREGYLNSTNVTIATYCTGSIPCSVCLSGLDSLDTYPSLETIQITISSFKWDLTAFGLVAEWFLAYILFTRFFYVLGLAAIMQLFFSYFAVHFISNSWLMWLIINLVQMAPISAMVRMYIFFASFYYVWKSYVHVVDGCNSSTCMMCYKRNRATRVECTTIVNGVRRSFYVYANGGKGFCKLHNWNCVNCDTFCAGSTFISDEVARDLSLQFKRPINPTDQSSYIVDSVTVKNGSIHLYFDKAGQKTYERHSLSHFVNLDNLRANNTKGSLPINVIVFDGKSKCEESSAKSASVYYSQLMCQPILLLDQALVSDVGDSAEVAVKMFDAYVNTFSSTFNVPMEKLKTLVATAEAELAKNVSLDNVLSTFISAARQGFVDSDVETKDVVECLKLSHQSDIEVTGDSCNNYMLTYNKVENMTPRDLGACIDCSARHINAQVAKSHNIALIWNVKDFMSLSEQLRKQIRSAAKKNNLPFKLTCATTRQVVNVVTTKIALKGG

SEQ ID NO: 15955 - protein, 1946 aa, Artificial Sequence
  SARS-CoV-2__MT810529.1__non-structural protein 3 (NSP3)
MAPTKVTFGDDTVIEVQGYKSVNITFELDERIDKVLNEKCSAYTVELGTEVNEFACVVADAVIKTLQPVSELLTPLGIDLDEWSMATYYLFDESGEFKLASHMYCSFYPPDEDEEEGDCEEEEFEPSTQYEYGTEDDYQGKPLEFGATSAALQPEEEQEEDWLDDDSQQTVGQQDGSEDNQTTTIQTIVEVQPQLEMELTPVVQTIEVNSFSGYLKLTDNVYIKNADIVEEAKKVKPTVVVNAANVYLKHGGGVAGALNKATNNAMQVESDDYIATNGPLKVGGSCVLSGHNLAKHCLHVVGPNVNKGEDIQLLKSAYENFNQHEVLLAPLLSAGIFGADPIHSLRVCVDTVRTNVYLAVFDKNLYDKLVSSFLEMKSEKQVEQKIAEIPKEEVKPFITESKPSVEQRKQDDKKIKACVEEVTTTLEETKFLTENLLLYIDINGNLHPDSATLVSDIDITFLKKDAPYIVGDVVQEGVLTAVVIPTKKAGGTTEMLAKALRKVPTDNYITTYPGQGLNGYTVEEAKTVLKKCKSAFYILPSIISNEKQEILGTVSWNLREMLAHAEETRKLMPVCVETKAIVSTIQRKYKGIKIQEGVVDYGARFYFYTSKTTVASLINTLNDLNETLVTMPLGYVTHGLNLEEAARYMRSLKVPATVSVSSPDAVTAYNGYLTSSSKTPEEHFIETISLAGSYKDWSYSGQSTQLGIEFLKRGDKSVYYTSNPTTFHLDGEVITFDNLKTLLSLREVRTIKVFTTVDNINLHTQVVDMSMTYGQQFGPTYLDGADVTKIKPHNSHEGKTFYVLPNDDTLRVEAFEYYHTTDPSFLGRYMSALNHTKKWKYPQVNGLTSIKWADNNCYLATALLTLQQIELKFNPPALQDAYYRARAGEAANFCALILAYCNKTVGELGDVRETMSYLFQHANLDSCKRVLNVVCKTCGQQQTTLKGVEAVMYMGTLSYEQFKKGVQIPCTCGKQATKYLVQQESPFVMMSAPPAQYELKHGTFTCASEYTGNYQCGHYKHITSKETLYCIDGALLTKSSEYKGPITDVFYKENSYTTTIKPVTYKLDGVVCTEIDPKLDNYYKKDNSYFTEQPIDLVPNQPYPNASFDNFKFVCDNIKFADDLNQLTGYKKPASRELKVTFFPDLNGDVVAIDYKHYTPSFKKGAKLLHKPIVWHVNNATNKATYKPNTWCIRCLWSTKPVETSNSFDVLKSEDAQGMDNLACEDLKPVSEEVVENPTIQKDVLECNVKTTEVVGDIILKPANNSLKITEEVGHTDLMAAYVDNSSLTIKKPNELSRVLGLKTLATHGLAAVNSVPWDTIANYAKPFLNKVVSTTTNIVTRCLNRVCTNYMPYFFTLLLQLCTFTRSTNSRIKASMPTTIAKNTVKSVGKFCLEASFNYLKSPNFSKLINIIIWFLLLSVCLGSLIYSTAALGVLMSNLGMPSYCTGYREGYLNSTNVTIATYCTGSIPCSVCLSGLDSLDTYPSLETIQITISSFKWDLTAFGLVAEWFLAYILFTRFFYVLGLAAIMQLFFSYFAVHFISNSWLMWLIINLVQMAPISAMVRMYIFFASFYYVWKSYVHVVDGCNSSTCMMCYKRNRATRVECTTIVNGVRRSFYVYANGGKGFCKLHNWNCVNCDTFCAGSTFISDEVARDLSLQFKRPINPTDQSSYIVDSVTVKNGSIHLYFDKAGQKTYERHSLSHFVNLDNLRANNTKGSLPINVIVFDGKSKCEESSAKLASVYYSQLMCQPILLLDQALVSDVGDSAEVAVKMFDAYVNTFSSTFNVPMEKLKTLVATAEAELAKNVSLDNVLSTFISAARQGFVDSDVETKDVVECLKLSHQSDIEVTGDSCNNYMLTYNKVENMTPRDLGACIDCSARHINAQVAKSHNIALIWNVKDFMSLSEQLRKQIRSAAKKNNLPFKLTCATTRQVVNVVTTKIALKGG

SEQ ID NO: 15956 - protein, 1946 aa, Artificial Sequence
  SARS-CoV-2__MT810532.1__non-structural protein 3 (NSP3)
MAPTKVTFGDDTVIEVQGYKSVNITFELDERIDKVLNEKCSAYTVELGTEVNEFACVVADAVIKTLQPVSELLTPLGIDLDEWSMATYYLFDESGEFKLASHMYCSFYPPDEDEEEGDCEEEEFEPSTQYEYGTEDDYQGKPLEFGATSAALQPEEEQEEDWLDDDSQQTVGQQDGSEDNQTTTIQTIVEVQPQLEMELTPVVQTIEVNSFSGYLKLTDNVYIKNADIVEEAKKVKPTVVVNAANVYLKHGGGVAGALNKATNNAMQVESDDYIATNGPLKVGGSCVLSGHNLAKHCLHVVGPNVNKGEDIQLLKSAYENFNQHEVLLAPLLSAGIFGADPIHSLRVCVDTVRTNVYLAVFDKNLYDKLVSSFLEMKSEKQVEQKIAEIPKEEVKPFITESKPSVEQRKQDDKKIKACVEEVTTTLEETKFLTENLLLYIDINGNLHPDSATLVSDIDITFLKKDAPYIVGDVVQEGVLTAVVIPTKKAGGTTEMLAKALRKVPTDNYITTYPGQGLNGYTVEEAKTVLKKCKSAFYILPSIISNEKQEILGTVSWNLREMLAHAEETRKLMPVCVETKAIVSTIQRKYKGIKIQEGVVDYGARFYFYTSKTTVASLINTLNDLNETLVTMPLGYVTHGLNLEEAARYMRSLKVPATVSVSSPDAVTAYNGYLTSSSKTPEEHFIETISLAGSYKDWSYSGQSTQLGIEFLKRGDKSVYYTSNPTTFHLDGEVITFDNLKTLLSLREVRTIKVFTTVDNINLHTQVVDMSMTYGQQFGPTYLDGADVTKIKPHNSHEGKTFYVLPNDDTLRVEAFEYYHTTDPSFLGRYMSALNHTKKWKYPQVNGLTSIKWADNNCYLATALLTLQQIELKFNPPALQDAYYRARAGEAANFCALILAYCNKTVGELGDVRETMSYLFQHANLDSCKRVLNVVCKTCGQQQTTLKGVEAVMYMGTLSYEQFKKGVQIPCTCGKQATKYLVQQESPFVMMSAPPAQYELKHGTFTCASEYTGNYQCGHYKHITSKETLYCIDGALLTKSSEYKGPITDVFYKENSYTTTIKPVTYKLDGVVCTEIDPKLDNYYKKDNSYFTEQPIDLVPNQPYPNASFDNFKFVCDNIKFADDLNQLTGYKKPASRELKVTFFPDLNGDVVAIDYKHYTPSFKKGAKLLHKPIVWHVNNATNKATYKPNTWCIRCLWSTKPVETSNSFDVLKSEDAQGMDNLACEDLKPVSEEVVENPTIQKDVLECNVKTTEVVGDIILKPANNSLKITEEVGHTDLMAAYVDNSSLTIKKPNELSRVLGLKTLATHGLAAVNSVPWDTIANYAKPFLNKVVSTTTNIVTRCLNRVCTNYMPYFFTLLLQLCTFTRSTNSRIKASMPTTIAKNTVKSVGKFCLEASFNYLKSPNFSKLINIIIWFLLLSVCLGSLIYSTAALGVLMSNLGMPSYCTGYREGYLNSTNVTIATYCTGSIPCSVCLSGLDSLDTYPSLETIQITISSFKWDLTAFGLVAEWFLAYILFTRFFYVLGLAAIMQLFFSYFAVHFISNSWLMWLIINLVQMAPISAMVRMYIFFASFYYVWKSYVHVVDGCNSSTCMMCYKRNRATRVECTTIVNGVRRSFYVYANGGKGFCKLHNWNCVNCDTFCAGSTFISDEVARDLSLQFKRPINPTDQSSYIVDSVTVKNGSIHLYFDKAGQKTYERHSLSHFVNLDNLRANNTKGSLPINVIVFDGKSKCEESSAKSASVYYSQLMCQPILLLDQALVSDVGDSAEVAVKMFDAYVNTFSSTFNVPMEKLKTLVATAEAELAKNVSLDNVLSTFISAARQGFVDSDVETKDVVECLKLSHQSDVEVTGDSCNNYMLTYNKVENMTPRDLGACIDCSARHINAQVAKSHNIALIWNVKDFMSLSEQLRKQIRSAAKKNNLPFKLTCATTRQVVNVVTTKIALKGG

SEQ ID NO: 15957 - protein, 1946 aa, Artificial Sequence
  SARS-CoV-2__MT810534.1__non-structural protein 3 (NSP3)
MAPTKVTFGDDTVIEVQGYKSVNITFELDERIDKVLNEKCSAYTVELGTEVNEFACVVADAVIKTLQPVSELLTPLGIDLDEWSMATYYLFDESGEFKLASHMYCSFYPPDEDEEEGDCEEEEFEPSTQYEYGTEDDYQGKPLEFGATSAALQPEEEQEEDWLDDDSQQTVGQQDGSEDNQTTTIQTIVEVQPQLEMELTPVVQTIEVNSFSGYLKLTDNVYIKNADIVEEAKKVKPTVVVNAANVYLKHGGGVAGALNKATNNAMQVESDDYIATNGPLKVGGSCVLSGHNLAKHCLHVVGPNVNKGEDIQLLKSAYENFNQHEVLLAPLLSAGIFGADPIHSLRVCVDTVRTNVYLAVFDKNLYDKLVSSFLEMKSEKQVEQKIAEIPKEEVKPFITESKPSVEQRKQDDKKIKACVEEVTTTLEETKFLTENLLLYIDINGNLHPDSATLVSDIDITFLKKDAPYIVGDVVQEGVLTAVVIPTKKAGGTTEMLAKALRKVPTDNYITTYPGQGLNGYTVEEAKTVLKKCKSAFYILPSIISNEKQEILGTVSWNLREMLAHAEETRKLMPVCVETKAIVSTIQRKYKGIKIQEGVVDYGARFYFYTSKTTVASLINTLNDLNETLVTMPLGYVTHGLNLEEAARYMRSLKVPATVSVSSPDAVTAYNGYLTSSSKTPEEHFIETISLAGSYKDWSYSGQSTQLGIEFLKRGDKSVYYTSNPTTFHLDGEVITFDNLKTLLSLREVRTIKVFTTVDNINLHTQVVDMSMTYGQQFGPTYLDGADVTKIKPHNSHEGKTFYVLPNDDTLRVEAFEYYHTTDPSFLGRYMSALNHTKKWKYPQVNGLTSIKWADNNCYLATALLTLQQIELKFNPPALQDAYYRARAGEAANFCALILAYCNKTVGELGDVRETMSYLFQHANLDSCKRVLNVVCKTCGQQQTTLKGVEAVMYMGTLSYEQFKKGVQIPCTCGKQATKYLVQQESPFVMMSAPPAQYELKHGTFTCASEYTGNYQCGHYKHITSKETLYCIDGALLTKSSEYKGPITDVFYKENSYTTTIKPVTYKLDGVVCTEIDPKLDNYYKKDNSYFTEQPIDLVPNQPYPNASFDNFKFVCDNIKFADDLNQLTGYKKPASRELKVTFFPDLNGDVVPIDYKHYTPSFKKGAKLLHKPIVWHVNNATNKATYKPNTWCIRCLWSTKPVETSNSFDVLKSEDAQGMDNLACEDLKPVSEEVVENPTIQKDVLECNVKTTEVVGDIILKPANNSLKITEEVGHTDLMAAYVDNSSLTIKKPNELSRVLGLKTLATHGLAAVNSVPWDTIANYAKPFLNKVVSTTTNIVTRCLNRVCTNYMPYFFTLLLQLCTFTRSTNSRIKASMPTTIAKNTVKSVGKFCLEASFNYLKSPNFSKLINIIIWFLLLSVCLGSLIYSTAALGVLMSNLGMPSYCTGYREGYLNSTNVTIATYCTGSIPCSVCLSGLDSLDTYPSLETIQITISSFKWDLTAFGLVAEWFLAYILFTRFFYVLGLAAIMQLFFSYFAVHFISNSWLMWLIINLVQMAPISAMVRMYIFFASFYYVWKSYVHVVDGCNSSTCMMCYKRNRATRVECTTIVNGVRRSFYVYANGGKGFCKLHNWNCVNCDTFCAGSTFISDEVARDLSLQFKRPINPTDQSSYIVDSVTVKNGSIHLYFDKAGQKTYERHSLSHFVNLDNLRANNTKGSLPINVIVFDGKSKCEESSAKSASVYYSQLMCQPILLLDQALVSDVGDSAEVAVKMFDAYVNTFSSTFNVPMEKLKTLVATAEAELAKNVSLDNVLSTFISAARQGFVDSDVETKDVVECLKLSHQSDIEVTGDSCNNYMLTYNKVENMTPRDLGACIDCSARHINAQVAKSHNIALIWNVKDFMSLSEQLRKQIRSAAKKNNLPFKLTCATTRQVVNVVTTKIALKGG

SEQ ID NO: 15958 - protein, 1946 aa, Artificial Sequence
  SARS-CoV-2__MT810570.1__non-structural protein 3 (NSP3)
MAPTKVTFGDDTVIEVQGYKSVNITFELDERIDKVLNEKCSAYTVELGTEVNEFACVVADAVIKTLQPVSELLTPLGIDLDEWSMATYYLFDESGEFKLASHMYCSFYPPDEDEEEGDCEEEEFEPSTQYEYGTEDDYQGKPLEFGATSAALQPEEEQEEDWLDDDSQQTVGQQDGSEDNQTTTIQTIVEVQPQLEMELTPVVQTIEVNSFSGYLKLTDNVYIKNADIVEEAKKVKPTVVVNAANVYLKHGGGVAGALNKATNNAMQVESDDYIATNGPLKVGGSCVLSGHNLAKHCLHVVGPNVNKGEDIQLLKSAYENFNQHEVLLAPLLSAGIFGADPIHSLRVCVDTVRTNVYLAVFDKNLYDKLVSSFLEMKSEKQVEQKIAEIPKEEVKPFITESKPSVEQRKQDDKKIKACVEEVTTTLEETKFLTENLLLYIDINGNLHPDSATLVSDIDITFLKKDAPYIVGDVVQEGVLTAVVIPTKKAGGTTEMLAKALRKVPTDNYITTYPGQGLNGYTVEEAKTVLKKCKSAFYILPSIISNEKQEILGTVSWNLREMLAHAEETRKLMPVCVETKAIVSTIQRKYKGIKIQEGVVDYGARFYFYTSKTTVASLINTLNDLNETLVTMPLGYVTHGLNLEEAARYMRSLKVPATVSVSSPDAVTAYNGYLTSSSKTPEEHFIETISLAGSYKDWSYSGQSTQLGIEFLKRGDKSVYYTSNPTTFHLDGEVITFDNLKTLLSLREVRTIKVFTTVDNINLHTQVVDMSMTYGQQFGPTYLDGADVTKIKPHNSHEGKTFYVLPNDDTLRVEAFEYYHTTDPSFLGRYMSALNHTKKWKYPQVNGLTSIKWADNNCYLATALLTLQQIELKFNPPALQDAYYRARAGEAANFCALILAYCNKTVGELGDVRETMSYLFQHANLDSCKRVLNVVCKTCGQQQTTLKGVEAVMYMGTLSYEQFKKGVQIPCTCGKQATKYLVQQESPFVMMSAPPAQYELKHGTFTCASEYTGNYQCGHYKHITSKETLYCIDGALLTKSSEYKGPITDVFYKENSYTTTIKPVTYKLDGVVCTEIDPKLDNYYKKDNSYFTEQPIDLVPNQPYPNASFDNFKFVCDNIKFADDLNQLTGYKKPASRELKVTFFPDLNGDVVAIDYKHYTPSFKKGAKLLHKPIVWHVNNATNKATYKPNTWCIRCLWSTKPVETSNSFDVLKSEDAQGMDNLACEDLKLVSEEVVENPTIQKDVLECNVKTTEVVGDIILKPANNSLKITEEVGHTDLMAAYVDNSSLTIKKPNELSRVLGLKTLATHGLAAVNSVPWDTIANYAKPFLNKVVSTTTNIVTRCLNRVCTNYMPYFFTLLLQLCTFTRSTNSRIKASMPTTIAKNTVKSVGKFCLEASFNYLKSPNFSKLINIIIWFLLLSVCLGSLIYSTAALGVLMSNLGMPSYCTGYREGYLNSTNVTIATYCTGSIPCSVCLSGLDSLDTYPSLETIQITISSFKWDLTAFGLVAEWFLAYILFTRFFYVLGLAAIMQLFFSYFAVHFISNSWLMWLIINLVQMAPISAMVRMYIFFASFYYVWKSYVHVVDGCNSSTCMMCYKRNRATRVECTTIVNGVRRSFYVYANGGKGFCKLHNWNCVNCDTFCAGSTFISDEVARDLSLQFKRPINPTDQSSYIVDSVTVKNGSIHLYFDKAGQKTYERHSLSHFVNLDNLRANNTKGSLPINVIVFDGKSKCEESSAKSASVYYSQLMCQPILLLDQALVSDVGDSAEVAVKMFDAYVNTFSSTFNVPMEKLKTLVATAEAELAKNVSLDNVLSTFISAARQGFVDSDVETKDVVECLKLSHQSDIEVTGDSCNNYMLTYNKVENMTPRDLGACIDCSARHINAQVAKSHNIALIWNVKDFMSLSEQLRKQIRSAAKKNNLPFKLTCATTRQVVNVVTTKIALKGG

SEQ ID NO: 15959 - protein, 1946 aa, Artificial Sequence
  SARS-CoV-2__MT810589.1__non-structural protein 3 (NSP3)
MAPTKVTFGDDTVIEVQGYKSVNITFELDERIDKVLNEKCSAYTVELGTEVNEFACVVADAVIKTLQPVSELLTPLGIDLDEWSMATYYLFDESGEFKLASHMYCSFYPPDEDEEEGDCEEEEFEPSTQYEYGTEDDYQGKPLEFGATSAALQPEEEQEEDWLDDDSQQTVGQQDGSEDNQTTTIQTIVEVQPQLEMELTPVVQTIEVNSFSGYLKLTDNVYIKNADIVEEAKKVKPTVVVNAANVYLKHGGGVAGALNKATNNAMQVESDDYIATNGPLKVGGSCVLSGHNLAKHCLHVVGPNVNKGEDIQLLKSAYENFNQHEVLLAPLLSAGIFGADPIHSLRVCVDTVRTNVYLAVFDKNLYDKLVSSFLEMKSEKQVEQKIAEIPKEEVKPFITESKPSVEQRKQDDKKIKACVEEVTTTLEETKFLTENLLLYIDINGNLHPDSATLVSDIDITFLKKDAPYIVGDVVQEGVLTAVVIPTKKAGGTTEMLAKALRKVPTDNYITTYPGQGLNGYTVEEAKTVLKKCKSAFYILPSIISNEKQEILGTVSWNLREMLAHAEETRKLMPVCVETKAIVSTIQRKYKGIKIQEGVVDYGARFYFYTSKTTVASLINTLNDLNETLVTMPLGYVTHGLNLEEAARYMRSLKVPATVSVSSPDAVTAYNGYLTSSSKTPEEHFIETISLAGSYKDWSYSGQSTQLGIEFLKRGDKSVYYTSNPTTFHLDGEVITFDNLKTLLSLREVRTIKVFTTVDNINLHTQVVDMSMTYGQQFGPTYLDGADVTKIKPHNSHEGKTFYVLPNDDTLRVEAFEYYHTTDPSFLGRYMSALNHTKKWKYPQVNGLTSIKWADNNCYLATALLTLQQIELKFNPPALQDAYYRARAGEAANFCALILAYCNKTVGELGDVRETMSYLFQHANLDSCKRVLNVVCKTCGQQQTTLKGVEAVMYMGTLSYEQFKKGVQIPCTCGKQATKYLVQQESPFVMMSAPPAQYELKHGTFTCASEYTGNYQCGHYKHITSKETLYCIDGALLTKSSEYKGPITDVFYKENSYTTTIKPVTYKLDGVVCTEIDPKLDNYYKKDNSYFTEQPIDLVPNQPYPNASFDNFKFVCDNIKFADDLNQLTGYKKPASRELKVTFFPDLNGDVVAIDYKHYTPSFKKGAKLLHKPIVWHVNNATNKATYKPNTWCIRCLWSTKPVETSNSFDVLKSEDAQGMDNLACEDLKPVSEEVVENPTIQKDVLECNVKTTEVVGDIILKPANNSLKITEEVGHTDLMAAYVDNSSLTIKKPNELSRVLGLKTLAIHGLAAVNSVPWDTIANYAKPFLNKVVSTTTNIVTRCLNRVCTNYMPYFFTLLLQLCTFTRSTNSRIKASMPTTIAKNTVKSVGKFCLEASFNYLKSPNFSKLINIIIWFLLLSVCLGSLIYSTAALGVLMSNLGMPSYCTGYREGYLNSTNVTIATYCTGSIPCSVCLSGLDSLDTYPSLETIQITISSFKWDLTAFGLVAEWFLAYILFTRFFYVLGLAAIMQLFFSYFAVHFISNSWLMWLIINLVQMAPISAMVRMYIFFASFYYVWKSYVHVVDGCNSSTCMMCYKRNRATRVECTTIVNGVRRSFYVYANGGKGFCKLHNWNCVNCDTFCAGSTFISDEVARDLSLQFKRPINPTDQSSYIVDSVTVKNGSIHLYFDKAGQKTYERHSLSHFVNLDNLRANNTKGSLPINVIVFDGKSKCEESSAKSASVYYSQLMCQPILLLDQALVSDVGDSAEVAVKMFDAYVNTFSSTFNVPMEKLKTLVATAEAELAKNVSLDNVLSTFISAARQGFVDSDVETKDVVECLKLSHQSDIEVTGDSCNNYMLTYNKVENMTPRDLGACIDCSARHINAQVAKSHNIALIWNVKDFMSLSEQLRKQIRSAAKKNNLPFKLTCATTRQVVNVVTTKIALKGG

SEQ ID NO: 15960 - protein, 1946 aa, Artificial Sequence
  SARS-CoV-2__MT810599.1__non-structural protein 3 (NSP3)
MAPTKVTFGDDTVIEVQGYKSVNITFELDERIDKVLNEKCSAYTVELGTEVNEFACVVADAVIKTLQPVSELLTPLGIDLDEWSMATYYLFDESGEFKLASHMYCSFYPPDEDEEEGDCEEEEFEPSTQYEYGTEDDYQGKPLEFGATSAALQPEEEQEEDWLDDDSQQTVGQQDGSEDNQTTTIQTIVEVQPQLEMELTPVVQTIEVNSFSGYLKLTDNVYIKNADIVEEAKKVKPTVVVNAANVYLKHGGGVAGALNKATNNAMQVESDDYIATNGPLKVGGSCVLSGHNLAKHCLHVVGPNVNKGEDIQLLKSAYENFNQHEVLLAPLLSAGIFGADPIHSLRVCVDTVRTNVYLAVFDKNLYDKLVSSFLEMKSEKQVEQKIAEIPKEEVKPFITESKPSVEQRKQDDKKIKACVEEVTTTLEETKFLTENLLLYIDINGNLHPDSATLVSDIDITFLKKDAPYIVGDVVQEGVLTAVVIPTKKAGGTTEMLAKALRKVPTDNYITTYPGQGLNGYTVEEAKTVLKKCKSAFYILPSIISNEKQEILGTVSWNLREMLAHAEETRKLMPVCVETKAIVSTIQRKYKGIKIQEGVVDYGARFYFYTSKTTVASLINTLNDLNETLVTMPLGYVTHGLNLEEAARYMRSLKVPATVSVSSPDAVTAYNGYLTSSSKTPEEHFIETISLAGSYKDWSYSGQSTQLGIEFLKRGDKSVYYTSNPTTFHLDGEVITFDNLKTLLSLREVRTIKVFTTVDNINLHTQVVDMSMTYGQQFGPTYLDGADVTKIKPHNSHEGKTFYVLPNDDTLRVEAFEYYHTTDPSFLGRYMSALNHTKKWKYLQVNGLTSIKWADNNCYLATALLTLQQIELKFNPPALQDAYYRARAGEAANFCALILAYCNKTVGELGDVRETMSYLFQHANLDSCKRVLNVVCKTCGQQQTTLKGVEAVMYMGTLSYEQFKKGVQIPCTCGKQATKYLVQQESPFVMMSAPPAQYELKHGTFTCASEYTGNYQCGHYKHITSKETLYCIDGALLTKSSEYKGPITDVFYKENSYTTTIKPVTYKLDGVVCTEIDPKLDNYYKKDNSYFTEQPIDLVPNQPYPNASFDNFKFVCDNIKFADDLNQLTGYKKPASRELKVTFFPDLNGDVVAIDYKHYTPSFKKGAKLLHKPIVWHVNNATNKATYKPNTWCIRCLWSTKPVETSNSFDVLKSEDAQGMDNLACEDLKPVSEEVVENPTIQKDVLECNVKTTEVVGDIILKPANNSLKITEEVGHTDLMAAYVDNSSLTIKKPNELSRVLGLKTLATHGLAAVNSVPWDTIANYAKPFLNKVVSTTTNIVTRCLNRVCTNYMPYFFTLLLQLCTFTRSTNSRIKASMPTTIAKNTVKSVGKFCLEASFNYLKSPNFSKLINIIIWFLLLSVCLGSLIYSTAALGVLMSNLGMPSYCTGYREGYLNSTNVTIATYCTGSIPCSVCLSGLDSLDTYPSLETIQITISSFKWDLTAFGLVAEWFLAYILFTRFFYVLGLAAIMQLFFSYFAVHFISNSWLMWLIINLVQMAPISAMVRMYIFFASFYYVWKSYVHVVDGCNSSTCMMCYKRNRATRVECTTIVNGVRRSFYVYANGGKGFCKLHNWNCVNCDTFCAGSTFISDEVARDLSLQFKRPINPTDQSSYIVDSVTVKNGSIHLYFDKAGQKTYERHSLSHFVNLDNLRANNTKGSLPINVIVFDGKSKCEESSAKSASVYYSQLMCQPILLLDQALVSDVGDSAEVAVKMFDAYVNTFSSTFNVPMEKLKTLVATAEAELAKNVSLDNVLSTFISAARQGFVDSDVETKDVVECLKLSHQSDIEVTGDSCNNYMLTYNKVENMTPRDLGACIDCSARHINAQVAKSHNIALIWNVKDFMSLSEQLRKQIRSAAKKNNLPFKLTCATTRQVVNVVTTKIALKGG

SEQ ID NO: 15961 - protein, 1946 aa, Artificial Sequence
  SARS-CoV-2__MT810624.1__non-structural protein 3 (NSP3)
MAPTKVTFGDDTVIEVQGYKSVNITFELDERIDKVLNEKCSAYTVELGTEVNEFACVVADAVIKTLQPVSELLTPLGIDLDEWSMATYYLFDESGEFKLASHMYCSFYPPDEDEEEGDCEEEEFEPSTQYEYGTEDDYQGKPLEFGATSAALQPEEEQEEDWLDDDSQQTVGQQDGSEDNQTTTIQTIVEVQPQLEMELTPVVQTIEVNSFSGYLKLTDNVYIKNADIVEEAKKVKPTVVVNAANVYLKHGGGVAGALNKATNNAMQVESDDYIATNGPLKVGGSCVLSGHNLAKHCLHVVGPNVNKGEDIQLLKSAYENFNQHEVLLAPLLSAGIFGADPIHSLRVCVDTVRTNVYLAVFDKNLYDKLVSSFLEMKSEKQVEQKIAEIPKEEVKPFITESKPSVEQRKQDDKKIKACVEEVTTTLEETKFLTENLLLYIDINGNLHPDSATLVSDIDITFLKKDAPYIVGDVVQEGVLTAVVIPTKKAGGTTEMLAKALRKVPTDNYITTYPGQGLNGYTVEEAKTVLKKCKSAFYILPSIISNEKQEILGTVSWNLREMLAHAEETRKLMPVCVETKAIVSTIQRKYKGIKIQEGVVDYGARFYFYTSKTTVASLINTLNDLNETLVTMPLGYVTHGLNLEEAARYMRSLKVPATVSVSSPDAVTAYNGYLTSSSKTPEEHFIETISLAGSYKDWSYSGQSTQLGIEFLKRGDKSVYYTSNPTTFHLDGEVITFDNLKTLLSLREVRTIKVFTTVDNINLHTQVVDMSMTYGQQFGPTYLDGADVTKIKPHNSHEGKTFYVLPNDDTLRVEAFEYYYTTDPSFLGRYMSALNHTKKWKYPQVNGLTSIKWADNNCYLATALLTLQQIELKFNPPALQDAYYRARAGEAANFCALILAYCNKTVGELGDVRETMSYLFQHANLDSCKRVLNVVCKTCGQQQTTLKGVEAVMYMGTLSYEQFKKGVQIPCTCGKQATKYLVQQESPFVMMSAPPAQYELKHGTFTCASEYTGNYQCGHYKHITSKETLYCIDGALLTKSSEYKGPITDVFYKENSYTTTIKPVTYKLDGVVCTEIDPKLDNYYKKDNSYFTEQPIDLVPNQPYPNASFDNFKFVCDNIKFADDLNQLTGYKKPASRELKVTFFPDLNGDVVAIDYKHYTPSFKKGAKLLHKPIVWHVNNATNKATYKPNTWCIRCLWSTKPVETSNSFDVLKSEDAQGMDNLACEDLKPVSEEVVENPTIQKDVLECNVKTTEVVGDIILKPANNSLKITEEVGHTDLMAAYVDNSSLTIKKPNELSRVLGLKTLATHGLAAVNSVPWDTIANYAKPFLNKVVSTTTNIVTRCLNRVCTNYMPYFFTLLLQLCTFTRSTNSRIKASMPTTIAKNTVKSVGKFCLEASFNYLKSPNFSKLINIIIWFLLLSVCLGSLIYSTAALGVLMSNLGMPSYCTGYREGYLNSTNVTIATYCTGSIPCSVCLSGLDSLDTYPSLETIQITISSFKWDLTAFGLVAEWFLAYILFTRFFYVLGLAAIMQLFFSYFAVHFISNSWLMWLIINLVQMAPISAMVRMYIFFASFYYVWKSYVHVVDGCNSSTCMMCYKRNRATRVECTTIVNGVRRSFYVYANGGKGFCKLHNWNCVNCDTFCAGSTFISDEVARDLSLQFKRPINPTDQSSYIVDSVTVKNGSIHLYFDKAGQKTYERHSLSHFVNLDNLRANNTKGSLPINVIVFDGKSKCEESSAKSASVYYSQLMCQPILLLDQALVSDVGDSAEVAVKMFDAYVNTFSSTFNVPMEKLKTLVATAEAELAKNVSLDNVLSTFISAARQGFVDSDVETKDVVECLKLSHQSDIEVTGDSCNNYMLTYNKVENMTPRDLGACIDCSARHINAQVAKSHNIALIWNVKDFMSLSEQLRKQIRSAAKKNNLPFKLTCATTRQVVNVVTTKIALKGG

SEQ ID NO: 15962 - protein, 1946 aa, Artificial Sequence
  SARS-CoV-2__MT810634.1__non-structural protein 3 (NSP3)
MAPTKVTFGDDTVIEVQGYKSVNITFELDERIDKVLNEKCSAYTVELGTEVNEFACVVADAVIKTLQPVSELLTPLGIDLDEWSMATYYLFDESGEFKLASHMYCSFYPPDEDEEEGDCEEEEFEPSTQYEYGTEDDYQGKPLEFGATSAALQPEEEQEEDWLDDDSQQTVGQQDGSEDNQTTTIQTIVEVQPQLEMELTPVVQTIEVNSFSGYLKLTDNVYIKNADIVEEAKKVKPTVVVNAANVYLKHGGGVAGALNKATNNAMQVESDDYIATNGPLKVGGSCVLSGHNLAKHCLHVVGPNVNKGEDIQLLKSAYENFNQHEVLLAPLLSAGIFGADPIHSLRVCVDTVRTNVYLAVFDKNLYDKLVSSFLEMKSEKQVEQKIAEIPKEEVKPFITESKPSVEQRKQDDKKIKACVEEVTTTLEETKFLTENLLLYIDINGNLHPDSATLVSDIDITFLKKDAPYIVGDVVQEGVLTAVVIPTKKAGGTTEMLAKALRKVPTDNYITTYPGQGLNGYTVEEAKTVLKKCKSAFYILPSIISNEKQEILGTVSWNLREMLAHAEETRKLMPVCVETKAIVSTIQRKYKGIKIQEGVVDYGARFYFYTSKTTVASLINTLNDLNETLVTMPLGYVTHGLNLEEAARYMRSLKVPATVSVSSPDAVTAYNGYLTSSSKTPEEHFIETISLAGSYKDWSYSGQSTQLGIEFLKRGDKSVYYTSNPTTFHLYGEVITFDNLKTLLSLREVRTIKVFTTVDNINLHTQVVDMSMTYGQQFGPTYLDGADVTKIKPHNSHEGKTFYVLPNDDTLRVEAFEYYHTTDPSFLGRYISALNHTKKWKYPQVNGLTSIKWADNNCYLATALLTLQQIELKFNPPALQDAYYRARAGEAANFCALILAYCNKTVGELGDVRETMSYLFQHANLDSCKRVLNVVCKTCGQQQTTLKGVEAVMYMGTLSYEQFKKGVQIPCTCGKQATKYLVQQESPFVMMSAPPAQYELKHGTFTCASEYTGNYQCGHYKHITSKETLYCIDGALLTKSSEYKGPITDVFYKENSYTTTIKPVTYKLDGVVCTEIDPKLDNYYKKDNSYFTEQPIDLVPNQPYPNASFDNFKFVCDNIKFADDLNQLTGYKKPASRELKVTFFPDLNGDVVAIDYKHYTPSFKKGAKLLHKPIVWHVNNATNKATYKPNTWCIRCLWSTKPVETSNSFDVLKSEDAQGMDNLACEDLKPVSEEVVENPTIQKDVLECNVKTTEVVGDIILKPANNSLKITEEVGHTDLMAAYVDNSSLTIKKPNELSRVLGLKTLATHGLAAVNGVPWDTIANYAKPFLNKVVSTTTNIVTRCLNRVCTNYMPYFFTLLLQLCTFTRSTNSRIKASMPTTIAKNTVKSVGKFCLEASFNYLKSPNFSKLINIIIWFLLLSVCLGSLIYSTAALGVLMSNLGMPSYCTGYREGYLNSTNVTIATYCTGSIPCSVCLSGLDSLDTYPSLETIQITISSFKWDLTAFGLVAEWFLAYILFTRFFYVLGLAAIMQLFFSYFAVHFISNSWLMWLIINLVQMAPISAMVRMYIFFASFYYVWKSYVHVVDGCNSSTCMMCYKRNRATRVECTTIVNGVRRSFYVYANGGKGFCKLHNWNCVNCDTFCAGSTFISDEVARDLSLQFKRPINPTDQSSYIVDSVTVKNGSIHLYFDKAGQKTYERHSLSHFVNLDNLRANNTKGSLPINVIVFDGKSKCEESSAKSASVYYSQLMCQPILLLDQALVSDVGDSAEVAVKMFDAYVNTFSSTFNVPMEKLKTLVATAEAELAKNVSLDNVLSTFISAARQGFVDSDVETKDVVECLKLSHQSDIEVTGDSCNNYMLTYNKVENMTPRDLGACIDCSARHINAQVAKSHNIALIWNVKDFMSLSEQLRKQIRSAAKKNNLPFKLTCATTRQVVNVVTTKIALKGG

SEQ ID NO: 15963 - protein, 1946 aa, Artificial Sequence
  SARS-CoV-2__MT810640.1__non-structural protein 3 (NSP3)
MAPTKVTFGDDTVIEVQGYKSVNITFELDERIDKVLNEKCSAYTVELGTEVNEFACVVADAVIKTLQPVSELLTPLGIDLDEWSMATYYLFDESGEFKLASHMYCSFYPPDEDEEEGDCEEEEFEPSTQYEYGTEDDYQGKPLEFGATSAALQPEEEQEEDWLDDDSQQTVGQQDGSEDNQTTTIQTIVEVQPQLEMELTPVVQTIEVNSFSGYLKLTDNVYIKNADIVEEAKKVKPTVVVNAANVYLKHGGGVAGALNKATNNAMQVESDDYIATNGPLKVGGSCVLSGHNLAKHCLHVVGPNVNKGEDIQLLKSAYENFNQHEVLLAPLLSAGIFGADPIHSLRVCVDTVRTNVYLAVFDKNLYDKLVSSFLEMKSEKQVEQKIAEIPKEEVKPFITESKPSVEQRKQDDKKIKACVEEVTTTLEETKFLTENLLLYIDINGNLHPDSATLVSDIDITFLKKDAPYIVGDVVQEGVLTAVVIPTKKAGGTTEMLAKALRKVPTDNYITTYPGQGLNGYTVEEAKTVLKKCKSAFYILPSIISNEKQEILGTVSWNLREMLAHAEETRKLMPVCVETKAIVSTIQRKYKGIKIQEGVVDYGARFYFYTSKTTVASLINTLNDLNETLVTMPLGYVTHGLNLEEAARYMRSLKVPATVSVSSPDAVTAYNGYLTSSSKTPEEHFIETISLAGSYKDWSYSGQSTQLGIEFLKRGDKSVYYTSNPTTFHLYGEVITFDNLKTLLSLREVRTIKVFTTVDNINLHTQVVDMSMTYGQQFGPTYLDGADVTKIKPHNSHEGKTFYVLPNDDTLRVEAFEYYHTTDPSFLGRYISALNHTKKWKYPQVNGLTSIKWADNNCYLATALLTLQQIELKFNPPALQDAYYRARAGEAANFCALILAYCNKTVGELGDVRETMSYLFQHANLDSCKRVLNVVCKTCGQQQTTLKGVEAVMYMGTLSYEQFKKGVQIPCTCGKQATKYLVQQESPFVMMSAPPAQYELKHGTFTCASEYTGNYQCGHYKHIISKETLYCIDGALLTKSSEYKGPITDVFYKENSYTTTIKPVTYKLDGVVCTEIDPKLDNYYKKDNSYFTEQPIDLVPNQPYPNASFDNFKFVCDNIKFADDLNQLTGYKKPASRELKVTFFPDLNGDVVAIDYKHYTPSFKKGAKLLHKPIVWHVNNATNKATYKPNTWCIRCLWSTKPVETSNSFDVLKSEDAQGMDNLACEDLKPVSEEVVENPTIQKDVLECNVKTTEVVGDIILKPANNSLKITEEVGHTDLMAAYVDNSSLTIKKPNELSRVLGLKTLATHGLAAVNSVPWDTIANYAKPFLNKVVSTTTNIVTRCLNRVCTNYMPYFFTLLLQLCTFTRSTNSRIKASMPTTIAKNTVKSVGKFCLEASFNYLKSPNFSKLINIIIWFLLLSVCLGSLIYSTAALGVLMSNLGMPSYCTGYREGYLNSTNVTIATYCTGSIPCSVCLSGLDSLDTYPSLETIQITISSFKWDLTAFGLVAEWFLAYILFTRFFYVLGLAAIMQLFFSYFAVHFISNSWLMWLIINLVQMAPISAMVRMYIFFASFYYVWKSYVHVVDGCNSSTCMMCYKRNRATRVECTTIVNGVRRSFYVYANGGKGFCKLHNWNCVNCDTFCAGSTFISDEVARDLSLQFKRPINPTDQSSYIVDSVTVKNGSIHLYFDKAGQKTYERHSLSHFVNLDNLRANNTKGSLPINVIVFDGKSKCEESSAKSASVYYSQLMCQPILLLDQALVSDVGDSAEVAVKMFDAYVNTFSSTFNVPMEKLKTLVATAEAELAKNVSLDNVLSTFISAARQGFVDSDVETKDVVECLKLSHQSDIEVTGDSCNNYMLTYNKVENMTPRDLGACIDCSARHINAQVAKSHNIALIWNVKDFMSLSEQLRKQIRSAAKKNNLPFKLTCATTRQVVNVVTTKIALKGG

SEQ ID NO: 15964 - protein, 1946 aa, Artificial Sequence
  SARS-CoV-2__MT810661.1__non-structural protein 3 (NSP3)
MAPTKVTFGDDTVIEVQGYKSVNITFELDERIDKVLNEKCSAYTVELGTEVNEFACVVADAVIKTLQPVSELLTPLGIDLDEWSMATYYLFDESGEFKLASHMYCSFYPPDEDEEEGDCEEEEFEPSTQYEYGTEDDYQGKPLEFGATSAALQPEEEQEEDWLDDDSQQTVGQQDGSEDNQTTTIQTIVEVQPQLEMELTPVVQTIEVNSFSGYLKLTDNVYIKNADIVEEAKKVKPTVVVNAANVYLKHGGGVAGALNKATNNAMQVESDDYIATNGPLKVGGSCVLSGHNLAKHCLHVVGPNVNKGEDIQLLKSAYENFNQHEVLLAPLLSAGIFGADPIHSLRVCVDTVRTNVYLAVFDKNLYDKLVSSFLEMKSEKQVEQKIAEIPKEEVKPFITESKPSVEQRKQDDKKIKACVEEVTTTLEETKFLTENLLLYIDINGNLHPDSATLVSDIDITFLKKDAPYIVGDVVQEGVLTAVVIPTKKAGGTTEMLAKALRKVPTDNYITTYPGQGLNGYTVEEAKTVLKKCKSAFYILPSIISNEKQEILGTVSWNLREMLAHAEETRKLMPVCVETKAIVSTIQRKYKGIKIQEGVVDYGARFYFYTSKTTVASLINTLNDLNETLVTMPLGYVTHGLNLEEAARYMRSLKVPATVSVSSPDAVTAYNGYLTSSSKTPEEHFIETISLAGSYKDWSYSGQSTQLGIEFLKRGDKSVYYTSNPTTFHLDGEVITFDNLKTLLSLREVRTIKVFTTVDNINLHTQVVDMSMTYGQQFGPTYLDGADVTKIKPHNSHEGKTFYVLPNDDTLRVEAFEYYHTTDPSFLGRYMSALNHTKKWKYPQVNGLTSIKWADNNCYLATALLTLQQIELKFNPPALQDAYYRARAGEAANFCALILAYCNKTVGELGDVRETMSYLFQHANLDSCKRVLNVVCKTCGQQQTTLKGVEAVMYMGTLSYEQFKKGVQIPCTCGKQATKYLVQQESPFVMMSAPPAQYELKHGTFTCASEYTGNYQCGHYKHITSKETLYCIDGALLTKSSEYKGPITDVFYKENSYTTTIKPVTYKLDGVVCTEIDPKLDNYYKKDNSYFTEQPIDLLPNQPYPNASFDNFKFVCDNIKFADDLNQLTGYKKPASRELKVTFFPDLNGDVVAIDYKHYTPSFKKGAKLLHKPIVWHVNNATNKATYKPNTWCIRCLWSTKPVETSNSFDVLKSEDAQGMDNLACEDLKPVSEEVVENPTIQKDILECNVKTTEVVGDIILKPANNSLKITEEVGHTDLMAAYVDNSSLTIKKPNELSRVLGLKTLATHGLAAVNSVPWDTIANYAKPFLNKVVSTTTNIVTRCLNRVCTNYMPYFFTLLLQLCTFTRSTNSRIKASMPTTIAKNTVKSVGKFCLEASFNYLKSPNFSKLINIIIWFLLLSVCLGSLIYSTAALGVLMSNLGMPSYCTGYREGYLNSTNVTIATYCTGSIPCSVCLSGLDSLDTYPSLETIQITISSFKWDLTAFGLVAEWFLAYILFTRFFYVLGLAAIMQLFFSYFAVHFISNSWLMWLIINLVQMAPISAMVRMYIFFASFYYVWKSYVHVVDGCNSSTCMMCYKRNRATRVECTTIVNGVRRSFYVYANGGKGFCKLHNWNCVNCDTFCAGSTFISDEVARDLSLQFKRPINPTDQSSYIVDSVTVKNGSIHLYFDKAGQKTYERHSLSHFVNLDNLRANNTKGSLPINVIVFDGKSKCEESSAKSASVYYSQLMCQPILLLDQALVSDVGDSAEVAVKMFDAYVNTFSSTFNVPMEKLKTLVATAEAELAKNVSLDNVLSTFISAARQGFVDSDVETKDVVECLKLSHQSDIEVTGDSCNNYMLTYNKVENMTPRDLGACIDCSARHINAQVAKSHNIALIWNVKDFMSLSEQLRKQIRSAAKKNNLPFKLTCATTRQVVNVVTTKIALKGG

SEQ ID NO: 15965 - protein, 1946 aa, Artificial Sequence
  SARS-CoV-2__MT810690.1__non-structural protein 3 (NSP3)
MAPTKVTFGDDTVIEVQGYKSVNITFELDERIDKVLNEKCSAYTVELGTEVNEFACVVADAVIKTLQPVSELLTPLGIDLDEWSMATYYLFDESGEFKLASHMYCSFYPPDEDEEEGDCEEEEFEPSTQYEYGTEDDYQGKPLEFGATSAALQPEEEQEEDWLDDDSQQTVGQQDGSEDNQTTTIQTIVEVQPQLEMELTPVVQTIEVNSFSGYLKLTDNVYIKNADIVEEAKKVKPTVVVNAANVYLKHGGGVAGALNKATNNAMQVESDDYIATNGPLKVGGSCVLSGHNLAKHCLHVVGPNVNKGEDIQLLKSAYENFNQHEVLLAPLLSAGIFGADPIHSLRVCVDTVRTNVYLAVFDKNLYDKLVSSFLEMKSEKQVEQKIAEIPKEEVKPFITESKPSVEQRKQDDKKIKACVEEVTTTLEETKFLTENLLLYIDINGNLHPDSATLVSDIDITFLKKDAPYIVGDVVQEGVLTAVVIPTKKAGGTTEMLAKALRKVPTDNYITTYPGQGLNGYTVEEAKTVLKKCKSAFYILPSIISNEKQEILGTVSWNLREMLAHAEETRKLMPVCVETKAIVSTIQRKYKGIKIQEGVVDYGARFYFYTSKTTVASLINTLNDLNETLVTMPLGYVTHGLNLEEAARYMRSLKVPATVSVSSPDAVTAYNGYLTSSSKTPEEHFIETISLAGSYKDWSYSGQSTQLGIEFLKRGDKSVYYTSNPTTFHLDGEVITFDNLKTLLSLREVRTIKVFTTVDNINLHTQVVDMSMTYGQQFGPTYLDGADVTKIKPHNSHEGKTFYVLPNDDTLRVEAFEYYHTTDPSFLGRYMSALNHTKKWKYPQVNGLTSIKWADNNCYLATALLTLQQIELKFNPPALQDAYYRARAGEAANFCALILAYCNKTVGELGDVRETMSYLFQHANLDSCKRVLNVVCKTCGQQQTTLKGVEAVMYMGTLSYEQFKKGVQIPCTCGKQATKYLVQQESPFVMMSAPPAQYELKHGTFTCASEYTGNYQCGHYKHITSKETLYCIDGALLTKSSEYKGPITDVFYKENSYTTTIKPVTYKLDGVVCTEIDPKLDNYYKKDNSYFTEQPIDLVPNQPYPNASFDNFKFVCDNIKFADDLNQLTGYKKPASRELKVTFFPDLNGDVVAIDYKHYTPSFKKGAKLLHKPIVWHVNNATNKATYKPNTWCIRCLWSTKPVETSNSFDVLKSEDAQGMDNLACEDLKPVSEEVVENPTIQKDVLECNVKTTEVVGDIILKPANNSLKITEEVGHTDLMAAYVDNSSLTIKKPNELSRVLGLKTLATHGLAAVNSVPWDTIANYAKPFLNKVVSTTTNIVTRCLNRVCTNYMPYFFTLLLQLCTFTRSTNSRIKASMSTTIAKNTVKSVGKFCLEASFNYLKSPNFSKLINIIIWFLLLSVCLGSLIYSTAALGVLMSNLGMPSYCTGYREGYLNSTNVTIATYCTGSIPCSVCLSGLDSLDTYPSLETIQITISSFKWDLTAFGLVAEWFLAYILFTRFFYVLGLAAIMQLFFSYFAVHFISNSWLMWLIINLVQMAPISAMVRMYIFFASFYYVWKSYVHVVDGCNSSTCMMCYKRNRATRVECTTIVNGVRRSFYVYANGGKGFCKLHNWNCVNCDTFCAGSTFISDEVARDLSLQFKRPINPTDQSSYIVDSVTVKNGSIHLYFDKAGQKTYERHSLSHFVNLDNLRANNTKGSLPINVIVFDGKSKCEESSAKSASVYYSQLMCQPILLLDQALVSDVGDSAEVAVKMFDAYVNTFSSTFNVPMEKLKTLVATAEAELAKNVSLDNVLSTFISAARQGFVDSDVETKDVVECLKLSHQSDIEVTGDSCNNYMLTYNKVENMTPRDLGACIDCSARHINAQVAKSHNIALIWNVKDFMSLSEQLRKQIRSAAKKNNLPFKLTCATTRQVVNVVTTKIALKGG

SEQ ID NO: 15966 - protein, 1946 aa, Artificial Sequence
  SARS-CoV-2__MT810701.1__non-structural protein 3 (NSP3)
MAPTKVTFGDDTVIEVQGYKSVNITFELDERIDKVLNEKCSAYTVELGTEVNEFACVVADAVIKTLQPVSELLTPLGIDLDEWSMATYYLFDESGEFKLASHMYCSFYPPDEDEEEGDCEEEEEFEPSTQYEYGTEDDYQGKPLEFGATSAALQPEEEQEEDWLDDDSQQTVGQQDGSEDNQTTTIQTIVEVQPQLEMELTPVVQTIEVNSFSGYLKLTDNVYIKNADIVEEAKKVKPTVVVNAANVYLKHGGGVAGALNKATNNAMQVESDDYIATNGPLKVGGSCVLSGHNLAKHCLHVVGPNVNKGEDIQLLKSAYENFNQHEVLLAPLLSAGIFGADPIHSLRVCVDTVRTNVYLAVFDKNLYDKLVSSFLEMKSEKQVEQKIAEIPKEEVKPFITESKPSVEQRKQDDKKIKACVEEVTTTLEETKFLTENLLLYIDINGNLHPDSATLVSDIDITFLKKDAPYIVGDVVQEGVLTAVVIPTKKAGGTTEMLAKALRKVPTDNYITTYPGQGLNGYTVEEAKTVLKKCKSAFYILPSIISNEKQEILGTVSWNLREMLAHAEETRKLMPVCVETKAIVSTIQRKYKGIKIQEGVVDYGARFYFYTSKTTVASLINTLNDLNETLVTMPLGYVTHGLNLEEAARYMRSLKVPATVSVSSPDAVTAYNGYLTSSSKTPEEHFIETISLAGSYKDWSYSGQSTQLGIEFLKRGDKSVYYTSNPTTFHLDGEVITFDNLKTLLSLREVRTIKVFTTVDNINLHTQVVDMSMTYGQQFGPTYLDGADVTKIKPHNSHEGKTFYVLPNDDTLRVEAFEYYHTTDPSFLGRYMSALNHTKKWKYPQVNGLTSIKWADNNCYLATALLTLQQIELKFNPPALQDAYYRARAGEAANFCALILAYCNKTVGELGDVRETMSYLFQHANLDSCKRVLNVVCKTCGQQQTTLKGVEAVMYMGTLSYEQFKKGVQIPCTCGKQATKYLVQQESPFVMMSAPPAQYELKHGTFTCASEYTGNYQCGHYKHITSKETLYCIDGALLTKSSEYKGPITDVFYKENSYTTTIKPVTYKLDGVVCTEIDPKLDNYYKKDNSYFTEQPIDLVPNQPYPNASFDNFKFVCDNIKFADDLNQLTGYKKPASRELKVTFFPDLNGDVVAIDYKHYTPSFKKGAKLLHKPIVWHVNNATNKATYKPNTWCIRCLWSTKPVETSNSFDVLKSEDAQGMDNLACEDLKPVSEEVVENPTIQKDVLECNVKTTEVVGDIILKPANNSLKITEEVGHTDLMAAYVDNSSLTIKKPNELSRVLGLKTLATHGLAAVNSVPWDTIANYAKPFLNKVVSTTTNIVTRCLNRVCTNYMPYFFTLLLQLCTFTRSTNSRIKASMPTTIAKNTVKSVGKFCLEASFNYLKSPNFSKLINIIIWFLLLSVCLGSLIYSTAALGVLMSNLGMPSYCTGYREGYLNSTNVTIATYCTGSIPCSVCLSGLDSLDTYPSLETIQITISSFKWDLTAFGLVAEWFLAYILFTRFFYVLGLAAIMQLFFSYFAVHFISNSWLMWLIINLVQMAPISAMVRMYIFFASFYYVWKSYVHVVDGCNSSTCMMCYKRNRATRVECTTIVNGVRRSFYVYANGGKGFCKLHNWNCVNCDTFCAGSTFISDEVARDLSLQFKRPINPTDQSSYIVDSVTVKNGSIHLYFDKAGQKTYERHSLSHFVNLDNLRANNTKGSLPINVIVFDGKSKCEESSAKSASVYYSQLMCQPILLLDQALVSDVGDSAEVAVKMFDAYVNTFSSTFNVPMEKLKTLVATAEAELAKNVSLDNVLSTFISAARQGFVDSDVETKDVVECLKLSHQSDIEVTGDSCNNYMLTYNKVENMTPRDLGACIDCSARHINAQVAKSHNIALIWNVKDFMSLSEQLRKQIRSAAKKNNLPFKLTCATTRQVVNVVTTKIALKG

SEQ ID NO: 15967 - protein, 1946 aa, Artificial Sequence
  SARS-CoV-2__MT810727.1__non-structural protein 3 (NSP3)
MAPTKVTFGDDTVIEVQGYKSVNITFELDERIDKVLNEKCSAYTVELGTEVNEFACVVADAVIKTLQPVSELLTPLGIDLDEWSMATYYLFDESGEFKLASHMYCSFYPPDEDEEEGDCEEEEFEPSTQYEYGTEDDYQGKPLEFGATSAALQPEEEQEEDWLDDDSQQTVGQQDGSEDNQTTTIQTIVEVQPQLEMELTPVVQTIEVNSFSGYLKLTDNVYIKNADIVEEAKKVKPTVVVNAANVYLKHGGGVAGALNKATNNAMQVESDDYIATNGPLKVGGSCVLSGHNLAKHCLHVVGPNVNKGEDIQLLKSAYENFNQHEVLLAPLLSAGIFGADPIHSLRVCVDTVRTNVYLAVFDKNLYDKLVSSFLEMKSEKQVEQKIAEIPKEEVKPFITESKPSVEQRKQDDKKIKACVEEVTTTLEETKFLTENLLLYIDINGNLHPDSATLVSDIDITFLKKDAPYIVGDVVQEGVLTAVVIPTKKAGGTTEMLAKALRKVPTDNYITTYPGQGLNGYTVEEAKTVLKKCKSAFYILPSIISNEKQEILGTVSWNLREMLAHAEETRKLMPVCVETKAIVSTIQRKYKGIKIQEGVVDYGARFYFYTSKTTVASLINTLNDLNETLVTMPLGYVTHGLNLEEAARYMRSLKVPATVSVSSPDAVTAYNGYLTSSSKTPEEHFIETISLAGSYKDWSYSGQSTQLGIEFLKRGDKSVYYTSNPTTFHLDGEVITFDNLKTLLSLREVRTIKVFTTVDNINLHTQVVDMSMTYGQQFGPTYLDGADVTKIKPHNSHEGKTFYVLPNDDTLRVEAFEYYHTTDPSFLGRYMSALNHTKKWKYPQVNGLTSIKWADNNCYLATALLTLQQIELKFNPPALQDAYYRARAGEAANFCALILAYCNKTVGELGDVRETMSYLFQHANLDSCKRVLNVVCKTCGQQQTTLKGVEAVMYMGTLSYEQFKKGVQIPCTCGKQATKYLVQQESPFVMMSAPPAQYELKHGTFTCASEYTGNYQCGHYKHITSKETLYCIDGALLTKSSEYKGPITDVFYKENSYTTTIKPVTYKLDGVVCTEIDPKLDNYYKKDNSYFTEQPIDLVPNQPYPNASFDNFKFVCDNIKFADDLNQLTGYKKPASRELKVTFFPDLNGDVVAIDYKHYTPSFKKGAKLLHKPIVWHVNNATNKATYKPNTWCIRCLWSTKPVETSNSFDVLKSEDAQGMDNLACEDLKPVSEEVVENPTIQKDVLECNVKTTEVVGDIILKPANNSLKITEEVGHTDLMAAYVDNSSLTIKKPNELSRVLGLKTLATHGLAAVNSVPWDTIANYAKPFLNKVVSTTTNIVTRCLNRVCTNYMPYFFTLLLQLCTFTRSTNSRIKASMPTTIAKNTVKSVGKFCLEALFNYLKSPNFSKLINIIIWFLLLSVCLGSLIYSTAALGVLMSNLGMPSYCTGYREGYLNSTNVTIATYCTGSIPCSVCLSGLDSLDTYPSLETIQITISSFKWDLTAFGLVAEWFLAYILFTRFFYVLGLAAIMQLFFSYFAVHFISNSWLMWLIINLVQMAPISAMVRMYIFFASFYYVWKSYVHVVDGCNSSTCMMCYKRNRATRVECTTIVNGVRRSFYVYANGGKGFCKLHNWNCVNCDTFCAGSTFISDEVARDLSLQFKRPINPTDQSSYIVDSVTVKNGSIHLYFDKAGQKTYERHSLSHFVNLDNLRANNTKGSLPINVIVFDGKSKCEESSAKSASVYYSQLMCQPILLLDQALVSDVGDSAEVAVKMFDAYVNTFSSTFNVPMEKLKTLVATAEAELAKNVSLDNVLSTFISAARQGFVDSDVETKDVVECLKLSHQSDIEVTGDSCNNYMLTYNKVENMTPRDLGACIDCSARHINAQVAKSHNIALIWNVKDFMSLSEQLRKQIRSAAKKNNLPFKLTCATTRQVVNVVTTKIALKGG

SEQ ID NO: 15968 - protein, 1946 aa, Artificial Sequence
  SARS-CoV-2__MT810827.1__non-structural protein 3 (NSP3)
MAPTKVTFGDDTVIEVQGYKSVNITFELDERIDKVLNEKCSAYTVELGTEVNEFACVVADAVIKTLQPVSELLTPLGIDLDEWSMATYYLFDESGEFKLASHMYCSFYPPDEDEEEGDCEEEEFEPSTQYEYGTEDDYQGKPLEFGATSAALQPEEEQEEDWLDDDSQQTVGQQDGSEDNQTTTIQTIVEVQPQLEMELTPVVQTIEVNSFSGYLKFTDNVYIKNADIVEEAKKVKPTVVVNAANVYLKHGGGVAGALNKATNNAMQVESDDYIATNGPLKVGGSCVLSGHNLAKHCLHVVGPNVNKGEDIQLLKSAYENFNQHEVLLAPLLSAGIFGADPIHSLRVCVDTVRTNVYLAVFDKNLYDKLVSSFLEMKSEKQVEQKIAEIPKEEVKPFITESKPSVEQRKQDDKKIKACVEEVTTTLEETKFLTENLLLYIDINGNLHPDSATLVSDIDITFLKKDAPYIVGDVVQEGVLTAVVIPTKKAGGTTEMLAKALRKVPTDNYITTYPGQGLNGYTVEEAKTVLKKCKSAFYILPSIISNEKQEILGTVSWNLREMLAHAEETRKLMPVCVETKAIVSTIQRKYKGIKIQEGVVDYGARFYFYTSKTTVASLINTLNDLNETLVTMPLGYVTHGLNLEEAARYMRSLKVPATVSVSSPDAVTAYNGYLTSSSKTPEEHFIETISLAGSYKDWSYSGQSTQLGIEFLKRGDKSVYYTSNPTTFHLDGEVITFDNLKTLLSLREVRTIKVFTTVDNINLHTQVVDMSMTYGQQFGPTYLDGADVTKIKPHNSHEGKTFYVLPNDDTLRVEAFEYYHTTDPSFLGRYMSALNHTKKWKYPQVNGLTSIKWADNNCYLATALLTLQQIELKFNPPALQDAYYRARAGEAANFCALILAYCNKTVGELGDVRETMSYLFQHANLDSCKRVLNVVCKTCGQQQTTLKGVEAVMYMGTLSYEQFKKGVQIPCTCGKQATKYLVQQESPFVMMSAPPAQYELKHGTFTCASEYTGNYQCGHYKHITSKETLYCIDGALLTKSSEYKGPITDVFYKENSYTTTIKPVTYKLDGVVCTEIDPKLDNYYKKDNSYFTEQPIDLVPNQPYPNASFDNFKFVCDNIKFADDLNQLTGYKKPASRELKVTFFPDLNGDVVAIDYKHYTPSFKKGAKLLHKPIVWHVNNATNKATYKPNTWCIRCLWSTKPVETSNSFDVLKSEDAQGMDNLACEDLKPVSEEVVENPTIQKDVLECNVKTTEVVGDIILKPANNSLKITEEVGHTDLMAAYVDNSSLTIKKPNELSRVLGLKTLATHGLAAVNSVPWDTIANYAKPFLNKVVSTTTNIVTRCLNRVCTNYMPYFFTLLLQLCTFTRSTNSRIKASMPTTIAKNTVKSVGKFCLEASFNYLKSPNFSKLINIIIWFLLLSVCLGSLIYSTAALGVLMSNLGMPSYCTGYREGYLNSTNVTIATYCTGSIPCSVCLSGLDSLDTYPSLETIQITISSFKWDLTAFGLVAEWFLAYILFTRFFYVLGLAAIMQLFFSYFAVHFISNSWLMWLIINLVQMAPISAMVRMYIFFASFYYVWKSYVHVVDGCNSSTCMMCYKRNRATRVECTTIVNGVRRSFYVYANGGKGFCKLHNWNCVNCDTFCAGSTFISDEVARDLSLQFKRPINPTDQSSYIVDSVTVKNGSIHLYFDKAGQKTYERHSLSHFVNLDNLRANNTKGSLPINVIVFDGKSKCEESSAKSASVYYSQLMCQPILLLDQALVSDVGDSAEVAVKMFDAYVNTFSSTFNVPMEKLKTLVATAEAELAKNVSLDNVLSTFISAARQGFVDSDVETKDVVECLKLSHQSDIEVTGDSCNNYMLTYNKVENMTPRDLGACIDCSARHINAQVAKSHNIALIWNVKDFMSLSEQLRKQIRSAAKKNNLPFKLTCATTRQVVNVVTTKIALKGG

SEQ ID NO: 15969 - protein, 1946 aa, Artificial Sequence
  SARS-CoV-2__MT810831.1__non-structural protein 3 (NSP3)
MAPTKVTFGDDTVIEVQGYKSVNITFELDERIDKVLNEKCSAYTVELGTEVNEFACVVADAVIKTLQPVSELLTPLGIDLDEWSMATYYLFDESGEFKLASHMYCSFYPPDEDEEEGDCEEEEFEPSTQYEYGTEDDYQGKPLEFGATSAALQPEEEQEEDWLDDDSQQTVGQQDGSEDNQTTTIQTIVEVQPQLEMELTPVVQTIEVNSFSGYLKLTDNVYIKNADIVEEAKKVKPTVVVNAANVYLKHGGGVAGALNKATNNAMQVESDDYIATNGPLKVGGSCVLSGHNLAKHCLHVVGPNVNKGEDIQLLKSAYENFNQHEVLLAPLLSAGIFGADPIHSLRVCVDTVRTNVYLAVFDKNLYDKLVSSFLEMKSEKQVEQKIAEIPKEEVKPFITESKPSVEQRKQDDKKIKACVEEVTTTLEETKFLTENLLLYIDINGNLHPDSATLVSDIDITFLKKDAPYIVGDVVQEGVLTAVVIPTKKAGGTTEMLAKALRKVPTDNYITTYPGQGLNGYTVEEAKTVLKKCKSAFYILPSIISNEKQEILGTVSWNLREMLAHAEETRKLMPVCVETKAIVSTIQRKYKGIKIQEGVVDYGARFYFYTSKTTVASLINTLNDLNETLVTMPLGYVTHGLNLEEAARYMRSLKVPATVSVSSPDAVTAYNGYLTSSSKTPEEHFIETISLAGSYKDWSYSGQSTQLGIEFLKRGDKSVYYTSNPTTFHLDGEVITFDNLKTLLSLREVRTIKVFTTVDNINLHTQVVDMSMTYGQQFGPTYLDGADVTKIKPHNSHEGKTFYVLPNDDTLRVEAFEYYHTTDPSFLGRYMSALNHTKKWKYPQVNGLTSIKWADNNCYLATALLTLQQIELKFNPPALQDAYYRARAGEAANFCALILAYCNKTVGELGDVRETMSYLFQHANLDSCKRVLNVVCKTCGQQQTTLKGVEAVMYMGTLSYEQFKKGVQIPCTCGKQATKYLVQQESPFVMMSAPPAQYELKHGTFTCASEYTGNYQCGHYKHITSKETLYCIDGALLTKSSEYKGPITDVFYKENSYTTTIKPVTYKLDGVVCTEIDPKLDNYYKKDNSYFTEQPIDLVPNQPYQNASFDNFKFVCDNIKFADDLNQLTGYKKPASRELKVTFFPDLNGDVVAIDYKHYTPSFKKGAKLLHKPIVWHVNNATNKATYKPNTWCIRCLWSTKPVETSNSFDVLKSEDAQGMDNLACEDLKPVSEEVVENPTIQKDVLECNVKTTEVVGDIILKPANNSLKITEEVGHTDLMAAYVDNSSLTIKKPNELSRVLGLKTLATHGLAAVNSVPWDTIANYAKPFLNKVVSTTTNIVTRCLNRVCTNYMPYFFTLLLQLCTFTRSTNSRIKASMPTTIAKNTVKSVGKFCLEASFNYLKSPNFSKLINIIIWFLLLSVCLGSLIYSTAALGVLMSNLGMPSYCTGYREGYLNSTNVTIATYCTGSIPCSVCLSGLDSLDTYPSLETIQITISSFKWDLTAFGLVAEWFLAYILFTRFFYVLGLAAIMQLFFSYFAVHFISNSWLMWLIINLVQMAPISAMVRMYIFFASFYYVWKSYVHVVDGCNSSTCMMCYKRNRATRVECTTIVNGVRRSFYVYANGGKGFCKLHNWNCVNCDTFCAGSTFISDEVARDLSLQFKRPINPTDQSSYIVDSVTVKNGSIHLYFDKAGQKTYERHSLSHFVNLDNLRANNTKGSLPINVIVFDGKSKCEESSAKSASVYYSQLMCQPILLLDQALVSDVGDSAEVAVKMFDAYVNTFSSTFNVPMEKLKTLVATAEAELAKNVSLDNVLSTFISAARQGFVDSDVETKDVVECLKLSHQSDIEVTGDSCNNYMLTYNKVENMTPRDLGACIDCSARHINAQVAKSHNIALIWNVKDFMSLSEQLRKQIRSAAKKNNLPFKLTCATTRQVVNVVTTKIALKGG

SEQ ID NO: 15970 - protein, 1946 aa, Artificial Sequence
  SARS-CoV-2__MT810843.1__non-structural protein 3 (NSP3)
MAPTKVTFGDDTVIEVQGYKSVNITFELDERIDKVLNEKCSAYTVELGTEVNEFACVVADAVIKTLQPVSELLTPLGIDLDEWSMATYYLFDESGEFKLASHMYCSFYPPDEDEEEGDCEEEEFEPSTQYEYGTEDDYQGKPLEFGAISAALQPEEEQEEDWLDDDSQQTVGQQDGSEDNQTTTIQTIVEVQPQLEMELTPVVQTIEVNSFSGYLKLTDNVYIKNADIVEEAKKVKPTVVVNAANVYLKHGGGVAGALNKATNNAMQVESDDYIATNGPLKVGGSCVLSGHNLAKHCLHVVGPNVNKGEDIQLLKSAYENFNQHEVLLAPLLSAGIFGADPIHSLRVCVDTVRTNVYLAVFDKNLYDKLVSSFLEMKSEKQVEQKIAEIPKEEVKPFITESKPSVEQRKQDDKKIKACVEEVTTTLEETKFLTENLLLYIDINGNLHPDSATLVSDIDITFLKKDAPYIVGDVVQEGVLTAVVIPTKKAGGTTEMLAKALRKVPTDNYITTYPGQGLNGYTVEEAKTVLKKCKSAFYILPSIISNEKQEILGTVSWNLREMLAHAEETRKLMPVCVETKAIVSTIQRKYKGIKIQEGVVDYGARFYFYTSKTTVASLINTLNDLNETLVTMPLGYVTHGLNLEEAARYMRSLKVPATVSVSSPDAVTAYNGYLTSSSKTPEEHFIETISLAGSYKDWSYSGQSTQLGIEFLKRGDKSVYYTSNPTTFHLDGEVITFDNLKTLLSLREVRTIKVFTTVDNINLHTQVVDMSMTYGQQFGPTYLDGADVTKIKPHNSHEGKTFYVLPNDDTLRVEAFEYYHTTDPSFLGRYMSALNHTKKWKYPQVNGLTSIKWADNNCYLATALLTLQQIELKFNPPALQDAYYRARAGEAANFCALILAYCNKTVGELGDVRETMSYLFQHANLDSCKRVLNVVCKTCGQQQTTLKGVEAVMYMGTLSYEQFKKGVQIPCTCGKQATKYLVQQESPFVMMSAPPAQYELKHGTFTCASEYTGNYQCGHYKHITSKETLYCIDGALLTKSSEYKGPITDVFYKENSYTTTIKPVTYKLDGVVCTEIDPKLDNYYKKDNSYFTEQPIDLVPNQPYPNASFDNFKFVCDNIKFADDLNQLTGYKKPASRELKVTFFPDLNGDVVAIDYKHYTPSFKKGAKLLHKPIVWHVNNATNKATYKPNTWCIRCLWSTKPVETSNSFDVLKSEDAQGMDNLACEDLKPVSEEVVENPTIQKDVLECNVKTTEVVGDIILKPANNSLKITEEVGHTDLMAAYVDNSSLTIKKPNELSRVLGLKTLATHGLAAVNSVPWDTIANYAKPFLNKVVSTTTNIVTRCLNRVCTNYMPYFFTLLLQLCTFTRSTNSRIKASMPTTIAKNTVKSVGKFCLEASFNYLKSPNFSKLINIIIWFLLLSVCLGSLIYSTAVLGVLMSNLGMPSYCTGYREGYLNSTNVTIATYCTGSIPCSVCLSGLDSLDTYPSLETIQITISSFKWDLTAFGLVAEWFLAYILFTRFFYVLGLAAIMQLFFSYFAVHFISNSWLMWLIINLVQMAPISAMVRMYIFFASFYYVWKSYVHVVDGCNSSTCMMCYKRNRATRVECTTIVNGVRRSFYVYANGGKGFCKLHNWNCVNCDTFCAGSTFISDEVARDLSLQFKRPINPTDQSSYIVDSVTVKNGSIHLYFDKAGQKTYERHSLSHFVNLDNLRANNTKGSLPINVIVFDGKSKCEESSAKSASVYYSQLMCQPILLLDQALVSDVGDSAEVAVKMFDAYVNTFSSTFNVPMEKLKTLVATAEAELAKNVSLDNVLSTFISAARQGFVDSDVETKDVVECLKLSHQSDIEVTGDSCNNYMLTYNKVENMTPRDLGACIDCSARHINAQVAKSHNIALIWNVKDFMSLSEQLRKQIRSAAKKNNLPFKLTCATTRQVVNVVTTKIALKGG

SEQ ID NO: 15971 - protein, 1946 aa, Artificial Sequence
  SARS-CoV-2__MT810895.1__non-structural protein 3 (NSP3)
MAPTKVTFGDDTVIEVQGYKSVNITFELDERIDKVLNEKCSAYTVELGTEVNEFACVVADAVIKTLQPVSELLTPLGIDLDEWSMATYYLFDESGEFKLASHMYCSFYPPDEDEEEGDCEEEEFEPSTQYEYGTEDDYQGKPLEFGATSAALQPEEEQEEDWLDDDSQQTVGQQDGSEDNQTTTIQTIVEVQPQLEMELTPVVQTIEVNSFSGYLKLTDNVYIKNADIVEEAKKVKPTVVVNAANVYLKHGGGVAGALNKATNNAMQVESDDYIATNGPLKVGGSCVLSGHNLAKHCLHVVGPNVNKGEDIQLLKSAYENFNQHEVLLAPLLSAGIFGADPIHSLRVCVDTVRTNVYLAVFDKNLYDKLVSSFLEMKSEKQVEQKIAEIPKEEVKPFITESKPSVEQRKQDDKKIKACVEEVTTTLEETKFLTENLLLYIDINGNLHPDSATLVSDIDITFLKKDAPYIVGDVVQEGVLTAVVIPTKKAGGTTEMLAKALRKVPTDNYITTYPGQGLNGYTVEEAKTVLKKCKSAFYILPSIISNEKQEILGTVSWNLREMLAHAEETRKLMPVCVETKAIVSTIQCKYKGIKIQEGVVDYGARFYFYTSKTTVASLINTLNDLNETLVTMPLGYVTHGLNLEEAARYMRSLKVPATVSVSSPDAVTAYNGYLTSSSKTPEEHFIETISLAGSYKDWSYSGQSTQLGIEFLKRGDKSVYYTSNPTTFHLDGEVITFDNLKTLLSLREVRTIKVFTTVDNINLHTQVVDMSMTYGQQFGPTYLDGADVTKIKPHNSHEGKTFYVLPNDDTLRVEAFEYYHTTDPSFLGRYMSALNHTKKWKYPQVNGLTSIKWADNNCYLATALLTLQQIELKFNPPALQDAYYRARAGEAANFCALILAYCNKTVGELGDVRETMSYLFQHANLDSCKRVLNVVCKTCGQQQTTLKGVEAVMYMGTLSYEQFKKGVQIPCTCGKQATKYLVQQESPFVMMSAPPAQYELKHGTFTCASEYTGNYQCGHYKHITSKETLYCIDGALLTKSSEYKGPITDVFYKENSYTTTIKPVTYKLDGVVCTEIDPKLDNYYKKDNSYFTEQPIDLVPNQPYPNASFDNFKFVCDNIKFADDLNQLTGYKKPASRELKVTFFPDLNGDVVAIDYKHYTPSFKKGAKLLHKPIVWHVNNATNKATYKPNTWCIRCLWSTKPVETSNSFDVLKSEDAQGMDNLACEDLKPVSEEVVENPTIQKDVLECNVKTTEVVGDIILKPANNSLKITEEVGHTDLMAAYVDNSSLTIKKPNELSRVLGLKTLATHGLAAVNSVPWDTIANYAKPFLNKVVSTTTNIVTRCLNRVCTNYMPYFFTLLLQLCTFTRSTNSRIKASMPTTIAKNTVKSVGKFCLEASFNYLKSPNFSKLINIIIWFLLLSVCLGSLIYSTAALGVLMSNLGMPSYCTGYREGYLNSTNVTIATYCTGSIPCSVCLSGLDSLDTYPSLETIQITISSFKWDLTAFGLVAEWFLAYILFTRFFYVLGLAAIMQLFFSYFAVHFISNSWLMWLIINLVQMAPISAMVRMYIFFASFYYVWKSYVHVVDGCNSSTCMMCYKRNRATRVECTTIVNGVRRSFYVYANGGKGFCKLHNWNCVNCDTFCAGSTFISDEVARDLSLQFKRPINPTDQSSYIVDSVTVKNGSIHLYFDKAGQKTYERHSLSHFVNLDNLRANNTKGSLPINVIVFDGKSKCEESSAKSASVYYSQLMCQPILLLDQALVSDVGDSAEVAVKMFDAYVNTFSSTFNVPMEKLKTLVATAEAELAKNVSLDNVLSTFISAARQGFVDSDVETKDVVECLKLSHQSDIEVTGDSCNNYMLTYNKVENMTPRDLGACIDCSARHINAQVAKSHNIALIWNVKDFMSLSEQLRKQIRSAAKKNNLPFKLTCATTRQVVNVVTTKIALKGG

SEQ ID NO: 15972 - protein, 1946 aa, Artificial Sequence
  SARS-CoV-2__MT810916.1__non-structural protein 3 (NSP3)
MAPTKVTFGDDTVIEVQGYKSVNITFELDERIDKVLNEKCSAYTVELGTEVNEFACVVADAVIKTLQPVSELLTPLGIDLDEWSMATYYLFDESGEFKLASHMYCSFYPPDEDEEEGDCEEEEFEPSTQYEYGTEDDYQGKPLEFGATSAALQPEEEQEEDWLDDDSQQTVGQQDGSEDNQTTTIQTIVEVQPQLEMELTPVVQTIEVNSFSGYLKLTDNVYIKNADIVEEAKKVKPTVVVNAANVYLKHGGGVAGALNKATNNAMQVESDDYIATNGPLKVGGSCVLSGHNLAKHCLHVVGPNVNKGEDIQLLKSAYENFNQHEVLLAPLLSAGIFGADPIHSLRVCVDTVRTNVYLAVFDKNLYDKLVSSFLEMKSEKQVEQKIAEIPKEEVKPFITESKPSVEQRKQDDKKIKACVEEVTTTLEETKFLTENLLLYIDINGNLHPDSATLVSDIDITFLKKDAPYIVGDVVQEGVLTAVVIPTKKAGGTTEMLAKALRKVPTDNYITTYPGQGLNGYTVEEAKTVLKKCKSAFYILPSIISNEKQEILGTVSWNLREMLAHAEETRKLMPVCVETKAIVSTIQRKYKGIKIQEGVVDYGARFYFYTSKTTVASLINTLNDLNETLVTMPLGYVTHGLNLEEAARYMRSLKVPATVSVSSPDAVTAYNGYLTSSSKTPEEHFIETISLAGSYKDWSYSGQSTQLGIEFLKRGDKSVYYTSNPTTFHLDGEVITFDNLKTLLSLREVRTIKVFTTVDNINLHTQVVDMSMTYGQQFGPTYLDGADVTKIKPHNSHEGKTFYVLPNDDTLRVEAFEYYHTTDPSFLGRYMSALNHTKKWKYPQVNGLTSIKWADNNCYLATALLTLQQIELKFNPPALQDAYYRARAGEAANFCALILAYCNKTVGELGDVRETMSYLFQHANLDSCKRVLNVVCKTCGQQQTTLKGVEAVMYMGTLSYEQFKKGVQIPCTCGKQATKYLVQQESPFVMMSAPPAQYELKHGTFTCASEYTGNYQCGHYKHITSKETLYCIDGALLTKSSEYKGPITDVFYKENSYTTTIKPVTYKLDGVVCTEIDPKLDNYYKKDNSYFTEQPIDLVPNQPYPNASFDNFKFVCDNIKFADDLNQLTGYKKPASRELKVTFFPDLNGDVVAIDYKHYTPSFKKGAKLLHKPIVWHVNNVTNKATYKPNTWCIRCLWSTKPVETSNSFDVLKSEDAQGMDNLACEDLKPVSEEVVENPTIQKDVLECNVKTTEVVGDIILKPANNSLKITEEVGHTDLMAAYVDNSSLTIKKPNELSRVLGLKTLATHGLAAVNSVPWDTIANYAKPFLNKVVSTTTNIVTRCLNRVCTNYMPYFFTLLLQLCTFTRSTNSRIKASMPTTIAKNTVKSVGKFCLEASFNYLKSPNFSKLINIIIWFLLLSVCLGSLIYSTAALGVLMSNLGMPSYCTGYREGYLNSTNVTIATYCTGSIPCSVCLSGLDSLDTYPSLETIQITISSFKWDLTAFGLVAEWFLAYILFTRFFYVLGLAAIMQLFFSYFAVHFISNSWLMWLIINLVQMAPISAMVRMYIFFASFYYVWKSYVHVVDGCNSSTCMMCYKRNRATRVECTTIVNGVRRSFYVYANGGKGFCKLHNWNCVNCDTFCAGSTFISDEVARDLSLQFKRPINPTDQSSYIVDSVTVKNGSIHLYFDKAGQKTYERHSLSHFVNLDNLRANNTKGSLPINVIVFDGKSKCEESSAKSASVYYSQLMCQPILLLDQALVSDVGDSAEVAVKMFDAYVNTFSSTFNVPMEKLKTLVATAEAELAKNVSLDNVLSTFISAARQGFVDSDVETKDVVECLKLSHQSDIEVTGDSCNNYMLTYNKVENMTPRDLGACIDCSARHINAQVAKSHNIALIWNVKDFMSLSEQLRKQIRSAAKKNNLPFKLTCATTRQVVNVVTTKIALKGG

SEQ ID NO: 15973 - protein, 1946 aa, Artificial Sequence
  SARS-CoV-2__MT810930.1__non-structural protein 3 (NSP3)
MAPTKVTFGDDTVIEVQGYKSVNITFELDERIDKVLNEKCSAYTVELGTEVNEFACVVADAVIKTLQPVSELLTPLGIDLDEWSMATYYLFDESGEFKLASHMYCSFYPPDEDEEEGDCEEEEFEPSTQYEYGTEDDYQGKPLEFGATSAALQPEEEQEEDWLDDDSQQTVGQQDGSEDNQTTTIQTIVEVQPQLEMELTPVVQTIEVNSFSGYLKLTDNVYIKNADIVEEAKKVKPTVVVNAANVYLKHGGGVAGALNKATNNAMQVESDDYIATNGPLKVGGSCVLSGHNLAKHCLHVVGPNVNKGEDIQLLKSAYENFNQHEVLLAPLLSAGIFGADPIHSLRVCVDTVRTNVYLAVFDKNLYDKLVSSFLEMKSEKQVEQKIAEIPKEEVKPFITESKPSVEQRKQDDKKIKACVEEVTTTLEETKFLTENLLLYIDINGNLHPDSATLVSDIDITFLKKDAPYIVGDVVQEGVLTAVVIPTKKAGGTTDMLAKALRKVPTDNYITTYPGQGLNGYTVEEAKTVLKKCKSAFYILPSIISNEKQEILGTVSWNLREMLAHAEETRKLMPVCVETKAIVSTIQRKYKGIKIQEGVVDYGARFYFYTSKTTVASLINTLNDLNETLVTMPLGYVTHGLNLEEAARYMRSLKVPATVSVSSPDAVTAYNGYLTSSSKTPEEHFIETISLAGSYKDWSYSGQSTQLGIEFLKRGDKSVYYTSNPTTFHLDGEVITFDNLKTLLSLREVRTIKVFTTVDNINLHTQVVDMSMTYGQQFGPTYLDGADVTKIKPHNSHEGKTFYVLPNDDTLRVEAFEYYHTTDPSFLGRYMSALNHTKKWKYPQVNGLTSIKWADNNCYLATALLTLQQIELKFNPPALQDAYYRARAGEAANFCALILAYCNKTVGELGDVRETMSYLFQHANLDSCKRVLNVVCKTCGQQQTTLKGVEAVMYMGTLSYEQFKKGVQIPCTCGKQATKYLVQQESPFVMMSAPPAQYELKHGTFTCASEYTGNYQCGHYKHITSKETLYCIDGALLTKSSEYKGPITDVFYKENSYTTTIKPVTYKLDGVVCTEIDPKLDNYYKKDNSYFTEQPIDLVPNQPYPNASFDNFKFVCDNIKFADDLNQLTGYKKPASRELKVTFFPDLNGDVVAIDYKHYTPSFKKGAKLLHKPIVWHVNNATNKATYKPNTWCIRCLWSTKPVETSNSFDVLKSEDAQGMDNLACEDLKPVSEEVVENPTIQKDVLECNVKTTEVVGDIILKPANNSLKITEEVGHTDLMAAYVDNSSLTIKKPNELSRVLGLKTLATHGLAAVNSVPWDTIANYAKPFLNKVVSTTTNIVTRCLNRVCTNYMPYFFTLLLQLCTFTRSTNSRIKASMPTTIAKNTVKSVGKFCLEASFNYLKSPNFSKLINIIIWFLLLSVCLGSLIYSTAALGVLMSNLGMPSYCTGYREGYLNSTNVTIATYCTGSIPCSVCLSGLDSLDTYPSLETIQITISSFKWDLTAFGLVAEWFLAYILFTRFFYVLGLAAIMQLFFSYFAVHFISNSWLMWLIINLVQMAPISAMVRMYIFFASFYYVWKSYVHVVDGCNSSTCMMCYKRNRATRVECTTIVNGVRRSFYVYANGGKGFCKLHNWNCVNCDTFCAGSTFISDEVARDLSLQFKRPINPTDQSSYIVDSVTVKNGSIHLYFDKAGQKTYERHSLSHFVNLDNLRANNTKGSLPINVIVFDGKSKCEESSAKSASVYYSQLMCQPILLLDQALVSDVGDSAEVAVKMFDAYVNTFSSTFNVPMEKLKTLVATAEAELAKNVSLDNVLSTFISAARQGFVDSDVETKDVVECLKLSHQSDIEVTGDSCNNYMLTYNKVENMTPRDLGACIDCSARHINAQVAKSHNIALIWNVKDFMSLSEQLRKQIRSAAKKNNLPFKLTCATTRQVVNVVTTKIALKGG

SEQ ID NO: 15974 - protein, 1946 aa, Artificial Sequence
  SARS-CoV-2__MT810941.1__non-structural protein 3 (NSP3)
MAPTKVTFGDDTVIEVQGYKSVNITFELDERIDKVLNEKCSAYTVELGTEVNEFACVVADAVIKTLQPVSELLTPLGIDLDEWSMATYYLFDESGEFKLASHMYCSFYPPDEDEEEGDCEEEEFEPSTQYEYGTEDDYQGKPLEFGATSAALQPEEEQEEDWLDDDSQQTVGQQDGSEDNQTTTIQTIVEVQPQLEMELTPVVQTIEVNSFSGYLKLTDNVYIKNADIVEEAKKVKPTVVVNAANVYLKHGGGVAGALNKATNNAMQVESDDYIATNGPLKVGGSCVLSGHNLAKHCLHVVGPNVNKGEDIQLLKSAYENFNQHEVLLAPLLSAGIFGADPIHSLRVCVDTVRTNVYLAVFDKNLYDKLVSSFLEMKSEKQVEQKIAEIPKEEVKPFITESKPSVEQRKQDDKKIKACVEEVTTTLEETKFLTENLLLYIDINGNLHPDSATLVSDIDITFLKKDAPYIVGDVVQEGVLTAVVIPTKKAGGTTEMLAKALRKVPTDNYITTYPGQGLNGYTVEEAKTVLKKCKSAFYILPSIISNEKQEILGTVSWNLREMLAHAEETRKLMPVCVETKAIVSTIQRKYKGIKIQEGVVDYGARFYFYTSKTTVASLINTLNDLNETLVTMPLGYVTHGLNLEEAARYMRSLKVPATVSVSSPDAVTAYNGYLTSSSKTPEEHFIETISLAGSYKDWSYSGQSTQLGIEFLKRGDKSVYYTSNPTTFHLDGEVITFDNLKTLLSLREVRTIKVFTTVDNINLHTQVVDMSMTYGQQFGPTYLDGADVTKIKPHNSHEGKTFYVLPNDDTLRVEAFEYYHTTDPSFLGRYMSALNHTKKWKYPQVNGLTSIKWADNNCYLATALLTLQQIELKFNPPALQDAYYRARAGEAANFCALVLAYCNKTVGELGDVRETMSYLFQHANLDSCKRVLNVVCKTCGQQQTTLKGVEAVMYMGTLSYEQFKKGVQIPCTCGKQATKYLVQQESPFVMMSAPPAQYELKHGTFTCASEYTGNYQCGHYKHITSKETLYCIDGALLTKSSEYKGPITDVFYKENSYTTTIKPVTYKLDGVVCTEIDPKLDNYYKKDNSYFTEQPIDLVPNQPYPNASFDNFKFVCDNIKFADDLNQLTGYKKPASRELKVTFFPDLNGDVVAIDYKHYTPSFKKGAKLLHKPIVWHVNNATNKATYKPNTWCIRCLWSTKPVETSNSFDVLKSEDAQGMDNLACEDLKPVSEEVVENPTIQKDVLECNVKTTEVVGDIILKPANNSLKITEEVGHTDLMAAYVDNSSLTIKKPNELSRVLGLKTLATHGLAAVNSVPWDTIANYAKPFLNKVVSTTTNIVTRCLNRVCTNYMPYFFTLLLQLCTFTRSTNSRIKASMPTTIAKNTVKSVGKFCLEASFNYLKSPNFSKLINIIIWFLLLSVCLGSLIYSTAALGVLMSNLGMPSYCTGYREGYLNSTNVTIATYCTGSIPCSVCLSGLDSLDTYPSLETIQITISSFKWDLTAFGLVAEWFLAYILFTRFFYVLGLAAIMQLFFSYFAVHFISNSWLMWLIINLVQMAPISAMVRMYIFFASFYYVWKSYVHVVDGCNSSTCMMCYKRNRATRVECTTIVNGVRRSFYVYANGGKGFCKLHNWNCVNCDTFCAGSTFISDEVARDLSLQFKRPINPTDQSSYIVDSVTVKNGSIHLYFDKAGQKTYERHSLSHFVNLDNLRANNTKGSLPINVIVFDGKSKCEESSAKSASVYYSQLMCQPILLLDQALVSDVGDSAEVAVKMFDAYVNTFSSTFNVPMEKLKTLVATAEAELANNVSLDNVLSTFISAARQGFVDSDVETKDVVECLKLSHQSDIEVTGDSCNNYMLTYNKVENMTPRDLGACIDCSARHINAQVAKSHNIALIWNVKDFMSLSEQLRKQIRSAAKKNNLPFKLTCATTRQVVNVVTTKIALKGG

SEQ ID NO: 15975 - protein, 1946 aa, Artificial Sequence
  SARS-CoV-2__MT810979.1__non-structural protein 3 (NSP3)
MAPTKVTFGDDTVIEVQGYKSVNITFELDERIDKVLNEKCSAYTVELGTEVNEFACVVADAVIKTLQPVSELLTPLGIDLDEWSMATYYLFDESGEFKLASHMYCSFYPPDEDEEEGDCEEEEFEPSTQYEYGTEDDYQGKPLEFGATSAALQPEEEQEEDWLDDDSQQTVGQQDGSEDNQTTTIQTIVEVQPQLEMELTPVVQTIEVNSFSGYLKLTDNVYIKNADIVEEAKKVKPTVVVNAANVYLKHGGGVAGALNKATNNAMQVESDDYIATNGPLKVGGSCVLSGHNLAKHCLHVVGPNVNKGEDIQLLKSAYENFNQHEVLLAPLLSAGIFGADPIHSLRVCVDTVRTNVYLAVFDKNLYDKLVSSFLEMKSEKQVEQKIAEIPKEEVKPFITESKPSVEQRKQDDKKIKACVEEVTTTLEETKFLTENLLLYIDINGNLHPDSATLVSDIDITFLKKDAPYIVGDVVQEGVLTAVVIPTKKAGGTTEMLAKALRKVPTDNYITTYPGQGLNGYTVEEAKTVLKKCKSAFYILPSIISNEKQEILGTVSWNLREMLAHAEETRKLMPVCVETKAIVSTIQRKYKGIKIQEGVVDYGARFYFYTSKTTVASLINTLNDLNETLVTMPLGYVTHGLNLEEAARYMRSLKVPATVSVSSPDAVTAYNGYLTSSSKTPEEHFIETISLAGSYKDWSYSGQSTQLGIEFLKRGDKSVYYTSNPTTFHLDGEVITFDNLKTLLSLREVRTIKVFTTVDNINLHTQVVDMSMTYGQQFGPTYLDGADVTKIKPHNSHEGKTFYVLPNDDTLRVEAFEYYHTTDPSFLGRYMSALNHTKKWKYPQVNGLTSIKWADNNCYLATALLTLQQIELKFNPPALQDAYYRARAGEAANFCALILAYCNKTVGELGDVRETMSYLFQHANLDSCKRVLNVVCKTCGQQQTTLKGVEAVMYMGTLSYEQFKKGVQIPCTCGKQATKYLVQQESPFVMMSAPPAQYELKHGTFTCASEYTGNYQCGHYKHITSKETLYCIDGALLTKSSEYKGPITDVFYKENSYTTTIKPVTYKLDGVVCTEIDPKLDNYYKKDNSYFTEQPIDLVPNQPYPNASFDNFKFVCDNIKFADDLNQLTGYKKPASRELKVTFFPDLNGDVVAIDYKHYTPSFKKGAKLLHKPIVWHVNNATNKATYKPNTWCIRCLWSTKPVETSNSFDVLKSEDAQGMDNLACEDLKPVSEEVVENPTIQKDVLECNVKTTEVVGDIILKPANNSLKITEEVGHTDLMAAYVDNSSLTIKKPNELSRVLGLKTFATHGLAAVNSVPWDTIANYAKPFLNKVVSTTTNIVTRCLNRVCTNYMPYFFTLLLQLCTFTRSTNSRIKASMPTTIAKNTVKSVGKFCLEASFNYLKSPNFSKLINIIIWFLLLSVCLGSLIYSTAALGVLMSNLGMPSYCTGYREGYLNSTNVTIATYCTGSIPCSVCLSGLDSLDTYPSLETIQITISSFKWDLTAFGLVAEWFLAYILFTRFFYVLGLAAIMQLFFSYFAVHFISNSWLMWLIINLVQMAPISAMVRMYIFFASFYYVWKSYVHVVDGCNSSTCMMCYKRNRATRVECTTIVNGVRRSFYVYANGGKGFCKLHNWNCVNCDTFCAGSTFISDEVARDLSLQFKRPINPTDQSSYIVDSVTVKNGSIHLYFDKAGQKTYERHSLSHFVNLDNLRANNTKGSLPINVIVFDGKSKCEESSAKSASVYYSQLMCQPILLLDQALVSDVGDSAEVAVKMFDAYVNTFSSTFNVPMEKLKTLVATAEAELAKNVSLDNVLSTFISAARQGFVDSDVETKDVVECLKLSHQSDIEVTGDSCNNYMLTYNKVENMTPRDLGACIDCSARHINAQVAKSHNIALIWNVKDFMSLSEQLRKQIRSAAKKNNLPFKLTCATTRQVVNVVTTKIALKGG

SEQ ID NO: 15976 - protein, 1946 aa, Artificial Sequence
  SARS-CoV-2__MT810984.1__non-structural protein 3 (NSP3)
MAPTKVTFGDDTVIEVQGYKSVNITFELDERIDKVLNEKCSAYTVELGTEVNEFACVVADAVIKTLQPVSELLTPLGIDLDEWSMATYYLFDESGEFKLASHMYCSFYPPDEDEEEGDCEEEEFEPSTQYEYGTEDDYQGKPLEFGATSAALQPEEEQEEDWLDDDSQQTVGQQDGSEDNQTTTIQTIVEVQPQLEMELTPVVQTIEVNSFSGYLKLTDNVYIKNADIVEEAKKVKPTVVVNAANVYLKHGGGVAGALNKATNNAMQVESDDYIATNGPLKVGGSCVLSGHNLAKHCLHVVGPNVNKGEDIQLLKSAYENFNQHEVLLAPLLSAGIFGADPIHSLRVCVDTVRTNVYLAVFDKNLYDKLVSSFLEMKSEKQVEQKIAEIPKEEVKPFITESKPSVEQRKQDDKKIKACVEEVTTTLEETKFLTENLLLYIDINGNLHPDSATLVSDIDITFLKKDAPYIVGDVVQEGVLTAVVIPTKKAGGTTEMLAKALRKVPTDNYITTYPGQGLNGYTVEEAKTVLKKCKSVFYILPSIISNEKQEILGTVSWNLREMLAHAEETRKLMPVCVETKAIVSTIQRKYKGIKIQEGVVDYGARFYFYTSKTTVASLINTLNDLNETLVTMPLGYVTHGLNLEEAARYMRSLKVPATVSVSSPDAVTAYNGYLTSSSKTPEEHFIETISLAGSYKDWSYSGQSTQLGIEFLKRGDKSVYYTSNPTTFHLDGEVITFDNLKTLLSLREVRTIKVFTTVDNINLHTQVVDMSMTYGQQFGPTYLDGADVTKIKPHNSHEGKTFYVLPNDDTLRVEAFEYYHTTDPSFLGRYMSALNHTKKWKYPQVNGLTSIKWADNNCYLATALLTLQQIELKFNPPALQDAYYRARAGEAANFCALILAYCNKTVGELGDVRETMSYLFQHANLDSCKRVLNVVCKTCGQQQTTLKGVEAVMYMGTLSYEQFKKGVQIPCTCGKQATKYLVQQESPFVMMSAPPAQYELKHGTFTCASEYTGNYQCGHYKHITSKETLYCIDGALLTKSSEYKGPITDVFYKENSYTTTIKPVTYKLDGVVCTEIDPKLDNYYKKDNSYFTEQPIDLVPNQPYPNASFDNFKFVCDNIKFADDLNQLTGYKKPASRELKVTFFPDLNGDVVAIDYKHYTPSFKKGAKLLHKPIVWHVNNATNKATYKPNTWCIRCLWSTKPVETSNSFDVLKSEDAQGMDNLACEDLKPVSEEVVENPTIQKDVLECNVKTTEVVGDIILKPANNSLKITEEVGHTDLMAAYVDNSSLTIKKPNELSRVLGLKTLATHGLAAVNSVPWDTIANYAKPFLNKVVSTTTNIVTRCLNRVCTNYMPYFFTLLLQLCTFTRSTNSRIKASMPTTIAKNTVKSVGKFCLEASFNYLKSPNFSKLINIIIWFLLLSVCLGSLIYSTAALGVLMSNLGMPSYCTGYREGYLNSTNVTIATYCTGSIPCSVCLSGLDSLDTYPSLETIQITISSFKWDLTAFGLVAEWFLAYILFTRFFYVLGLAAIMQLFFSYFAVHFISNSWLMWLIINLVQMAPISAMVRMYIFFASFYYVWKSYVHVVDGCNSSTCMMCYKRNRATRVECTTIVNGVRRSFYVYANGGKGFCKLHNWNCVNCDTFCAGSTFISDEVARDLSLQFKRPINPTDQSSYIVDSVTVKNGSIHLYFDKAGQKTYERHSLSHFVNLDNLRANNTKGSLPINVIVFDGKSKCEESSAKSASVYYSQLMCQPILLLDQALVSDVGDSAEVAVKMFDAYVNTFSSTFNVPMEKLKTLVATAEAELAKNVSLDNVLSTFISAARQGFVDSDVETKDVVECLKLSHQSDIEVTGDSCNNYMLTYNKVENMTPRDLGACIDCSARHINAQVAKSHNIALIWNVKDFMSLSEQLRKQIRSAAKKNNLPFKLTCATTRQVVNVVTTKIALKGG

SEQ ID NO: 15977 - protein, 1946 aa, Artificial Sequence
  SARS-CoV-2__MT810985.1__non-structural protein 3 (NSP3)
MAPTKVTFGDDTVIEVQGYKSVNITFELDERIDKVLNEKCSAYTVELGTEVNEFACVVADAVIKTLQPVSELLTPLGIDLDEWSMATYYLFDESGEFKLASHMYCSFYPPDEDEEEGDCEEEEFEPSTQYEYGTEDDYQGKPLEFGATSAALQPEEEQEEDWLDDDSQQTVGQQDGSEDNQTTTIQTIVEVQPQLEMELTPVVQTIEVNSFSGYLKLTDNVYIKNADIVEEAKKVKPTVVVNAANVYLKHGGGVAGALNKATNNAMQVESDDYIATNGPLKVGGSCVLSGHNLAKHCLHVVGPNVNKGEDIQLLKSAYENFNQHEVLLAPLLSAGIFGADPIHSLRVCVDTVRTNVYLAVFDKNLYDKLVSSFLEMKSEKQVEQKIAEIPKEEVKPFITESKPSVEQRKQDDKKIKACVEEVTTTLEETKFLTENLLLYIDINGNLHPDSATLVSDIDITFLKKDAPYIVGDVIQEGVLTAVVIPTKKAGGTTEMLAKALRKVPTDNYITTYPGQGLNGYTVEEAKTVLKKCKSAFYILPSIISNEKQEILGTVSWNLREMLAHAEETRKLMPVCVETKAIVSTIQRKYKGIKIQEGVVDYGARFYFYTSKTTVASLINTLNDLNETLVTMPLGYVTHGLNLEEAARYMRSLKVPATVSVSSPDAVTAYNGYLTSSSKTPEEHFIETISLAGSYKDWSYSGQSTQLGIEFLKRGDKSVYYTSNPTTFHLDGEVITFDNLKTLLSLREVRTIKVFTTVDNINLHTQVVDMSMTYGQQFGPTYLDGADVTKIKPHNSHEGKTFYVLPNDDTLRVEAFEYYHTTDPSFLGRYMSALNHTKKWKYPQVNGLTSIKWADNNCYLATALLTLQQIELKFNPPALQDAYYRARAGEAANFCALILAYCNKTVGELGDVRETMSYLFQHANLDSCKRVLNVVCKTCGQQQTTLKGVEAVMYMGTLSYEQFKKGVQIPCTCGKQATKYLVQQESPFVMMSAPPAQYELKHGTFTCASEYTGNYQCGHYKHITSKETLYCIDGALLTKSSEYKGPITDVFYKENSYTTTIKPVTYKLDGVVCTEIDPKLDNYYKKDNSYFTEQPIDLVPNQPYPNASFDNFKFVCDNIKFADDLNQLTGYKKPASRELKVTFFPDLNGDVVAIDYKHYTPSFKKGAKLLHKPIVWHVNNATNKATYKPNTWCIRCLWSTKPVETSNSFDVLKSEDAQGMDNLACEDLKPVSEEVVENPTIQKDVLECNVKTTEVVGDIILKPANNSLKITEEVGHTDLMAAYVDNSSLTIKKPNELSRVLGLKTLATHGLAAVNSVPWDTIANYAKPFLNKVVSTTTNIVTRCLNRVCTNYMPYFFTLLLQLCTFTRSTNSRIKASMPTTIAKNTVKSVGKFCLEASFNYLKSPNFSKLINIIIWFLLLSVCLGSLIYSTAALGVLMSNLGMPSYCTGYREGYLNSTNVTIATYCTGSIPCSVCLSGLDSLDTYPSLETIQITISSFKWDLTAFGLVAEWFLAYILFTRFFYVLGLAAIMQLFFSYFAVHFISNSWLMWLIINLVQMAPISAMVRMYIFFASFYYVWKSYVHVVDGCNSSTCMMCYKRNRATRVECTTIVNGVRRSFYVYANGGKGFCKLHNWNCVNCDTFCAGSTFISDEVARDLSLQFKRPINPTDQSSYIVDSVTVKNGSIHLYFDKAGQKTYERHSLSHFVNLDNLRANNTKGSLPINVIVFDGKSKCEESSAKSASVYYSQLMCQPILLLDQALVSDVGDSAEVAVKMFDAYVNTFSSTFNVPMEKLKTLVATAEAELAKNVSLDNVLSTFISAARQGFVDSDVETKDVVECLKLSHQSDIEVTGDSCNNYMLTYNKVENMTPRDLGACIDCSARHINAQVAKSHNIALIWNVKDFMSLSEQLRKQIRSAAKKNNLPFKLTCATTRQVVNVVTTKIALKGG

SEQ ID NO: 15978 - protein, 1946 aa, Artificial Sequence
  SARS-CoV-2__MT811197.1__non-structural protein 3 (NSP3)
MAPTKVTFGDDTVIEVQGYKSVNITFELDERIDKVLNEKCSAYTVELGTEVNEFACVVADAVIKTLQPVSELLTPLGIDLDEWSMATYYLFDESGEFKLASHMYCSFYPPDEDEEEGDCEEEEFEPSTQYEYGTEDDYQGKPLEFGATSAALQPEEEQEEDWLDDDSQQTVGQQDGSEDNQTTTIQTIVEVQPQLEMELTPVVQTIEVNSFSGYLKLTDNVYIKNADIVEEAKKVKPTVVVNAANVYLKHGGGVAGALNKATNNAMQVESDDYIATNGPLKVGGSCVLSGHNLAKHCLHVVGPNVNKGEDIQLLKSAYENFNQHEVLLAPLLSAGIFGADPIHSLRVCVDTVRTNVYLAVFDKNLYDKLVSSFLEMKSEKQVEQKIAEIPKEEVKPFITESKPSVEQRKQDDKKIKACVEEVTTTLEETKFLTENLLLYIDINGNLHPDSATLVSDIDITFLKKDAPYIVGDVVQEGVLTAVVIPTKKAGGTTEMLAKALRKVPTDNYITTYPGQGLNGYTVEEAKTVLKKCKSAFYILPSIISNEKQEILGTVSWNLREMLAHAEETRKLMPVCVETKAIVSTIQRKYKGIKIQEGVVDYGARFYFYTSKTTVASLINTLNDLNETLVTMPLGYVTHGLNLEEAARYMRSLKVPATVSVSSPDAVTAYNGYLTSSSKTPEEHFIETISLAGSYKDWSYSGQSTQLGIEFLKRGDKSVYYTSNPTTFHLDGEVITFDNLKTLLSLREVRTIKVFTTVDNINLHTQVVDMSMTYGQQFGPTYLDGADVTKIKPHNSHEGKTFYVLPNDDTLRVEAFEYYHTTDPSFLGRYMSALNHTKKWKYPQVNGLTSIKWADNNCYLATALLTLQQIELKFNPPALQDAYYRARAGEAANFCALILAYCNKTVGELGDVRETMSYLFQHANLDSCKRVLNVVCKTCGQQQTTLKGVEAVMYMGTLSYEQFKKGVQIPCTCGKQATKYLVQQESPFVMMSAPPAQYELKHGTFTCASEYTGNYQCGHYKHITSKETLYCIDGALLTKSSEYKGPITDVFYKENSYTTTIKPVTYKLDGVVCTEIDPKLDNYYKKDNSYFTEQPIDLVPNQPYPNASFDNFKFVCDNIKFADDLNQLTGYKKPASRELKVTFFPDLNGDVVAIDYKHYTPSFKKGAKLLHKPIVWHVNNATNKATYKPNTWCIRCLWSTKPVETSNSFDVLKSEDAQGMDNLACEDLKPVSEEVVENPTIQKDVLECNVKTTEVVGDIILKPANNSLKITEEVGHTDLMAAYVDNSSLTIKKPNELSRVLGLKTLATHGLAAVNSVPWDTIANYAKPFLNKVVSTTTNIVTRCLNRVCTNYMPYFFTLLLQLCTFTRSTNSRIKASMPTTIAKNTVKSVGKFCLEASFNYLKSPNFSKLINIIIWFLLLSVCLGSLIYSTAALGVLMSNLGMPSYCTGYREGYLNSTNVTIATYCTGFIPCSVCLSGLDSLDTYPSLETIQITISSFKWDLTAFGLVAEWFLAYILFTRFFYVLGLAAIMQLFFSYFAVHFISNSWLMWLIINLVQMAPISAMVRMYIFFASFYYVWKSYVHVVDGCNSSTCMMCYKRNRATRVECTTIVNGVRRSFYVYANGGKGFCKLHNWNCVNCDTFCAGSTFISDEVARDLSLQFKRPINPTDQSSYIVDSVTVKNGSIHLYFDKAGQKTYERHSLSHFVNLDNLRANNTKGSLPINVIVFDGKSKCEESSAKSASVYYSQLMCQPILLLDQALVSDVGDSAEVAVKMFDAYVNTFSSTFNVPMEKLKTLVATAEAELAKNVSLDNVLSTFISAARQGFVDSDVETKDVVECLKLSHQSDIEVTGDSCNNYMLTYNKVENMTPRDLGACIDCSARHINAQVAKSHNIALIWNVKDFMSLSEQLRKQIRSAAKKNNLPFKLTCATTRQVVNVVTTKIALKGG

SEQ ID NO: 15979 - protein, 1946 aa, Artificial Sequence
  SARS-CoV-2__MT811244.1__non-structural protein 3 (NSP3)
MAPTKVTFGDDTVIEVQGYKSVNITFELDERIDKVLNEKCSAYTVELGTEVNEFACVVADAVIKTLQPVSELLTPLGIDLDEWSMATYYLFDESGEFKLASHMYCSFYPPDEDEEEGDCEEEEFEPSTQYEYGTEDDYQGKPLEFGATSAALQPEEEQEEDWLDDDSQQTVGQQDGSEDNQTTTIQTIVEVQPQLEMELTPVVQTIEVNSFSGYLKLTDNVYIKNADIVEEAKKVKPTVVVNAANVYLKHGGGVAGALNKATNNAMQVESDDYIATNGSLKVGGSCVLSGHNLAKHCLHVVGPNVNKGEDIQLLKSAYENFNQHEVLLAPLLSAGIFGADPIHSLRVCVDTVRTNVYLAVFDKNLYDKLVSSFLEMKSEKQVEQKIAEIPKEEVKPFITESKPSVEQRKQDDKKIKACVEEVTTTLEETKFLTENLLLYIDINGNLHPDSATLVSDIDITFLKKDAPYIVGDVVQEGVLTAVVIPTKKAGGTTEMLAKALRKVPTDNYITTYPGQGLNGYTVEEAKTVLKKCKSAFYILPSIISNEKQEILGTVSWNLREMLAHAEETRKLMPVCVETKAIVSTIQRKYKGIKIQEGVVDYGARFYFYTSKTTVASLINTLNDLNETLVTMPLGYVTHGLNLEEAARYMRSLKVPATVSVSSPDAVTAYNGYLTSSSKTPEEHFIETISLAGSYKDWSYSGQSTQLGIEFLKRGDKSVYYTSNPTTFHLDGEVITFDNLKTLLSLREVRTIKVFTTVDNINLHTQVVDMSMTYGQQFGPTYLDGADVTKIKPHNSHEGKTFYVLPNDDTLRVEAFEYYHTTDPSFLGRYMSALNHTKKWKYPQVNGLTSIKWADNNCYLATALLTLQQIELKFNPPALQDAYYRARAGEAANFCALILAYCNKTVGELGDVRETMSYLFQHANLDSCKRVLNVVCKTCGQQQTTLKGVEAVMYMGTLSYEQFKKGVQIPCTCGKQATKYLVQQESPFVMMSAPPAQYELKHGTFTCASEYTGNYQCGHYKHITSKETLYCIDGALLTKSSEYKGPITDVFYKENSYTTTIKPVTYKLDGVVCTEIDPKLDNYYKKDNSYFTEQPIDLVPNQPYPNASFDNFKFVCDNIKFADDLNQLTGYKKPASRELKVTFFPDLNGDVVAIDYKHYTPSFKKGAKLLHKPIVWHVNNATNKATYKPNTWCIRCLWSTKPVETSNSFDVLKSEDAQGMDNLACEDLKPVSEEVVENPTIQKDVLECNVKTTEVVGDIILKPANNSLKITEEVGHTDLMAAYVDNSSLTIKKPNELSRVLGLKTLATHGLAAVNSVPWDTIANYAKPFLNKVVSTTTNIVTRCLNRVCTNYMPYFFTLLLQLCTFTRSTNSRIKASMPTTIAKNTVKSVGKFCLEASFNYLKSPNFSKLINIIIWFLLLSVCLGSLIYSTAALGVLMSNLGMPSYCTGYREGYLNSTNVTIATYCTGSIPCSVCLSGLDSLDTYPSLETIQITISSFKWDLTAFGLVAEWFLAYILFTRFFYVLGLAAIMQLFFSYFAVHFISNSWLMWLIINLVQMAPISAMVRMYIFFASFYYVWKSYVHVVDGCNSSTCMMCYKRNRATRVECTTIVNGVRRSFYVYANGGKGFCKLHNWNCVNCDTFCAGSTFISDEVARDLSLQFKRPINPTDQSSYIVDSVTVKNGSIHLYFDKAGQKTYERHSLSHFVNLDNLRANNTKGSLPINVIVFDGKSKCEESSAKSASVYYSQLMCQPILLLDQALVSDVGDSAEVAVKMFDAYVNTFSSTFNVPMEKLKTLVATAEAELAKNVSLDNVLSTFISAARQGFVDSDVETKDVVECLKLSHQSDIEVTGDSCNNYMLTYNKVENMTPRDLGACIDCSARHINAQVAKSHNIALIWNVKDFMSLSEQLRKQIRSAAKKNNLPFKLTCATTRQVVNVVTTKIALKGG

SEQ ID NO: 15980 - protein, 1946 aa, Artificial Sequence
  SARS-CoV-2__MT811247.1__non-structural protein 3 (NSP3)
MAPTKVTFGDDTVIEVQGYKSVNITFELDERIDKVLNEKCSAYTVELGTEVNEFACVVADAVIKTLQPVSELLTPLGIDLDEWSMATYYLFDESGEFKLASHMYCSFYPPDEDEEEGDCEEEEFEPSTQYEYGTEDDYQGKPLEFGATSAALQPEEEQEEDWLDDDSQQTVGQQDGSEDNQTTTIQTIVEVQPQLEMELTPVVQTIEVNSFSGYLKLTDNVYIKNADIVEEAKKVKPTVVVNAANVYLKHGGGVAGALNKATNNAMQVESDDYIATNGPLKVGGSCVLSGHNLAKHCLHVVGPNVNKGEDIQLLKSAYENFNQHEVLLAPLLSAGIFGADPIHSLRVCVDTVRTNVYLAVFDKNLYDKLVSSFLEMKSEKQVEQKIAEIPKEEVKPFITESKPSVEQRKQDDKKIKACVEEVTTTLEETKFLTENLLLYIDINGNLHPDSATLVSDIDITFLKKDAPYIVGDVVQEGVLTAVVIPTKKAGGTTEMLAKALRKVPTDNYITTYPGQGLNGYTVEEAKTVLKKCKSAFYILPSIISNEKQEILGTVSWNLREMLAHAEETRKLMPVCVETKAIVSTIQRKYKGIKIQEGVVDYGARFYFYTSKTTVASLINTLNDLNETLVTMPLGYVTHGLNLEEAARYMRSLKVPATVSVSSPDAVTAYNGYLTSSSKTPEEHFIETISLAGSYKDWSYSGQSTQLGIEFLKRGDKSVYYTSNPTTFHLDGEVITFDNLKTLLSLREVRTIKVFTTVDNINLHTQVVDMSMTYGQQFGPTYLDGADVTKIKPHNSHEGKTFYVLPNDDTLRVEAFEYYHTTDPSFLGRYMSALNHTKKWKYPQVNGLTSIKWADNNCYLATALLTLQQIELKFNPPALQDAYYRARAGEAANFCALILAYCNKTVGELGDVRETMSYLFQHANLDSCKRVLNVVCKTCGQQQTTLKGVEAVMYMGTLSYEQFKKGVQIPCTCGKQATKYLVQQESPFVMMSAPPAQYELKHGTFTCASEYTGNYQCGHYKHITSKETLYCIDGALLTKSSEYKGPITDVFYKENSYTTTIKPVTYKLDGVVCTEIDPKLDNYYKKDNSYFTEQPIDLVPNQPYPNASFDNFKFVCDNIKFADDLNQLTGYKKPASRELKVTFFPDLNGDVVAIDYKHYTPSFKKGAKLLHKPIVWHVNNATNKATYKPNTWCIRCLWSTKPVETSNSFDVLKSEDAHGMDNLACEDLKPVSEEVVENPTIQKDVLECNVKTTEVVGDIILKPANNSLKITEEVGHTDLMAAYVDNSSLTIKKPNELSRVLGLKTLATHGLAAVNSVPWDTIANYAKPFLNKVVSTTTNIVTRCLNRVCTNYMPYFFTLLLQLCTFTRSTNSRIKASMPTTIAKNTVKSVGKFCLEASFNYLKSPNFSKLINIIIWFLLLSVCLGSLIYSTAALGVLMSNLGMPSYCTGYREGYLNSTNVTIATYCTGSIPCSVCLSGLDSLDTYPSLETIQITISSFKWDLTAFGLVAEWFLAYILFTRFFYVLGLAAIMQLFFSYFAVHFISNSWLMWLIINLVQMAPISAMVRMYIFFASFYYVWKSYVHVVDGCNSSTCMMCYKRNRATRVECTTIVNGVRRSFYVYANGGKGFCKLHNWNCVNCDTFCAGSTFISDEVARDLSLQFKRPINPTDQSSYIVDSVTVKNGSIHLYFDKAGQKTYERHSLSHFVNLDNLRANNTKGSLPINVIVFDGKSKCEESSAKSASVYYSQLMCQPILLLDQALVSDVGDSAEVAVKMFDAYVNTFSSTFNVPMEKLKTLVATAEAELAKNVSLDNVLSTFISAARQGFVDSDVETKDVVECLKLSHQSDIEVTGDSCNNYMLTYNKVENMTPRDLGACIDCSARHINAQVAKSHNIALIWNVKDFMSLSEQLRKQIRSAAKKNNLPFKLTCATTRQVVNVVTTKIALKGG

SEQ ID NO: 15981 - protein, 1946 aa, Artificial Sequence
  SARS-CoV-2__MT811254.1__non-structural protein 3 (NSP3)
MAPTKVTFGDDTVIEVQGYKSVNITFELDERIDKVLNEKCSAYTVELGTEVNEFACVVADAVIKTLQPVSELLTPLGIDLDEWSMATYYLFDESGEFKLASHMYCSFYPPDEDEEEGDCEEEEFEPSTQYEYGTEDDYQGKPLEFGATSAALQPEEEQEEDWLDDDSQQTVGQQDGSEDNQTTTIQTIVEVQPQLEMELTPVVQTIEVNSFSGYLKLTDNVYIKNADIVEEAKKVKPTVVVNAANVYLKHGGGVAGALNKATNNAMQVESDDYIATNGPLKVGGSCVLSGHNLAKHCLHVVGPNVNKGEDIQLLKSAYENFNQHEVLLAPLLSAGIFGADPIHSLRVCVDTVRTNVYLAVFDKNLYDKLVSSFLEMKSEKQVEQKIAEIPKEEVKPFITESKPSVEQRKQDDKKIKACVEEVTTTLEETKFLTENLLLYIDINGNLHPDSATLVSDIDITFLKKDAPYIVGDVVQEGVLTAVVIPTKKAGGTTEMLAKALRKVPTDNYITTYPGQGLNGYTVEEAKTVLKKCKSAFYILPSIISNEKQEILGTVSWNLREMLAHAEETRKLMPVCVETKAIVSTIQRKYKGIKIQEGVVDYGARFYFYTSKTTVASLINTLNDLNETLVTMPLGYVTHGLNLEEAARYMRSLKVPATVSVSSPDAVTAYNGYLTSSSKTSEEHFIETISLAGSYKDWSYSGQSTQLGIEFLKRGDKSVYYTSNPTTFHLDGEVITFDNLKTLLSLREVRTIKVFTTVDNINLHTQVVDMSMTYGQQFGPTYLDGADVTKIKPHNSHEGKTFYVLPNDDTLRVEAFEYYHTTDPSFLGRYMSALNHTKKWKYPQVNGLTSIKWADNNCYLATALLTLQQIELKFNPPALQDAYYRARAGEAANFCALILAYCNKTVGELGDVRETMSYLFQHANLDSCKRVLNVVCKTCGQQQTTLKGVEAVMYMGTLSYEQFKKGVQIPCTCGKQATKYLVQQESPFVMMSAPPAQYELKHGTFTCASEYTGNYQCGHYKHITSKETLYCIDGALLTKSSEYKGPITDVFYKENSYTTTIKPVTYKLDGVVCTEIDPKLDNYYKKDNSYFTEQPIDLVPNQPYPNASFDNFKFVCDNIKFADDLNQLTGYKKPASRELKVTFFPDLNGDVVAIDYKHYTPSFKKGAKLLHKPIVWHVNNATNKATYKPNTWCIRCLWSTKPVETSNSFDVLKSEDAQGMDNLACEDLKPVSEEVVENPTIQKDVLECNVKTTEVVGDIILKPANNSLKITEEVGHTDLMAAYVDNSSLTIKKPNELSRVLGLKTLATHGLAAVNSVPWDTIANYAKPFLNKVVSTTTNIVTRCLNRVCTNYMPYFFTLLLQLCTFTRSTNSRIKASMPTTIAKNTVKSVGKFCLEASFNYLKSPNFSKLINIIIWFLLLSVCLGSLIYSTAALGVLMSNLGMPSYCTGYREGYLNSTNVTIATYCTGSIPCSVCLSGLDSLDTYPSLETIQITISSFKWDLTAFGLVAEWFLAYILFTRFFYVLGLAAIMQLFFSYFAVHFISNSWLMWLIINLVQMAPISAMVRMYIFFASFYYVWKSYVHVVDGCNSSTCMMCYKRNRATRVECTTIVNGVRRSFYVYANGGKGFCKLHNWNCVNCDTFCAGSTFISDEVARDLSLQFKRPINPTDQSSYIVDSVTVKNGSIHLYFDKAGQKTYERHSLSHFVNLDNLRANNTKGSLPINVIVFDGKSKCEESSAKSASVYYSQLMCQPILLLDQALVSDVGDSAEVAVKMFDAYVNTFSSTFNVPMEKLKTLVATAEAELAKNVSLDNVLSTFISAARQGFVDSDVETKDVVECLKLSHQSDIEVTGDSCNNYMLTYNKVENMTPRDLGACIDCSARHINAQVAKSHNIALIWNVKDFMSLSEQLRKQIRSAAKKNNLPFKLTCATTRQVVNVVTTKIALKGG

SEQ ID NO: 15982 - protein, 1946 aa, Artificial Sequence
  SARS-CoV-2__MT811262.1__non-structural protein 3 (NSP3)
MAPTKVTFGDDTVIEVQGYKSVNITFELDERIDKVLNEKCSAYTVELGTEVNEFACVVADAVIKTLQPVSELLTPLGIDLDEWSMATYYLFDESGEFKLASHMYCSFYPPDEDEEEGDCEEEEFEPSTQYEYGTEDDYQGKPLEFGATSAALQPEEEQEEDWLDDDSQQTVGQQDGSEDNQTTTIQTIVEVQPQLEMELTPVVQTIEVNSFSGYLKLTDNVYIKNADIVEEAKKVKPTVVVNAANVYLKHGGGVAGALNKATNNAMQVESDDYIATNGPLKVGGSCVLSGHNLAKHCLHVVGPNVNKGEDIQLLKSAYENFNQHEVLLAPLLSAGIFGADPIHSLRVCVDTVRTNVYLAVFDKNLYDKLVSSFLEMKSEKQVEQKIAEIPKEEVKPFITESKPSVEQRKQDDKKIKACVEEVTTTLEETKFLTENLLLYIDINGNLHPDSATLVSDIDITFLKKDAPYIVGDVVQEGVLTAVVIPTKKAGGTTEMLAKALRKVPTDNYITTYPGQGLNGYTVEEAKTVLKKCKSAFYILPSIISNEKQEILGTVSWNLREMLAHAEETRKLMPVCVETKAIVSTIQRKYKGIKIQEGVVDYGARFYFYTSKTTVASLINTLNDLNETLVTMPLGYVTHGLNLEEAARYMRSLKVPATVSVSSPDAVTAYNGYLTSSSKTPEEHFIETISLAGSYKDWSYSGQSTQLGIEFLKRGDKSVYYTSNPTTFHLDGEVITFDNLKTLLSLREVRTIKVFTTVDNINLHTQVVDMSMTYGQQFGPTYLDGADVTKIKPHNSHEGKTFYVLPNDDTLRVEAFEYYHTTDPSFLGRYMSALNHTKKWKYPQVNGLTSIKWADNNCYLATALLTLQQIELKFNPPALQDAYYRARAGEAANFCALILAYCNKTVGELGDVRETMSYLFQHANLDSCKRVLNVVCKTCGQQQTTLKGVEAVMYMGTLSYEQFKKGVQIPCTCGKQATKYLVQQESPFVMMSAPPAQYELKHGTFTCASEYTGNYQCGHYKHITSKETLYCIDGALLTKSSEYKGPITDVFYKENSYTTTIKPVTYKLDGVVCTEIDPKLDNYYKKDNSYFTEQPIDLVPNQPYPNASFDNFKFVCDNIKFADDLNQLTGYKKPASRELKVTFFPDLNGDVVAIDYKHYTPSFKKGAKLLHKPIVWHVNNATNKATYKPNTWCIRCLWSTKPVETSNSFDVLKSEDAQGMDNLACEDLKPVSEEVVENPTIQKDVLECNVKTTEVVGDIILKPANNSLKITEEVGHTDLMAAYVDNSSLTIKKPNELSRVLGLKTLATHGLAAVNSVPWDTIANYAKPFLNKVVSTTTNIVTRCLNRVCTNYMPYFFTLLLQLCTFTRSTNSRIKASMPTTIAKNTVKSVGKFCLEASFNYLKSPNFSKLINIIIWFLLLSVCLGSLIYSTAALGVLMSNLGMSSYCTGYREGYLNSTNVTIATYCTGSIPCSVCLSGLDSLDTYPSLETIQITISSFKWDLTAFGLVAEWFLAYILFTRFFYVLGLAAIMQLFFSYFAVHFISNSWLMWLIINLVQMAPISAMVRMYIFFASFYYVWKSYVHVVDGCNSSTCMMCYKRNRATRVECTTIVNGVRRSFYVYANGGKGFCKLHNWNCVNCDTFCAGSTFISDEVARDLSLQFKRPINPTDQSSYIVDSVTVKNGSIHLYFDKAGQKTYERHSLSHFVNLDNLRANNTKGSLPINVIVFDGKSKCEESSAKSASVYYSQLMCQPILLLDQALVSDVGDSAEVAVKMFDAYVNTFSSTFNVPMEKLKTLVATAEAELAKNVSLDNVLSTFISAARQGFVDSDVETKDVVECLKLSHQSDIEVTGDSCNNYMLTYNKVENMTPRDLGACIDCSARHINAQVAKSHNIALIWNVKDFMSLSEQLRKQIRSAAKKNNLPFKLTCATTRQVVNVVTTKIALKGG

SEQ ID NO: 15983 - protein, 1946 aa, Artificial Sequence
  SARS-CoV-2__MT811279.1__non-structural protein 3 (NSP3)
MAPTKVTFGDDTVIEVQGYKSVNITFELDERIDKVLNEKCSAYTVELGTEVNEFACVVADAVIKTLQPVSELLTPLGIDLDEWSMATYYLFDESGEFKLASHMYCSFYPPDEDEEEGDCEEEEFEPSTQYEYGTEDDYQGKPLEFGATSAALQPEEEQEEDWLDDDSQQTVGQQDGSEDNQTTTIQTIVEVQPQLEMELTPVVQTIEVNSFSGYLKLTDNVYIKNADIVEEAKKVKPTVVVNAANVYLKHGGGVAGALNKATNNAMQVESDDYIATNGPLKVGGSCVLSGHNLAKHCLHVVGPNVNKGEDIQLLKSAYENFNQHEVLLAPLLSAGIFGADPIHSLRVCVDTVRTNVYLAVFDKNLYDKLVSSFLEMKSEKQVEQKIAEIPKEEVKPFITESKPSVEQRKQDDKKIKACVEEVTTTLEETKFLTENLLLYIDINGNLHPDSATLVSDIDITFLKKDAPYIVGDVVQEGVLTAVVIPTKKAGGTTEMLAKALRKVPTDNYITTYPGQGLNGYTVEEAKTVLKKCKSAFYILPSIISNEKQEILGTVSWNLREMLAHAEETRKLMPVCVETKAIVSTIQRKYKGIKIQEGVVDYGARFYFYTSKTTVASLINTLNDLNETLVTMPLGYVTHGLNLEEAARYMRSLKVPATVSVSSPDAVTAYNGYLTSSSKTPEEHFIETISLAGSYKDWSYSGQSTQLGIEFLKRGDKSVYYTSNPTTFHLDGEVITFDNLKTLLSLREVRIIKVFTTVDNINLHTQVVDMSMTYGQQFGPTYLDGADVTKIKPHNSHEGKTFYVLPNDDTLRVEAFEYYHTTDPSFLGRYMSALNHTKKWKYPQVNGLTSIKWADNNCYLATALLTLQQIELKFNPPALQDAYYRARAGEAANFCALILAYCNKTVGELGDVRETMSYLFQHANLDSCKRVLNVVCKTCGQQQTTLKGVEAVMYMGTLSYEQFKKGVQIPCTCGKQATKYLVQQESPFVMMSAPPAQYELKHGTFTCASEYTGNYQCGHYKHITSKETLYCIDGALLTKSSEYKGPITDVFYKENSYTTTIKPVTYKLDGVVCTEIDPKLDNYYKKDNSYFTEQPIDLVPNQPYPNASFDNFKFVCDNIKFADDLNQLTGYKKPASRELKVTFFPDLNGDVVAIDYKHYTPSFKKGAKLLHKPIVWHVNNATNKATYKPNTWCIRCLWSTKPVETSNSFDVLKSEDAQGMDNLACEDLKPVSEEVVENPTIQKDVLECNVKTTEVVGDIILKPANNSLKITEEVGHTDLMAAYVDNSSLTIKKPNELSRVLGLKTLATHGLAAVNSVPWDTIANYAKPFLNKVVSTTTNIVTRCLNRVCTNYMPYFFTLLLQLCTFTRSTNSRIKASMPTTIAKNTVKSVGKFCLEASFNYLKSPNFSKLINIIIWFLLLSVCLGSLIYSTAALGVLMSNLGMPSYCTGYREGYLNSTNVTIATYCTGSIPCSVCLSGLDSLDTYPSLETIQITISSFKWDLTAFGLVAEWFLAYILFTRFFYVLGLAAIMQLFFSYFAVHFISNSWLMWLIINLVQMAPISAMVRMYIFFASFYYVWKSYVHVVDGCNSSTCMMCYKRNRATRVECTTIVNGVRRSFYVYANGGKGFCKLHNWNCVNCDTFCAGSTFISDEVARDLSLQFKRPINPTDQSSYIVDSVTVKNGSIHLYFDKAGQKTYERHSLSHFVNLDNLRANNTKGSLPINVIVFDGKSKCEESSAKSASVYYSQLMCQPILLLDQALVSDVGDSAEVAVKMFDAYVNTFSSTFNVPMEKLKTLVATAEAELAKNVSLDNVLSTFISAARQGFVDSDVETKDVVECLKLSHQSDIEVTGDSCNNYMLTYNKVENMTPRDLGACIDCSARHINAQVAKSHNIALIWNVKDFMSLSEQLRKQIRSAAKKNNLPFKLTCATTRQVVNVVTTKIALKGG

SEQ ID NO: 15984 - protein, 1946 aa, Artificial Sequence
  SARS-CoV-2__MT811281.1__non-structural protein 3 (NSP3)
MAPTKVTFGDDTVIEVQGYKSVNITFELDERIDKVLNEKCSAYTVELGTEVNEFACVVADAVIKTLQPVSELLTPLGIDLDEWSMATYYLFDESGEFKLASHMYCSFYPPDEDEEEGDCEEEEFEPSTQYEYGTEDDYQGKPLEFGATSAALQPEEEQEEDWLDDDSQQTVGQQDSSEDNQTTTIQTIVEVQPQLEMELTPVVQTIEVNSFSGYLKLTDNVYIKNADIVEEAKKVKPTVVVNAANVYLKHGGGVAGALNKATNNAMQVESDDYIATNGPLKVGGSCVLSGHNLAKHCLHVVGPNVNKGEDIQLLKSAYENFNQHEVLLAPLLSAGIFGADPIHSLRVCVDTVRTNVYLAVFDKNLYDKLVSSFLEMKSEKQVEQKIAEIPKEEVKPFITESKPSVEQRKQDDKKIKACVEEVTTTLEETKFLTENLLLYIDINGNLHPDSATLVSDIDITFLKKDAPYIVGDVVQEGVLTAVVIPTKKAGGTTEMLAKALRKVPTDNYITTYPGQGLNGYTVEEAKTVLKKCKSAFYILPSIISNEKQEILGTVSWNLREMLAHAEETRKLMPVCVETKAIVSTIQRKYKGIKIQEGVVDYGARFYFYTSKTTVASLINTLNDLNETLVTMPLGYVTHGLNLEEAARYMRSLKVPATVSVSSPDAVTAYNGYLTSSSKTPEEHFIETISLAGSYKDWSYSGQSTQLGIEFLKRGDKSVYYTSNPTTFHLDGEVITFDNLKTLLSLREVRTIKVFTTVDNINLHTQVVDMSMTYGQQFGPTYLDGADVTKIKPHNSHEGKTFYVLPNDDTLRVEAFEYYHTTDPSFLGRYMSALNHTKKWKYPQVNGLTSIKWADNNCYLATALLTLQQIELKFNPPALQDAYYRARAGEAANFCALILAYCNKTVGELGDVRETMSYLFQHANLDSCKRVLNVVCKTCGQQQTTLKGVEAVMYMGTLSYEQFKKGVQIPCTCGKQATKYLVQQESPFVMMSAPPAQYELKHGTFTCASEYTGNYQCGHYKHITSKETLYCIDGALLTKSSEYKGPITDVFYKENSYTTTIKPVTYKLDGVVCTEIDPKLDNYYKKDNSYFTEQPIDLVPNQPYPNASFDNFKFVCDNIKFADDLNQLTGYKKPASRELKVTFFPDLNGDVVAIDYKHYTPSFKKGAKLLHKPIVWHVNNATNKATYKPNTWCIRCLWSTKPVETSNSFDVLKSEDAQGMDNLACEDLKPVSEEVVENPTIQKDVLECNVKTTEVVGDIILKPANNSLKITEEVGHTDLMAAYVDNSSLTIKKPNELSRVLGLKTLATHGLAAVNSVPWDTIANYAKPFLNKVVSTTTNIVTRCLNRVCTNYMPYFFTLLLQLCTFTRSTNSRIKASMPTTIAKNTVKSVGKFCLEASFNYLKSPNFSKLINIIIWFLLLSVCLGSLIYSTAALGVLMSNLGMPSYCTGYREGYLNSTNVTIATYCTGSIPCSVCLSGLDSLDTYPSLETIQITISSFKWDLTAFGLVAEWFLAYILFTRFFYVLGLAAIMQLFFSYFAVHFISNSWLMWLIINLVQMAPISAMVRMYIFFASFYYVWKSYVHVVDGCNSSTCMMCYKRNRATRVECTTIVNGVRRSFYVYANGGKGFCKLHNWNCVNCDTFCAGSTFISDEVARDLSLQFKRPINPTDQSSYIVDSVTVKNGSIHLYFDKAGQKTYERHSLSHFVNLDNLRANNTKGSLPINVIVFDGKSKCEESSAKSASVYYSQLMCQPILLLDQALVSDVGDSAEVAVKMFDAYVNTFSSTFNVPMEKLKTLVATAEAELAKNVSLDNVLSTFISAVRQGFVDSDVETKDVVECLKLSHQSDIEVTGDSCNNYMLTYNKVENMTPRDLGACIDCSARHINAQVAKSHNIALIWNVKDFMSLSEQLRKQIRSAAKKNNLPFKLTCATTRQVVNVVTTKIALKGG

SEQ ID NO: 15985 - protein, 1946 aa, Artificial Sequence
  SARS-CoV-2__MT811297.1__non-structural protein 3 (NSP3)
MAPTKVTFGDDTVIEVQGYKSVNITFELDERIDKVLNEKCSAYTVELGTEVNEFACVVADAVIKTLQPVSELLTPLGIDLDEWSMATYYLFDESGEFKLASHMYCSFYPPDEDEEEGDCEEEEFEPSTQYEYGTEDDYQGKPLEFGATSAALQPEEEQEEDWLDDDSQQTVGQQDGSEDNQTTTIQTIVEVQPQLEMELTPVVQTIEVNSFSGYLKLTDNVYIKNADIVEEAKKVKPTVVVNAANVYLKHGGGVARALNKATNNAMQVESDDYIATNGPLKVGGSCVLSGHNLAKHCLHVVGPNVNKGEDIQLLKSAYENFNQHEVLLAPLLSAGIFGADPIHSLRVCVDTVRTNVYLAVFDKNLYDKLVSSFLEMKSEKQVEQKIAEIPKEEVKPFITESKPSVEQRKQDDKKIKACVEEVTTTLEETKFLTENLLLYIDINGNLHPDSATLVSDIDITFLKKDAPYIVGDVVQEGVLTAVVIPTKKAGGTTEMLAKALRKVPTDNYITTYPGQGLNGYTVEEAKTVLKKCKSAFYILPSIISNEKQEILGTVSWNLREMLAHAEETRKLMPVCVETKAIVSTIQRKYKGIKIQEGVVDYGARFYFYTSKTTVASLINTLNDLNETLVTMPLGYVTHGLNLEEAARYMRSLKVPATVSVSSPDAVTAYNGYLTSSSKTPEEHFIETISLAGSYKDWSYSGQSTQLGIEFLKRGDKSVYYTSNPTTFHLDGEVITFDNLKTLLSLREVRTIKVFTTVDNINLHTQVVDMSMTYGQQFGPTYLDGADVTKIKPHNSHEGKTFYVLPNDDTLRVEAFEYYHTTDPSFLGRYMSALNHTKKWKYPQVNGLTSIKWADNNCYLATALLTLQQIELKFNPPALQDAYYRARAGEAANFCALILAYCNKTVGELGDVRETMSYLFQHANLDSCKRVLNVVCKTCGQQQTTLKGVEAVMYMGTLSYEQFKKGVQIPCTCGKQATKYLVQQESPFVMMSAPPAQYELKHGTFTCASEYTGNYQCGHYKHITSKETLYCIDGALLTKSSEYKGPITDVFYKENSYTTTIKPVTYKLDGVVCTEIDPKLDNYYKKDNSYFTEQPIDLVPNQPYPNASFDNFKFVCDNIKFADDLNQLTGYKKPASRELKVTFFPDLNGDVVAIDYKHYTPSFKKGAKLLHKPIVWHVNNATNKATYKPNTWCIRCLWSTKPVETSNSFDVLKSEDAQGMDNLACEDLKPVSEEVVENPTIQKDVLECNVKTTEVVGDIILKPANNSLKITEEVGHTDLMAAYVDNSSLTIKKPNELSRVLGLKTLATHGLAAVNSVPWDTIANYAKPFLNKVVSTTTNIVTRCLNRVCTNYMPYFFTLLLQLCTFTRSTNSRIKASMPTTIAKNTVKSVGKFCLEASFNYLKSPNFSKLINIIIWFLLLSVCLGSLIYSTAALGVLMSNLGMPSYCTGYREGYLNSTNVTIATYCTGSIPCSVCLSGLDSLDTYPSLETIQITISSFKWDLTAFGLVAEWFLAYILFTRFFYVLGLAAIMQLFFSYFAVHFISNSWLMWLIINLVQMAPISAMVRMYIFFASFYYVWKSYVHVVDGCNSSTCMMCYKRNRATRVECTTIVNGVRRSFYVYANGGKGFCKLHNWNCVNCDTFCAGSTFISDEVARDLSLQFKRPINPTDQSSYIVDSVTVKNGSIHLYFDKAGQKTYERHSLSHFVNLDNLRANNTKGSLPINVIVFDGKSKCEESSAKSASVYYSQLMCQPILLLDQALVSDVGDSAEVAVKMFDAYVNTFSSTFNVPMEKLKTLVATAEAELAKNVSLDNVLSTFISAARQGFVDSDVETKDVVECLKLSHQSDIEVTGDSCNNYMLTYNKVENMTPRDLGACIDCSARHINAQVAKSHNIALIWNVKDFMSLSEQLRKQIRSAAKKNNLPFKLTCATTRQVVNVVTTKIALKGG

SEQ ID NO: 15986 - protein, 1946 aa, Artificial Sequence
  SARS-CoV-2__MT811322.1__non-structural protein 3 (NSP3)
MAPTKVTFGDDTVIEVQGYKSVNITFELDERIDKVLNEKCSAYTVELGTEVNEFACVVADAVIKTLQPVSELLTPLGIDLDEWSMATYYLFDESGEFKLASHMYCSFYPPDEDEEEGDCEEEEFEPSTQYEYGTEDDYQGKPLEFGATSAALQPEEEQEEDWLDDDSQQTVGQQDGSEDNQTTTIQTIVEVQPQLEMELTPVVQTIEVNSFSGYLKLTDNVYIKNADIVEEAKKVKPTVVVNAANVYLKHGGGVAGALNKATNNAMQVESDDYIATNGPLKVGGSCVLSGHNLAKHCLHVVGPNVNKGEDIQLLKSAYENFNQHEVLLAPLLSAGIFGADPIHSLRVCVDTVRTNVYLAVFDKNLYDKLVSSFLEMKSEKQVEQKIAEIPKEEVKPFITESKPSVEQRKQDDKKIKACVEEVTTTLEETKFLTENLLLYIDINGNLHPDSATLVSDIDITFLKKDAPYIVGDVVQEGVLTAVVIPTKKAGGTTEMLAKALRKVPTDNYITTYPGQGLNGYTVEEAKTVLKKCKSAFYILPSIISNEKQEILGTVSWNLREMLAHAEETRKLMPVCVETKAIVSTIQRKYKGIKIQEGVVDYGARFYFYTSKTTVASLINTLNDLNETLVTMPLGYVTHGLNLEEAARYMRSLKVPATVSVSSPDAVTAYNGYLTSSSKTPEEHFIETISLAGSYKDWSYSGQSTQLGIEFLKRGDKSVYYTSNPTTFHLDGEVITFDNLKTLLSLREVRTIKVFTTVDNINLHTQVVDMSMTYGQQFGPTYLDGADVTKIKPHNSHEGKTFYVLPNDDTLRVEAFEYYHTTDPSFLGRYMSALNHTKKWKYPQVNGLTSIKWADNNCYLATALLTLQQIELKFNPPALQDAYYRARAGEAANFCALILAYCNKTVGELGDVRETMSYLFQHANLDSCKRVLNVVCKTCGQQQTTLKGVEAVMYMGTLSYEQFKKGVQIPCTCGKQATKYLVQQESPFVMMSAPPAQYELKHGTFTCASEYTGNYQCGHYKHITSKETLYCIDGALLTKSSEYKGPITDVFYKENSYTTTIKPVTYKLDGVVCTEIDPKLDNYYKKDNSYFTEQPIDLVPNQPYPNASFGNFKFVCDNIKFADDLNQLTGYKKPASRELKVTFFPDLNGDVVAIDYKHYTPSFKKGAKLLHKPIVWHVNNATNKATYKPNTWCIRCLWSTKPVETSNSFDVLKSEDAQGMDNLACEDLKPVSEEVVENPTIQKDVLECNVKTTEVVGDIILKPANNSLKITEEVGHTDLMAAYVDNSSLTIKKPNELSRVLGLKTLATHGLAAVNSVPWDTIANYAKPFLNKVVSTTTNIVTRCLNRVCTNYMPYFFTLLLQLCTFTRSTNSRIKASMPTTIAKNTVKSVGKFCLEASFNYLKSPNFSKLINIIIWFLLLSVCLGSLIYSTAALGVLMSNLGMPSYCTGYREGYLNSTNVTIATYCTGSIPCSVCLSGLDSLDTYPSLETIQITISSFKWDLTAFGLVAEWFLAYILFTRFFYVLGLAAIMQLFFSYFAVHFISNSWLMWLIINLVQMAPISAMVRMYIFFASFYYVWKSYVHVVDGCNSSTCMMCYKRNRATRVECTTIVNGVRRSFYVYANGGKGFCKLHNWNCVNCDTFCAGSTFISDEVARDLSLQFKRPINPTDQSSYIVDSVTVKNGSIHLYFDKAGQKTYERHSLSHFVNLDNLRANNTKGSLPINVIVFDGKSKCEESSAKSASVYYSQLMCQPILLLDQALVSDVGDSAEVAVKMFDAYVNTFSSTFNVPMEKLKTLVATAEAELAKNVSLDNVLSTFISAARQGFVDSDVETKDVVECLKLSHQSDIEVTGDSCNNYMLTYNKVENMTPRDLGACIDCSARHINAQVAKSHNIALIWNVKDFMSLSEQLRKQIRSAAKKNNLPFKLTCATTRQVVNVVTTKIALKGG

SEQ ID NO: 15987 - protein, 1946 aa, Artificial Sequence
  SARS-CoV-2__MT811341.1__non-structural protein 3 (NSP3)
MAPTKVTFGDDTVIEVQGYKSVNITFELDERIDKVLNEKCSAYTVELGTEVNEFACVVADAVIKTLQPVSELLTPLGIDLDEWSMATYYLFDESGEFKLASHMYCSFYPPDEDEEEGDCEEEEFEPSTQYEYGTEDDYQGKPLEFGATSAALQPEEEQEEDWLDDDSQQTVGQQDGSEDNQTTTIQTIVEVQPQLEMELTPVVQTIEVNSFSGYLKLTDNVYIKNADIVEEAKKVKPTVVVNAANVYLKHGGGVAGALNKATNNAMQVESDDYIATNGPLKVSGSCVLSGHNLAKHCLHVVGPNVNKGEDIQLLKSAYENFNQHEVLLAPLLSAGIFGADPIHSLRVCVDTVRTNVYLAVFDKNLYDKLVSSFLEMKSEKQVEQKIAEIPKEEVKPFITESKPSVEQRKQDDKKIKACVEEVTTTLEETKFLTENLLLYIDINGNLHPDSATLVSDIDITFLKKDAPYIVGDVVQEGVLTAVVIPTKKAGGTTEMLAKALRKVPTDNYITTYPGQGLNGYTVEEAKTVLKKCKSAFYILPSIISNEKQEILGTVSWNLREMLAHAEETRKLMPVCVETKAIVSTIQRKYKGIKIQEGVVDYGARFYFYTSKTTVASLINILNDLNETLVTMPLGYVTHGLNLEEAARYMRSLKVPATVSVSSPDAVTAYNGYLTSSSKTPEEHFIETISLAGSYKDWSYSGQSTQLGIEFLKRGDKSVYYTSNPTTFHLDGEVITFDNLKTLLSLREVRTIKVFTTVDNINLHTQVVDMSMTYGQQFGPTYLDGADVTKIKPHNSHEGKTFYVLPNDDTLRVEAFEYYHTTDPSFLGRYMSALNHTKKWKYPQVNGLTSIKWADNNCYLATALLTLQQIELKFNPPALQDAYYRARAGEAANFCALILAYCNKTVGELGDVRETMSYLFQHANLDSCKRVLNVVCKTCGQQQTTLKGVEAVMYMGTLSYEQFKKGVQIPCTCGKQATKYLVQQESPFVMMSAPPAQYELKHGTFTCASEYTGNYQCGHYKHITSKETLYCIDGALLTKSSEYKGPITDVFYKENSYTTTIKPVTYKLDGVVCTEIDPKLDNYYKKDNSYFTEQPIDLVPNQPYPNASFDNFKFVCDNIKFADDLNQLTGYKKPASRELKVTFFPDLNGDVVAIDYKHYTPSFKKGAKLLHKPIVWHVNNATNKATYKPNTWCIRCLWSTKPVETSNSFDVLKSEDAQGMDNLACEDLKPVSEEVVENPTIQKDVLECNVKTTEVVGDIILKPANNSLKITEEVGHTDLMAAYVDNSSLTIKKPNELSRVLGLKTLATHGLAAVNSVPWDTIANYAKPFLNKVVSTTTNIVTRCLNRVCTNYMPYFFTLLLQLCTFTRSTNSRIKASMPTTIAKNTVKSVGKFCLEASFNYLKSPNFSKLINIIIWFLLLSVCLGSLIYSTAALGVLMSNLGMPSYCTGYREGYLNSTNVTIATYCTGSIPCSVCLSGLDSLDTYPSLETIQITISSFKWDLTAFGLVAEWFLAYILFTRFFYVLGLAAIMQLFFSYFAVHFISNSWLMWLIINLVQMAPISAMVRMYIFFASFYYVWKSYVHVVDGCNSSTCMMCYKRNRATRVECTTIVNGVRRSFYVYANGGKGFCKLHNWNCVNCDTFCAGSTFISDEVARDLSLQFKRPINPTDQSSYIVDSVTVKNGSIHLYFDKAGQKTYERHSLSHFVNLDNLRANNTKGSLPINVIVFDGKSKCEESSAKSASVYYSQLMCQPILLLDQALVSDVGDSAEVAVKMFDAYVNTFSSTFNVPMEKLKTLVATAEAELAKNVSLDNVLSTFISAARQGFVDSDVETKDVVECLKLSHQSDIEVTGDSCNNYMLTYNKVENMTPRDLGACIDCSARHINAQVAKSHNIALIWNVKDFMSLSEQLRKQIRSAAKKNNLPFKLTCATTRQVVNVVTTKIALKGG

SEQ ID NO: 15988 - protein, 1946 aa, Artificial Sequence
  SARS-CoV-2__MT811344.1__non-structural protein 3 (NSP3)
MAPTKVTFGDDTVIEVQGYKSVNITFELDERIDKVLNEKCSAYTVELGTEVNEFACVVADAVIKTLQPVSELLTPLGIDLDEWSMATYYLFDESGEFKLASHMYCSFYPPDEDEEEGDCEEEEFEPSTQYEYGTEDDYQGKPLEFGATSAALQPEEEQEEDWLDDDSQQTVGQQDGSEDNQTTTIQTIVEVQPQLEMELTPVVQTIEVNSFSGYLKLTDNVYIKNADIVEEAKKVKPTVVVNAANVYLKHGGGVAGALNKATNNAMQVESDDYIATNGPLKVGGSCVLSGHNLAKHCLHVVGPNVNKGEDIQLLKSAYENFNQHEVLLAPLLSAGIFGADPIHSLRVCVDTVRTNVYLAVFDKNLYDKLVSSFLEMKSEKQVEQKIAEIPKEEVKPFITESKPSVEQRKQDDKKIKACVEEVTTTLEETKFLTENLLLYIDINGNLHPDSATLVSDIDITFLKKDAPYIVGDVVQEGVLTAVVIPTKKAGGTTEMLAKALRKVPTDNYITTYPGQGLNGYTVEEAKTVLKKCKSTFYILPSIISNEKQEILGTVSWNLREMLAHAEETRKLMPVCVETKAIVSTIQRKYKGIKIQEGVVDYGARFYFYTSKTTVASLINTLNDLNETLVTMPLGYVTHGLNLEEAARYMRSLKVPATVSVSSPDAVTAYNGYLTSSSKTPEEHFIETISLAGSYKDWSYSGQSTQLGIEFLKRGDKSVYYTSNPTTFHLDGEVITFDNLKTLLSLREVRTIKVFTTVDNINLHTQVVDMSMTYGQQFGPTYLDGADVTKIKPHNSHEGKTFYVLPNDDTLRVEAFEYYHTTDPSFLGRYMSALNHTKKWKYPQVNGLTSIKWADNNCYLATALLTLQQIELKFNPPALQDAYYRARAGEAANFCALILAYCNKTVGELGDVRETMSYLFQHANLDSCKRVLNVVCKTCGQQQTTLKGVEAVMYMGTLSYEQFKKGVQIPCTCGKQATKYLVQQESPFVMMSAPPAQYELKHGTFTCASEYTGNYQCGHYKHITSKETLYCIDGALLTKSSEYKGPITDVFYKENSYTTTIKPVTYKLDGVVCTEIDPKLDNYYKKDNSYFTEQPIDLVPNQPYPNASFDNFKFVCDNIKFADDLNQLTGYKKPASRELKVTFFPDLNGDVVAIDYKHYTPSFKKGAKLLHKPIVWHVNNATNKATYKPNTWCIRCLWSTKPVETSNSFDVLKSEDAQGMDNLACEDLKPVSEEVVENPTIQKDVLECNVKTTEVVGDIILKPANNSLKITEEVGHTDLMAAYVDNSSLTIKKPNELSRVLGLKTLATHGLAAVNSVPWDTIANYAKPFLNKVVSTTTNIVTRCLNRVCTNYMPYFFTLLLQLCTFTRSTNSRIKASMPTTIAKNTVKSVGKFCLEASFNYLKSPNFSKLINIIIWFLLLSVCLGSLIYSTAALGVLMSNLGMPSYCTGYREGYLNSTNVTIATYCTGSIPCSVCLSGLDSLDTYPSLETIQITISSFKWDLTAFGLVAEWFLAYILFTRFFYVLGLAAIMQLFFSYFAVHFISNSWLMWLIINLVQMAPISAMVRMYIFFASFYYVWKSYVHVVDGCNSSTCMMCYKRNRATRVECTTIVNGVRRSFYVYANGGKGFCKLHNWNCVNCDTFCAGSTFISDEVARDLSLQFKRPINPTDQSSYIVDSVTVKNGSIHLYFDKAGQKTYERHSLSHFVNLDNLRANNTKGSLPINVIVFDGKSKCEESSAKSASVYYSQLMCQPILLLDQALVSDVGDSAEVAVKMFDAYVNTFSSTFNVPMEKLKTLVATAEAELAKNVSLDNVLSTFISAARQGFVDSDVETKDVVECLKLSHQSDIEVTGDSCNNYMLTYNKVENMTPRDLGACIDCSARHINAQVAKSHNIALIWNVKDFMSLSEQLRKQIRSAAKKNNLPFKLTCATTRQVVNVVTTKIALKGG

SEQ ID NO: 15989 - protein, 1946 aa, Artificial Sequence
  SARS-CoV-2__MT811365.1__non-structural protein 3 (NSP3)
MAPTKVTFGDDTVIEVQGYKSVNITFELDERIDKVLNEKCSAYTVELGTEVNEFACVVADAVIKTLQPVSELLTPLGIDLDEWSMATYYLFDESGEFKLASHMYCSFYPPDEDEEEGDCEEEEFEPSTQYEYGTEDDYQGKPLEFGATSAALQPEEEQEEDWLDDDSQQTVGQQDGSEDNQTTTIQTIVEVQPQLEMELTPVVQTIEVNSFSGYLKLTDNVYIKNADIVEEAKKVKPTVVVNAANVYLKHGGGVAGALNKATNNAMQVESDDYIATNGPLKVGGSCVLSGHNLAKHCLHVVGPNVNKGEDIQLLKSAYENFNQHEVLLAPLLSAGIFGADPIHSLRVCVDTVRTNVYLAVFDKNLYDKLVSSFLEMKSEKQVEQKIAEIPKEEVKPFITESKPSVEQRKQDDKKIKACVEEVTTTLEETKFLTENLLLYIDINGNLHPDSATLVSDIDITFLKKDAPYIVGDVVQEGVLTAVVIPTKKAGGTTEMLAKALRKVPTDNYITTYPGQGLNGYTVEEAKTVLKKCKSAFYILPSIISNEKQEILGTVSWNLREMLAHAEETRKLMPVCVETKAIVSTIQRKYKGIKIQEGVVDYGARFYFYTSKTTVASLINTLNDLNETLVTMPLGYVTHGLNLEEAARYMRSLKVPATVSVSSPDAVTAYNGYLTSSSKTPEEHFIETISLAGSYKDWSYSGQSTQLGIEFLKRGDKSVYYTSNPTTFHLDGEVITFDNLKTLLSLREVRTIKVFTTVDNINLHTQVVDMSMTYGQQFGPTYLDGADVTKIKPHNSHEGKTFYVLPNDDTLRVEAFEYYHTTDPSFLGRYMSALNHTKKWKYPQVNGLTSIKWADNNCYLATALLTLQQIELKFNPPALQDAYYRARAGEAANFCALILAYCNKTVGELGDVRETMSYLFQHANLDSCKRVLNVVCKTCGQQQTTLKGVEAVMYMGTLSYEQFKKGVQIPCTCGKQATKYLVQQESPFVMMSAPPAQYELKHGTFTCASEYTGNYQCGHYKHITSKETLYCIDGALLTKSSEYKGPITDVFYKENSYTTTIKPVTYKLDGVVCTEIDPKLDNYYKKDNSYFTEQPIDLVPNQPYPNASFDNFKFVCDNIKFADDLNQLTGYKKPASRELKVTFFPDLNGDVVAIDYKHYTPSFKKGAKLLHKPIVWHVNNATNKATYKPNTWCIRCLWSTKPVETSNSFDVLKSEDAQGMDNLACEDLKPVSEEVVENPTIQKDVLECNVKTTEVVGDIILKPANNSLKITEEVGHTDLMAAYVDNSSLTIKKPNELSRVLGLKTLATHGLAAVNSVPWDTIANYAKPFLNKVVSTTTNIVTRCLNRVCTNYMPYFFTLLLQLCTFIRSTNSRIKASMPTTIAKNTVKSVGKFCLEASFNYLKSPNFSKLINIIIWFLLLSVCLGSLIYSTAALGVLMSNLGMPSYCTGYREGYLNSTNVTIATYCTGSIPCSVCLSGLDSLDTYPSLETIQITISSFKWDLTAFGLVAEWFLAYILFTRFFYVLGLAAIMQLFFSYFAVHFISNSWLMWLIINLVQMAPISAMVRMYIFFASFYYVWKSYVHVVDGCNSSTCMMCYKRNRATRVECTTIVNGVRRSFYVYANGGKGFCKLHNWNCVNCDTFCAGSTFISDEVARDLSLQFKRPINPTDQSSYIVDSVTVKNGSIHLYFDKAGQKTYERHSLSHFVNLDNLRANNTKGSLPINVIVFDGKSKCEESSAKSASVYYSQLMCQPILLLDQALVSDVGDSAEVAVKMFDAYVNTFSSTFNVPMEKLKTLVATAEAELAKNVSLDNVLSTFISAARQGFVDSDVETKDVVECLKLSHQSDIEVTGDSCNNYMLTYNKVENMTPRDLGACIDCSARHINAQVAKSHNIALIWNVKDFMSLSEQLRKQIRSAAKKNNLPFKLTCATTRQVVNVVTTKIALKGG

SEQ ID NO: 15990 - protein, 1946 aa, Artificial Sequence
  SARS-CoV-2__MT811405.1__non-structural protein 3 (NSP3)
MAPTKVTFGDDTVIEVQGYKSVNITFELDERIDKVLNEKCSAYTVELGTEVNEFACVVADAVIKTLQPVSELLTPLGIDLDEWSMATYYLFDESGEFKLASHMYCSFYPPDEDEEEGDCEEEEFEPSTQYEYGTEDDYQGKPLEFGATSAALQPEEEQEEDWLDDDSQQTVGQQDGSEDNQTTTIQTIVEVQPQLEMELTPVVQTIEVNSFSGYLKLTDNVYIKNADIVEEAKKVKPTVVVNAANVYLKHGGGVAGALNKATNNAMQVESDDYIATNGPLKVGGSCVLSGHNLAKHCLHVVGPNVNKGEDIQLLKSAYENFNQHEVLLAPLLSAGIFGADPIHSLRVCVDTVRTNVYLAVFDKNLYDKLVSSFLEMKSEKQVEQKIAEIPKEEVKPFITESKPSVEQRKQDDKKIKACVEEVTTTLEETKFLTENLLLYIDINGNLHPDSATLVSDIDITFLKKDAPYIVGDVVQEGVLTAVVIPTKKAGGTTEMLAKALRKVPTDNYITTYPGQGLNGYTVEEAKTVLKKCKSAFYILPSIISNEKQEILGTVSWNLREMLAHAEETRKLMPVCVETKAIVSTIQRKYKGIKIQEGVVDYGARFYFYTSKTTVASLINTLNDLNETLVTMPLGYVTHGLNLEEAARYMRSLKVPATVSVSSPDAVTAYNGYLTSSSKTPEEHFIETISLAGSYKDWSYSGQSTQLGIEFLKRGDKSVYYTSNPTTFHLDGEVITFDNLKTLLSLREVRTIKVFTTVDNINLHTQVVDMSMTYGQQFGPTYLDGADVTKIKPHNSHEGKTFYVLPNDDTLRVEAFEYYHTTDPSFLGRYMSALNHTKKWKYPQVNGLTSIKWADNNCYLATALLTLQQIELKFNPPALQDAYYRARAGEAANFCALILAYCNKTVGELGDVRETMSYLFQHANLDSCKRVLNVVCKTCGQQQTTRKGVEAVMYMGTLSYEQFKKGVQIPCTCGKQATKYLVQQESPFVMMSAPPAQYELKHGTFTCASEYTGNYQCGHYKHITSKETLYCIDGALLTKSSEYKGPITDVFYKENSYTTTIKPVTYKLDGVVCTEIDPKLDNYYKKDNSYFTEQPIDLVPNQPYPNASFDNFKFVCDNIKFADDLNQLTGYKKPASRELKVTFFPDLNGDVVAIDYKHYTPSFKKGAKLLHKPIVWHVNNATNKATYKPNTWCIRCLWSTKPVETSNSFDVLKSEDAQGMDNLACEDLKPVSEEVVENPTIQKDVLECNVKTTEVVGDIILKPANNSLKITEEVGHTDLMAAYVDNSSLTIKKPNELSRVLGLKTLATHGLAAVNSVPWDTIANYAKPFLNKVVSTTTNIVTRCLNRVCTNYMPYFFTLLLQLCTFTRSTNSRIKASMPTTIAKNTVKSVGKFCLEASFNYLKSPNFSKLINIIIWFLLLSVCLGSLIYSTAALGVLMSNLGMPSYCTGYREGYLNSTNVTIATYCTGSIPCSVCLSGLDSLDTYPSLETIQITISSFKWDLTAFGLVAEWFLAYILFTRFFYVLGLAAIMQLFFSYFAVHFISNSWLMWLIINLVQMAPISAMVRMYIFFASFYYVWKSYVHVVDGCNSSTCMMCYKRNRATRVECTTIVNGVRRSFYVYANGGKGFCKLHNWNCVNCDTFCAGSTFISDEVARDLSLQFKRPINPTDQSSYIVDSVTVKNGSIHLYFDKAGQKTYERHSLSHFVNLDNLRANNTKGSLPINVIVFDGKSKCEESSAKSASVYYSQLMCQPILLLDQALVSDVGDSAEVAVKMFDAYVNTFSSTFNVPMEKLKTLVATAEAELAKNVSLDNVLSTFISAARQGFVDSDVETKDVVECLKLSHQSDIEVTGDSCNNYMLTYNKVENMTPRDLGACIDCSARHINAQVAKSHNIALIWNVKDFMSLSEQLRKQIRSAAKKNNLPFKLTCATTRQVVNVVTTKIALKGG

SEQ ID NO: 15991 - protein, 1946 aa, Artificial Sequence
  SARS-CoV-2__MT811407.1__non-structural protein 3 (NSP3)
MAPTKVTFGDDTVIEVQGYKSVNITFELDERIDKVLNEKCSAYTVELGTEVNEFACVVADAVIKTLQPVSELLTPLGIDLDEWSMATYYLFDESGEFKLASHMYCSFYPPDEDEEEGDCEEEEFEPSTQYEYGTEDDYQGKPLEFGATSAALQPEEEQEEDWLDDDSQQTVGQQDGSEDNQTTTIQTIVEVQPQLEMELTPVVQTIEVNSFSGYLKLTDNVYIKNADIVEEAKKVKPTVVVNAANVYLKHGGGVAGALNKATNNAMQVESDDYIATNGPLKVGGSCVLSGHNLAKHCLHVVGPNVNKGEDIQLLKSAYENFNQHEVLLAPLLSAGIFGADPIHSLRVCVDTVRTNVYLAVFDKNLYDKLVSSFLEMKSEKQVEQKIAEIPKEEVKPFITESKPSVEQRKQDDKKIKACVEEVTTTLEETKFLTENLLLYIDINGNLHPDSATLVSDIDITFLKKDAPYIVGDVVQEGVLTAVVIPTKKAGGTTEMLAKALRKVPTDNYITTYPGQGLNGYTVEEAKTVLKKCKSAFYILPSIISNEKQEILGTVSWNLREMLAHAEETRKLMPVCVETKAIVSTIQRKYKGIKIQEGVVDYGARFYFYTSKTTVASLINTLNDLNETLVTMPLGYVTHGLNLEEAARYMRSLKVPATVSVSSPDAVTAYNGYLTSSSKTPEEHFIETISLAGSYKDWSYSGQSTQLGIEFLKRGDKSVYYTSNPTTFHLDGEVITFDNLKTLLSLREVRTIKVFTTVDNINLHTQVVDMSMTYGQQFGPTYLDGADVTKIKPHNSHEGKTFYVLPNDDTLRVEAFEYYHTTDPSFLGRYMSALNHTKKWKYPQVNGLTSIKWADNNCYLATALLTLQQIELKFNPPALQDAYYRARAGEAANFCALILAYCNKTVGELGDVRETMSYLFQHANLDSCKRVLNVVCKTCGQQQTTLKGVEAVMYMGTLSYEQFKKGVQIPCTCGKQATKYLVQQESPFVMMSAPPAQYELKHGTFTCASEYTGNYQCGHYKHITSKETLYCIDGALLTKSSEYKGPITDVFYKENSYTTTIKPVTYKLDGVVCTEIDPKLDNYYKKDNSYFTEQPIDLVPNQPYPNASSDNFKFVCDNIKFADDLNQLTGYKKPASRELKVTFFPDLNGDVVAIDYKHYTPSFKKGAKLLHKPIVWHVNNATNKATYKPNTWCIRCLWSTKPVETSNSFDVLKSEDAQGMDNLACEDLKPVSEEVVENPTIQKDVLECNVKTTEVVGDIILKPANNSLKITEEVGHTDLMAAYVDNSSLTIKKPNELSRVLGLKTLATHGLAAVNSVPWDTIANYAKPFLNKVVSTTTNIVTRCLNRVCTNYMPYFFTLLLQLCTFTRSTNSRIKASMPTTIAKNTVKSVGKFCLEASFNYLKSPNFSKLINIIIWFLLLSVCLGSLIYSTAALGVLMSNLGMPSYCTGYREGYLNSTNVTIATYCTGSIPCSVCLSGLDSLDTYPSLETIQITISSFKWDLTAFGLVAEWFLAYILFTRFFYVLGLAAIMQLFFSYFAVHFISNSWLMWLIINLVQMAPISAMVRMYIFFASFYYVWKSYVHVVDGCNSSTCMMCYKRNRATRVECTTIVNGVRRSFYVYANGGKGFCKLHNWNCVNCDTFCAGSTFISDEVARDLSLQFKRPINPTDQSSYIVDSVTVKNGSIHLYFDKAGQKTYERHSLSHFVNLDNLRANNTKGSLPINVIVFDGKSKCEESSAKSASVYYSQLMCQPILLLDQALVSDVGDSAEVAVKMFDAYVNTFSSTFNVPMEKLKTLVATAEAELAKNVSLDNVLSTFISAARQGFVDSDVETKDVVECLKLSHQSDIEVTGDSCNNYMLTYNKVENMTPRDLGACIDCSARHINAQVAKSHNIALIWNVKDFMSLSEQLRKQIRSAAKKNNLPFKLTCATTRQVVNVVTTKIALKGG

SEQ ID NO: 15992 - protein, 1946 aa, Artificial Sequence
  SARS-CoV-2__MT811483.1__non-structural protein 3 (NSP3)
MAPTKVTFGDDTVIEVQGYKSVNITFELDERIDKVLNEKCSAYTVELGTEVNEFACVVADAVIKTLQPVSELLTPLGIDLDEWSMATYYLFDESGEFKLASHMYCSFYPPDEDEEEGDCEEEEFEPSTQYEYGTEDDYQGKPLEFGATSAALQPEEEQEEDWLDDDSQQTVGQQDGSEDNQTTTIQTIVEVQPQLEMELTPVVQTIEVNSFSGYLKLTDNVYIKNADIVEEAKKVKPTVVVNAANVYLKHGGGVAGALNKATNNAMQVESDDYIATNGPLKVGGSCVLSGHNLAKHCLHVVGPNVNKGEDIQLLKSAYENFNQHEVLLAPLLSAGIFGADPIHSLRVCVDTVRTNVYLAVFDKNLYDKLVSSFLEMKSEKQVEQKIAEIPKEEVKPFITESKPSVEQRKQDDKKIKACVEEVTTTLEETKFLTENLLLYIDINGNLHPDSATLVSDIDITFLKKDAPYIVGDVVQEGVLTAVVIPTKKAGGTTEMLAKALRKVPTDNYITTYPGQGLNGYTVEEAKTVLKKCKSAFYILPSIISNEKQEILGTVSWNLREMLAHAEETRKLMPVCVETKAIVSTIQRKYKGIKIQEGVVDYGARFYFYTSKTTVASLINTLNDLNETLVTMPLGYVTHGLNLEEAARYMRSLKVPATVSVSSPDAVTAYNGYLTSSSKTPEEHFIETISLAGSYKDWSYSGQSTQLGIEFLKRGDKSVYYTSNPTTFHLDGEVITFYNLKTLLSLREVRTIKVFTTVDNINLHTQVVDMSMTYGQQFGPTYLDGADVTKIKPHNSHEGKTFYVLPNDDTLRVEAFEYYHTTDPSFLGRYMSALNHTKKWKYPQVNGLTSIKWADNNCYLATALLTLQQIELKFNPPALQDAYYRARAGEAANFCALILAYCNKTVGELGDVRETMSYLFQHANLDSCKRVLNVVCKTCGQQQTTLKGVEAVMYMGTLSYEQFKKGVQIPCTCGKQATKYLVQQESPFVMMSAPPAQYELKHGTFTCASEYTGNYQCGHYKHITSKETLYCIDGALLTKSSEYKGPITDVFYKENSYTTTIKPVTYKLDGVVCTEIDPKLDNYYKKDNSYFTEQPIDLVPNQPYPNASFDNFKFVCDNIKFADDLNQLTGYKKPASRELKVTFFPDLNGDVVAIDYKHYTPSFKKGAKLLHKPIVWHVNNATNKATYKPNTWCIRCLWSTKPVETSNSFDVLKSEDAQGMDNLACEDLKPVSEEVVENPTIQKDVLECNVKTTEVVGDIILKPANNSLKITEEVGHTDLMAAYVDNSSLTIKKPNELSRVLGLKTLATHGLAAVNSVPWDTIANYAKPFLNKVVSTTTNIVTRCLNRVCTNYMPYFFTLLLQLCTFTRSTNSRIKASMPTTIAKNTVKSVGKFCLEASFNYLKSPNFSKLINIIIWFLLLSVCLGSLIYSTAALGVLMSNLGMPSYCTGYREGYLNSTNVTIATYCTGSIPCSVCLSGLDSLDTYPSLETIQITISSFKWDLTAFGLVAEWFLAYILFTRFFYVLGLAAIMQLFFSYFAVHFISNSWLMWLIINLVQMAPISAMVRMYIFFASFYYVWKSYVHVVDGCNSSTCMMCYKRNRATRVECTTIVNGVRRSFYVYANGGKGFCKLHNWNCVNCDTFCAGSTFISDEVARDLSLQFKRPINPTDQSSYIVDSVTVKNGSIHLYFDKAGQKTYERHSLSHFVNLDNLRANNTKGSLPINVIVFDGKSKCEESSAKSASVYYSQLMCQPILLLDQALVSDVGDSAEVAVKMFDAYVNTFSSTFNVPMEKLKTLVATAEAELAKNVSLDNVLSTFISAARQGFVDSDVETKDVVECLKLSHQSDIEVTGDSCNNYMLTYNKVENMTPRDLGACIDCSARHINAQVAKSHNIALIWNVKDFMSLSEQLRKQIRSAAKKNNLPFKLTCATTRQVVNVVTTKIALKGG

SEQ ID NO: 15993 - protein, 1946 aa, Artificial Sequence
  SARS-CoV-2__MT811485.1__non-structural protein 3 (NSP3)
MAPTKVTFGDDTVIEVQGYKSVNITFELDERIDKVLNEKCSAYTVELGTEVNEFACVVADAVIKTLQPVSELLTPLGIDLDEWSMATYYLFDESGEFKLASHMYCSFYPPDEDEEEGDCEEEEFEPSTQYEYGTEDDYQGKPLEFGATSAALQPEEEQEEDWLDDDSQQTVGQQDGSEDNQTTTIQTIVEVQPQLEMELTPVVQTIEVNSFSGYLKLTDNVYIKNADIVEEAKKVKPTVVVNAANVYLKHGGGVAGALNKATNNAMQVESDDYIATNGPLKVGGSCVLSGHNLAKHCLHVVGPNVNKGEDIQLLKSAYENFNQHEVLLAPLLSAGIFGADPIHSLRVCVDTVRTNVYLAVFDKNLYDKLVSSFLEMKSEKQVEQKIAEIPKEEVKPFITESKPSVEQRKQDDKKIKACVEEVTTTLEETKFLTENLLLYIDINGNLHPDSATLVSDIDITFLKKDAPYIVGDVVQEGVLTAVVIPTKKAGGTTEMLAKALRKVPTDNYITTYPGQGLNGYTVEEAKTVLKKCKSAFYILPSIISNEKQEILGTVSWNLREMLAHAEETRKLMPVCVETKAIVSTIQRKYKGIKIQEGVVDYGARFYFYTSKTTVASLINTLNDLNETLVTMPLGYVTHGLNLEEAARYMRSLKVPATVSVSSPDAVTAYNGYLTSSSKTPEEHFIETISLAGSYKDWSYSGQSTQLGIEFLKRGDKSVYYTSNPTTFHLDGEVITFDNLKTLLSLREVRTIKVFTTVDNINLHTQVVDMSMTYGQQFGPTYLDGADVTKIKPHNSHEGKTFYVLPNDDTLRVEAFEYYHTTDPSFLGRYMSALNHTKKWKYPQVNGLTSIKWADNNCYLATALLTLQQIELKFNPPALQDAYYRARAGEAANFCALILAYCNKTVGELGDVRETMSYLFQHANLDSCKRVLNVVCKTCGQQQTTLKGVEAVMYMGTLSYEQFKKGVQIPCTCGKQATKYLVQQESPFVMMSAPPAQYELKHGTFTCASEYTGNYQCGHYKHITSKETLYCIDGALLTKSSEYKGPITDVFYKENSYTTTIKPVTYKLDGVVCTEIDPKLDNYYKKDNSYFTEQPIDLVPNQPYPNASFDNFKFVCDNIKFADDLNQLTGYKKPASRELKVTFFPDLNGDVVAIDYKHYTPSFKKGAKLLHKPIVWHVNNATNKATYKPNTWCIRCLWSTKPVETSNSFDVLKSEDAQGMDNLACEDLKPVSEEVVKNPTIQKDVLECNVKTTEVVGDIILKPANNSLKITEEVGHTDLMAAYVDNSSLTIKKPNELSRVLGLKTLATHGLAAVNSVPWDTIANYAKPFLNKVVSTTTNIVTRCLNRVCTNYMPYFFTLLLQLCTFTRSTNSRIKASMPTTIAKNTVKSVGKFCLEASFNYLKSPNFSKLINIIIWFLLLSVCLGSLIYSTAALGVLMSNLGMPSYCTGYREGYLNSTNVTIATYCTGSIPCSVCLSGLDSLDTYPSLETIQITISSFKWDLTAFGLVAEWFLAYILFTRFFYVLGLAAIMQLFFSYFAVHFISNSWLMWLIINLVQMAPISAMVRMYIFFASFYYVWKSYVHVVDGCNSSTCMMCYKRNRATRVECTTIVNGVRRSFYVYANGGKGFCKLHNWNCVNCDTFCAGSTFISDEVARDLSLQFKRPINPTDQSSYIVDSVTVKNGSIHLYFDKAGQKTYERHSLSHFVNLDNLRANNTKGSLPINVIVFDGKSKCEESSAKSASVYYSQLMCQPILLLDQALVSDVGDSAEVAVKMFDAYVNTFSSTFNVPMEKLKTLVATAEAELAKNVSLDNVLSTFISAARQGFVDSDVETKDVVECLKLSHQSDIEVTGDSCNNYMLTYNKVENMTPRDLGACIDCSARHINAQVAKSHNIALIWNVKDFMSLSEQLRKQIRSAAKKNNLPFKLTCATTRQVVNVVTTKIALKGG

SEQ ID NO: 15994 - protein, 1946 aa, Artificial Sequence
  SARS-CoV-2__MT811487.1__non-structural protein 3 (NSP3)
MAPTKVTFGDDTVIEVQGYKSVNITFELDERIDKVLNEKCSAYTVELGTEVNEFACVVADAVIKTLQPVSELLTPLGIDLDEWSMATYYLFDESGEFKLASHMYCSFYPPDEDEEEGDCEEEEFEPSTQYEYGTEDDYQGKPSEFGATSAALQPEEEQEEDWLDDDSQQTVGQQDGSEDNQTTTIQTIVEVQPQLEMELTPVVQTIEVNSFSGYLKLTDNVYIKNADIVEEAKKVKPTVVVNAANVYLKHGGGVAGALNKATNNAMQVESDDYIATNGPLKVGGSCVLSGHNLAKHCLHVVGPNVNKGEDIQLLKSAYENFNQHEVLLAPLLSAGIFGADPIHSLRVCVDTVRTNVYLAVFDKNLYDKLVSSFLEMKSEKQVEQKIAEIPKEEVKPFITESKPSVEQRKQDDKKIKACVEEVTTTLEETKFLTENLLLYIDINGNLHPDSATLVSDIDITFLKKDAPYIVGDVVQEGVLTAVVIPTKKAGGTTEMLAKALRKVPTDNYITTYPGQGLNGYTVEEAKTVLKKCKSAFYILPSIISNEKQEILGTVSWNLREMLAHAEETRKLMPVCVETKAIVSTIQRKYKGIKIQEGVVDYGARFYFYTSKTTVASLINTLNDLNETLVTMPLGYVTHGLNLEEAARYMRSLKVPATVSVSSPDAVTAYNGYLTSSSKTPEEHFIETISLAGSYKDWSYSGQSTQLGIEFLKRGDKSVYYTSNPTTFHLDGEVITFDNLKTLLSLREVRTIKVFTTVDNINLHTQVVDMSMTYGQQFGPTYLDGADVTKIKPHNSHEGKTFYVLPNDDTLRVEAFEYYHTTDPSFLGRYMSALNHTKKWKYPQVNGLTSIKWADNNCYLATALLTLQQIELKFNPPALQDAYYRARAGEAANFCALILAYCNKTVGELGDVRETMSYLFQHANLDSCKRVLNVVCKTCGQQQTTLKGVEAVMYMGTLSYEQFKKGVQIPCTCGKQATKYLVQQESPFVMMSAPPAQYELKHGTFTCASEYTGNYQCGHYKHITSKETLYCIDGALLTKSSEYKGPITDVFYKENSYTTTIKPVTYKLDGVVCTEIDPKLDNYYKKDNSYFTEQPIDLVPNQPYPNASFDNFKFVCDNIKFADDLNQLTGYKKPASRELKVTFFPDLNGDVVAIDYKHYTPSFKKGAKLLHKPIVWHVNNATNKATYKPNTWCIRCLWSTKPVETSNSFDVLKSEDAQGMDNLACEDLKPVSEEVVENPTIQKDVLECNVKTTEVVGDIILKPANNSLKITEEVGHTDLMAAYVDNSSLTIKKPNELSRVLGLKTLATHGLAAVNSVPWDTIANYAKPFLNKVVSTTTNIVTRCLNRVCTNYMPYFFTLLLQLCTFTRSTNSRIKASMPTTIAKNTVKSVGKFCLEASFNYLKSPNFSKLINIIIWFLLLSVCLGSLIYSTAALGVLMSNLGMPSYCTGYREGYLNSTNVTIATYCTGSIPCSVCLSGLDSLDTYPSLETIQITISSFKWDLTAFGLVAEWFLAYILFTRFFYVLGLAAIMQLFFSYFAVHFISNSWLMWLIINLVQMAPISAMVRMYIFFASFYYVWKSYVHVVDGCNSSTCMMCYKRNRATRVECTTIVNGVRRSFYVYANGGKGFCKLHNWNCVNCDTFCAGSTFISDEVARDLSLQFKRPINPTDQSSYIVDSVTVKNGSIHLYFDKAGQKTYERHSLSHFVNLDNLRANNTKGSLPINVIVFDGKSKCEESSAKSASVYYSQLMCQPILLLDQALVSDVGDSAEVAVKMFDAYVNTFSSTFNVPMEKLKTLVATAEAELAKNVSLDNVLSTFISAARQGFVDSDVETKDVVECLKLSHQSDIEVTGDSCNNYMLTYNKVENMTPRDLGACIDCSARHINAQVAKSHNIALIWNVKDFMSLSEQLRKQIRSAAKKNNLPFKLTCATTRQVVNVVTTKIALKGG

SEQ ID NO: 15995 - protein, 1946 aa, Artificial Sequence
  SARS-CoV-2__MT811489.1__non-structural protein 3 (NSP3)
MAPTKVTFGDDTVIEVQGYKSVNITFELDERIDKVLNEKCSAYTVELGTEVNEFACVVADAVIKTLQPVSELLTPLGIDLDEWSMATYYLFDESGEFKLASHMYCSFYPPDEDEEEGDCEEEEFEPSTQYEYGTEDDYQGKPLEFGATSAALQPEEEQEEDWLDDDSQQTVGQQDGSEDNQTTTIQTIVEVQPQLEMELTPVVQTIEVNSFSGYLKLTDNVYIKNADIVEEAKKVKPTVVVNAANVYLKHGGGVAGALNKATNNAMQVESDDYIATNGPLKVGGSCVLSGHNLAKHCLHVVGPNVNKGEDIQLLKSAYENFNQHEVLLAPLLSAGIFGADPIHSLRVCVDTVRTNVYLAVFDKNLYDKLVSSFLEMKSEKQVEQKIAEIPKEEVKPFITESKPSVEQRKQDDKKIKACVEEVTTTLEETKFLTENLLLYIDINGNLHPDSATLVSDIDITFLKKDAPYIVGDVVQEGVLTAVVIPTKKAGGTTEMLAKALRKVPTDNYITTYPGQGLNGYTVEEAKTVLKKCKSAFYILPSIISNEKQEILGTVSWNLREMLAHAEETRKLMPVCVETKAIVSTIQRKYKGIKIQEGVVDYGARFYFYTSKTTVASLINTLNDLNETLVTMPLGYVTHGLNLEEAARYMRSLKVPATVSVSSPDAVTAYNGYLTSSSKTPEEHFIETISLAGSYKDWSYSGQSTQLGIEFLKRGDKSVYYTSNPTTFHLDGEVITFDNLKTLLSLREVRTIKVFTTVDNINLHTQVVDMSMTYGQQFGPTYLDGADVTKIKPHNSHEGKTFYVLPNDDTLRVEAFEYYHTTDPSFLGRYMSALNHTKKWKYPQVNGLTSIKWADNNCYLATALLTLQQIELKFNPPALQDAYYRARAGEAANFCALILAYCNKTVGELGDVRETMSYLFQHANLDSCKRVLNVVCKTCGQQQTTLKGVEAVMYMGTLSYEQFKKGVQIPCTCGKQATKYLVQQESPFVMMSAPPAQYELKHGTFTCASEYTGNYQCGHYKHITSKETLYCIDGALLTKSSEYKGPITDVFYKENSYTTTIKPVTYKLDGVVCTEIDPKLDNYYKKDNSYFTEQPIDLVPNQPYPNASFDNFKFVCDNIKFADDLNQLTGYKKPASRELKVTFFPDLNGDVVAIDYKHYTPSFKKGAKLLHKPIVWHVNNATNKATYKPNTWCIRCLWSTKPVETSNSFDVLKSEGAQGMDNLACEDLKPVSEEVVENPTIQKDVLECNVKTTEVVGDIILKPANNSLKITEEVGHTDLMAAYVDNSSLTIKKPNELSRVLGLKTLATHGLAAVNSVPWDTIANYAKPFLNKVVSTTTNIVTRCLNRVCTNYMPYFFTLLLQLCTFTRSTNSRIKASMPTTIAKNTVKSVGKFCLEASFNYLKSPNFSKLINIIIWFLLLSVCLGSLIYSTAALGVLMSNLGMPSYCTGYREGYLNSTNVTIATYCTGSIPCSVCLSGLDSLDTYPSLETIQITISSFKWDLTAFGLVAEWFLAYILFTRFFYVLGLAAIMQLFFSYFAVHFISNSWLMWLIINLVQMAPISAMVRMYIFFASFYYVWKSYVHVVDGCNSSTCMMCYKRNRATRVECTTIVNGVRRSFYVYANGGKGFCKLHNWNCVNCDTFCAGSTFISDEVARDLSLQFKRPINPTDQSSYIVDSVTVKNGSIHLYFDKAGQKTYERHSLSHFVNLDNLRANNTKGSLPINVIVFDGKSKCEESSAKSASVYYSQLMCQPILLLDQALVSDVGDSAEVAVKMFDAYVNTFSSTFNVPMEKLKTLVATAEAELAKNVSLDNVLSTFISAARQGFVDSDVETKDVVECLKLSHQSDIEVTGDSCNNYMLTYNKVENMTPRDLGACIDCSARHINAQVAKSHNIALIWNVKDFMSLSEQLRKQIRSAAKKNNLPFKLTCATTRQVVNVVTTKIALKGG

SEQ ID NO: 15996 - protein, 1946 aa, Artificial Sequence
  SARS-CoV-2__MT811494.1__non-structural protein 3 (NSP3)
MAPTKVTFGDDTVIEVQGYKSVNITFELDERIDKVLNEKCSAYTVELGTEVNEFACVVADAVIKTLQPVSELLTPLGIDLDEWSMATYYLFDESGEFKLASHMYCSFYPPDEDEEEGDCEEEEFEPSTQYEYGTEDDYQGKPLEFGATSAALQPEEEQEEDWLDDDSQQTVGQQDGSEDNQTTTIQTIVEVQPQLEMELTPVVQTIEVNSFSGYLKLTDNVYIKNADIVEEAKKVKPTVVVNAANVYLKHGGGVAGALNKATNNAMQVESDDYIATNGPLKVGGSCVLSGHNLAKHCLHVVGPNVNKGEDIQLLKSAYENFNQHEVLLAPLLSAGIFGADPIHSLRVCVDTVRTNVYLAVFDKNLYDKLVSSFLEMKSEKQVEQKIAEIPKEEVKPFITESKPSVEQRKQDDKKIKACFEEVTTTLEETKFLTENLLLYIDINGNLHPDSATLVSDIDITFLKKDAPYIVGDVVQEGVLTAVVIPTKKAGGTTEMLAKALRKVPTDNYITTYPGQGLNGYTVEEAKTVLKKCKSAFYILPSIISNEKQEILGTVSWNLREMLAHAEETRKLMPVCVETKAIVSTIQRKYKGIKIQEGVVDYGARFYFYTSKTTVASLINTLNDLNETLVTMPLGYVTHGLNLEEAARYMRSLKVPATVSVSSPDAVTAYNGYLTSSSKTPEEHFIETISLAGSYKDWSYSGQSTQLGIEFLKRGDKSVYYTSNPTTFHLDGEVITFDNLKTLLSLREVRTIKVFTTVDNINLHTQVVDMSMTYGQQFGPTYLDGADVTKIKPHNSHEGKTFYVLPNDDTLRVEAFEYYHTTDPSFLGRYMSALNHTKKWKYPQVNGLTSIKWADNNCYLATALLTLQQIELKFNPPALQDAYYRARAGEAANFCALILAYCNKTVGELGDVRETMSYLFQHANLDSCKRVLNVVCKTCGQQQTTLKGVEAVMYMGTLSYEQFKKGVQIPCTCGKQATKYLVQQESPFVMMSAPPAQYELKHGTFTCASEYTGNYQCGHYKHITSKETLYCIDGALLTKSSEYKGPITDVFYKENSYTTTIKPVTYKLDGVVCTEIDPKLDNYYKKDNSYFTEQPIDLVPNQPYPNASFDNFKFVCDNIKFADDLNQLTGYKKPASRELKVTFFPDLNGDVVAIDYKHYTPSFKKGAKLLHKPIVWHVNNATNKATYKPNTWCIRCLWSTKPVETSNSFDVLKSEDAQGMDNLACEDLKPVSEEVVENPTIQKDVLECNVKTTEVVGDIILKPANNSLKITEEVGHTDLMAAYVDNSSLTIKKPNELSRVLGLKTLATHGLAAVNSVPWDTIANYAKPFLNKVVSTTTNIVTRCLNRVCTNYMPYFFTLLLQLCTFTRSTNSRIKASMPTTIAKNTVKSVGKFCLEASFNYLKSPNFSKLINIIIWFLLLSVCLGSLIYSTAALGVLMSNLGMPSYCTGYREGYLNSTNVTIATYCTGSIPCSVCLSGLDSLDTYPSLETIQITISSFKWDLTAFGLVAEWFLAYILFTRFFYVLGLAAIMQLFFSYFAVHFISNSWLMWLIINLVQMAPISAMVRMYIFFASFYYVWKSYVHVVDGCNSSTCMMCYKRNRATRVECTTIVNGVRRSFYVYANGGKGFCKLHNWNCVNCDTFCAGSTFISDEVARDLSLQFKRPINPTDQSSYIVDSVTVKNGSIHLYFDKAGQKTYERHSLSHFVNLDNLRANNTKGSLPINVIVFDGKSKCEESSAKSASVYYSQLMCQPILLLDQALVSDVGDSAEVAVKMFDAYVNTFSSTFNVPMEKLKTLVATAEAELAKNVSLDNVLSTFISAARQGFVDSDVETKDVVECLKLSHQSDIEVTGDSCNNYMLTYNKVENMTPRDLGACIDCSARHINAQVAKSHNIALIWNVKDFMSLSEQLRKQIRSAAKKNNLPFKLTCATTRQVVNVVTTKIALKGG

SEQ ID NO: 15997 - protein, 1946 aa, Artificial Sequence
  SARS-CoV-2__MT811496.1__non-structural protein 3 (NSP3)
MAPTKVTFGDDTVIEVQGYKSVNITFELDERIDKVLNEKCSAYTVELGTEVNEFACVVADAVIKTFQPVSELLTPLGIDLDEWSMATYYLFDESGEFKLASHMYCSFYPPDEDEEEGDCEEEEFEPSTQYEYGTEDDYQGKPLEFGATSAALQPEEEQEEDWLDDDSQQTVGQQDGSEDNQTTTIQTIVEVQPQLEMELTPVVQTIEVNSFSGYLKLTDNVYIKNADIVEEAKKVKPTVVVNAANVYLKHGGGVAGALNKATNNAMQVESDDYIATNGPLKVGGSCVLSGHNLAKHCLHVVGPNVNKGEDIQLLKSAYENFNQHEVLLAPLLSAGIFGADPIHSLRVCVDTVRTNVYLAVFDKNLYDKLVSSFLEMKSEKQVEQKIAEIPKEEVKPFITESKPSVEQRKQDDKKIKACVEEVTTTLEETKFLTENLLLYIDINGNLHPDSATLVSDIDITFLKKDAPYIVGDVVQEGVLTAVVIPTKKAGGTTEMLAKALRKVPTDNYITTYPGQGLNGYTVEEAKTVLKKCKSAFYILPSIISNEKQEILGTVSWNLREMLAHAEETRKLMPVCVETKAIVSTIQRKYKGIKIQEGVVDYGARFYFYTSKTTVASLINTLNDLNETLVTMPLGYVTHGLNLEEAARYMRSLKVPATVSVSSPDAVTAYNGYLTSSSKTPEEHFIETISLAGSYKDWSYSGQSTQLGIEFLKRGDKSVYYTSNPTTFHLDGEVITFDNLKTLLSLREVRTIKVFTTVDNINLHTQVVDMSMTYGQQFGPTYLDGADVTKIKPHNSHEGKTFYVLPNDDTLRVEAFEYYHTTDPSFLGRYMSALNHTKKWKYPQVNGLTSIKWADNNCYLATALLTLQQIELKFNPPALQDAYYRARAGEAANFCALILAYCNKTVGELGDVRETMSYLFQHANLDSCKRVLNVVCKTCGQQQTTLKGVEAVMYMGTLSYEQFKKGVQIPCTCGKQATKYLVQQESPFVMMSAPPAQYELKHGTFTCASEYTGNYQCGHYKHITSKETLYCIDGALLTKSSEYKGPITDVFYKENSYTTTIKPVTYKLDGVVCTEIDPKLDNYYKKDNSYFTEQPIDLVPNQPYPNASFDNFKFVCDNIKFADDLNQLTGYKKPASRELKVTFFPDLNGDVVAIDYKHYTPSFKKGAKLLHKPIVWHVNNATNKATYKPNTWCIRCLWSTKPVETSNSFDVLKSEDAQGMDNLACEDLKPVSEEVVENPTIQKDVLECNVKTTEVVGDIILKPANNSLKITEEVGHTDLMAAYVDNSSLTIKKPNELSRVLGLKTLATHGLAAVNSVPWDTIANYAKPFLNKVVSTTTNIVTRCLNRVCTNYMPYFFTLLLQLCTFTRSTNSRIKASMPTTIAKNTVKSVGKFCLEASFNYLKSPNFSKLINIIIWFLLLSVCLGSLIYSTAALGVLMSNLGMPSYCTGYREGYLNSTNVTIATYCTGSIPCSVCLSGLDSLDTYPSLETIQITISSFKWDLTAFGLVAEWFLAYILFTRFFYVLGLAAIMQLFFSYFAVHFISNSWLMWLIINLVQMAPISAMVRMYIFFASFYYVWKSYVHVVDGCNSSTCMMCYKRNRATRVECTTIVNGVRRSFYVYANGGKGFCKLHNWNCVNCDTFCAGSTFISDEVARDLSLQFKRPINPTDQSSYIVDSVTVKNGSIHLYFDKAGQKTYERHSLSHFVNLDNLRANNTKGSLPINVIVFDGKSKCEESSAKSASVYYSQLMCQPILLLDQALVSDVGDSAEVAVKMFDAYVNTFSSTFNVPMEKLKTLVATAEAELAKNVSLDNVLSTFISAARQGFVDSDVETKDVVECLKLSHQSDIEVTGDSCNNYMLTYNKVENMTPRDLGACIDCSARHINAQVAKSHNIALIWNVKDFMSLSEQLRKQIRSAAKKNNLPFKLTCATTRQVVNVVTTKIALKGG

SEQ ID NO: 15998 - protein, 1946 aa, Artificial Sequence
  SARS-CoV-2__MT811506.1__non-structural protein 3 (NSP3)
MAPTKVTFGDDTVIEVQGYKSVNITFELDERIDKVLNEKCSAYTVELGTEVNEFACVVADAVIKTLQPVSELLTPLGIDLDEWSMATYYLFDESGEFKLASHMYCSFYPPDEDEEEGDCEEEEFEPSTQYEYGTEDDYQGKPLEFGATSAALQPEEEQEEDWLDDDSQQTVGQQDGSEDNQTTTIQTIVEVQPQLEMELTPVVQTIEVNSFSGYLKLTDNVYIKNADIVEEAKKVKPTVVVNAANVYLKHGGGVAGALNKATNNAMQVESDDYIATNGPLKVGGSCVLSGHNLAKHCLHVVGPNVNKGEDIQLLKSAYENFNQHEVLLAPLLSAGIFGADPIHSLRVCVDTVRTNVYLAVFDKNLYDKLVSSFLEMKSEKQVEQKIAEIPKEEVKPFITESKPSVEQRKQDDKKIKACVEEVTTTLEETKFLTENLLLYIDINGNLHPDSATLVSDIDITFLKKDAPYIVGDVVQEGVLTAVVIPTKKAGGTTEMLAKALRKVPTDNYITTYPGQGLNGYTVEEAKTVLKKCKSAFYILPSIISNEKQEILGTVSWNLREMLAHAEETRKLMPVCVETKAIVSTIQRKYKGIKIQEGVVDYGARFYFYTSKTTVASLINTLNDLNETLVTMPLGYVTHGLNLEEAARYMRSLKVPATVSVSSPDAVTAYNGYLTSSSKTPEEHFIETISLAGSYKDWSYSGQSTQLGIEFLKRGDKSVYYTSNPTTFHLDGEVITFDNLKTLLSLREVRTIKVFTTVDNINLHTQVVDMSMTYGQQFGPTYLDGADVTKIKPHNSHEGKTFYVLPNDDTLRVEAFEYYHTTDPSFLGRYMSALNHTKKWKYPQVNGLTSIKWADNNCYLATALLTLQQIELKFNPPALQDAYYRARAGEAANFCALILAYCNKTVGELGDVRETMSYLFQHANLDSCKRVLNVVCKTCGQQQTTLKGVEAVMYMGTLSYEQFKKGVQIPCTCGKQATKYLVQQESPFVMMSAPPAQYELKHGTFTCASEYTGNYQCGHYKHITSKETLYCIDGALLTKSSEYKGPITDVFYKENSYTTTIKPVTYKLDGVVCTEIDPKLDNYYKKDNSYFTEQPIDLVPNQPYPNASFDNFKFVCDNIKFADDLNQLTGYKKPASRELKVTFFPDLNGDVVAIDYKHYTPSFKKGAKLLHKPIVWHVNNATNKATYKPNTWCIRCLWSTKPVETSNSFDVLKSEDAQGMDNLACEDLKPVSEEVVENPTIQKDVLECNVKTTEVVGDIILKPANNSLKITEEVGHTDLMAAYVDNSSLTIKKPNELSRVLGLKTLVTHGLAAVNSVPWDTIANYAKPFLNKVVSTTTNIVTRCLNRVCTNYMPYFFTLLLQLCTFTRSTNSRIKASMPTTIAKNTVKSVGKFCLEASFNYLKSPNFSKLINIIIWFLLLSVCLGSLIYSTAALGVLMSNLGMPSYCTGYREGYLNSTNVTIATYCTGSIPCSVCLSGLDSLDTYPSLETIQITISSFKWDLTAFGLVAEWFLAYILFTRFFYVLGLAAIMQLFFSYFAVHFISNSWLMWLIINLVQMAPISAMVRMYIFFASFYYVWKSYVHVVDGCNSSTCMMCYKRNRATRVECTTIVNGVRRSFYVYANGGKGFCKLHNWNCVNCDTFCAGSTFISDEVARDLSLQFKRPINPTDQSSYIVDSVTVKNGSIHLYFDKAGQKTYERHSLSHFVNLDNLRANNTKGSLPINVIVFDGKSKCEESSAKSASVYYSQLMCQPILLLDQALVSDVGDSAEVAVKMFDAYVNTFSSTFNVPMEKLKTLVATAEAELAKNVSLDNVLSTFISAARQGFVDSDVETKDVVECLKLSHQSDIEVTGDSCNNYMLTYNKVENMTPRDLGACIDCSARHINAQVAKSHNIALIWNVKDFMSLSEQLRKQIRSAAKKNNLPFKLTCATTRQVVNVVTTKIALKGG

SEQ ID NO: 15999 - protein, 1946 aa, Artificial Sequence
  SARS-CoV-2__MT811507.1__non-structural protein 3 (NSP3)
MAPTKVTFGDDTVIEVQGYKSVNITFELDERIDKVLNEKCSAYTVELGTEVNEFACVVADAVIKTLQPVSELLTPLGIDLDEWSMATYYLFDESGEFKLASHMYCSFYPPDEDEEEGDCEEEEFEPSTQYEYGTEDDYQGKPLEFGATSAALQPEEEQEEDWLDDDSQQTVGQQDGSEDNQTTTIQTIVEVQPQLEMELTPVVQTIEVNSFSGYLKLTDNVYIKNADIVEEAKKVKPTVVVNAANVYLKHGGGVAGALNKATNNAMQVESDDYIATNGPLKVGGSCVLSGHNLAKHCLHVVGPNVNKGEDIQLLKSAYENFNQHEVLLAPLLSAGIFGADPIHSLRVCVDTVRTNVYLAVFDKNLYDKLVSSFLEMKSEKQVEQKIAEIPKEEVKPFITESKPSVEQRKQDDKKIKACVEEVTITLEETKFLTENLLLYIDINGNLHPDSATLVSDIDITFLKKDAPYIVGDVVQEGVLTAVVIPTKKAGGTTEMLAKALRKVPTDNYITTYPGQGLNGYTVEEAKTVLKKCKSAFYILPSIISNEKQEILGTVSWNLREMLAHAEETRKLMPVCVETKAIVSTIQRKYKGIKIQEGVVDYGARFYFYTSKTTVASLINTLNDLNETLVTMPLGYVTHGLNLEEAARYMRSLKVPATVSVSSPDAVTAYNGYLTSSSKTPEEHFIETISLAGSYKDWSYSGQSTQLGIEFLKRGDKSVYYTSNPTTFHLDGEVITFDNLKTLLSLREVRTIKVFTTVDNINLHTQVVDMSMTYGQQFGPTYLDGADVTKIKPHNSHEGKTFYVLPNDDTLRVEAFEYYHTTDPSFLGRYMSALNHTKKWKYPQVNGLTSIKWADNNCYLATALLTLQQIELKFNPPALQDAYYRARAGEAANFCALILAYCNKTVGELGDVRETMSYLFQHANLDSCKRVLNVVCKTCGQQQTTLKGVEAVMYMGTLSYEQFKKGVQIPCTCGKQATKYLVQQESPFVMMSAPPAQYELKHGTFTCASEYTGNYQCGHYKHITSKETLYCIDGALLTKSSEYKGPITDVFYKENSYTTTIKPVTYKLDGVVCTEIDPKLDNYYKKDNSYFTEQPIDLVPNQPYPNASFDNFKFVCDNIKFADDLNQLTGYKKPASRELKVTFFPDLNGDVVAIDYKHYTPSFKKGAKLLHKPIVWHVNNATNKATYKPNTWCIRCLWSTKPVETSNSFDVLKSEDAQGMDNLACEDLKPVSEEVVENPTIQKDVLECNVKTTEVVGDIILKPANNSLKITEEVGHTDLMAAYVDNSSLTIKKPNELSRVLGLKTLATHGLAAVNSVPWDTIANYAKPFLNKVVSTTTNIVTRCLNRVCTNYMPYFFTLLLQLCTFTRSTNSRIKASMPTTIAKNTVKSVGKFCLEASFNYLKSPNFSKLINIIIWFLLLSVCLGSLIYSTAALGVLMSNLGMPSYCTGYREGYLNSTNVTIATYCTGSIPCSVCLSGLDSLDTYPSLETIQITISSFKWDLTAFGLVAEWFLAYILFTRFFYVLGLAAIMQLFFSYFAVHFISNSWLMWLIINLVQMAPISAMVRMYIFFASFYYVWKSYVHVVDGCNSSTCMMCYKRNRATRVECTTIVNGVRRSFYVYANGGKGFCKLHNWNCVNCDTFCAGSTFISDEVARDLSLQFKRPINPTDQSSYIVDSVTVKNGSIHLYFDKAGQKTYERHSLSHFVNLDNLRANNTKGSLPINVIVFDGKSKCEESSAKSASVYYSQLMCQPILLLDQALVSDVGDSAEVAVKMFDAYVNTFSSTFNVPMEKLKTLVATAEAELAKNVSLDNVLSTFISAARQGFVDSDVETKDVVECLKLSHQSDIEVTGDSCNNYMLTYNKVENMTPRDLGACIDCSARHINAQVAKSHNIALIWNVKDFMSLSEQLRKQIRSAAKKNNLPFKLTCATTRQVVNVVTTKIALKGG

SEQ ID NO: 16000 - protein, 1946 aa, Artificial Sequence
  SARS-CoV-2__MT811514.1__non-structural protein 3 (NSP3)
MAPTKVTFGDDTVIEVQGYKSVNITFELDERIDKVLNEKCSAYTVELGTEVNEFACVVADAVIKTLQPVSELLTPLGIDLDEWSMATYYLFDESGEFKLASHMYCSFYPPDEDEEEGDCEEEEFEPSTQYEYGTEDDYQGKPLEFGATSAALQPEEEQEEDWLDDDSQQTVGQQDGSEDNQTTTIQTIVEVQPQLEMELTPVVQTIEVNSFSGYLKLTDNVYIKNADIVEEAKKVKPTVVVNAANVYLKHGGGVAGALNKATNNAMQVESDDYIATNGPLKVGGSCVLSGHNLAKHCLHVVGPNVNKGEDIQLLKSAYENFNQHEVLLAPLLSAGIFGADPIHSLRVCVDTVRTNVYLAVFDKNLYDKLVSSFLEMKSEKQVEQKIAEIPKEEVKPFITESKPSVEQRKQDDKKIKACVEEVTTTLEETKFLTENLLLYIDINGNLHPDSATLVSDIDITFLKKDAPYIVGDVVQEGVLTAVVIPTKKAGGTTEMLAKALRKVPTDNYITTYPGQGLNGYTVEEAKTVLKKCKSAFYILPSIISNEKQEILGTVSWNLREMLAHAEETRKLMPVCVETKAIVSTIQRKYKGIKIQEGVVDYGARFYFYTSKTTVASLINTLNDLNETLVTMPLGYVTHGLNLEEAARYMRSLKVPATVSVSSPDAVTAYNGYLTSSSKTPEEHFIETISLAGSYKDWSYSGQSTQLGIEFLKRGDKSVYYTSNPTTFHLDGEVITFDNLKTLLSLREVRTIKVFTTVDNINLHTQVVDMSMTYGQQFGPTYLDGADVTKIKPHNSHEGKTFYVLPNDDTLRVEAFEYYHTTDPSFLGRYMSALNHTKKWKYPQVNGLTSIKWADNNCYLATALLTLQQIELKFNPPALQDAYYRARAGEAANFCALILAYCNKTVGELGDVRETMSYLFQHANLDSCKRVLNVVCKTCGQQQTTLKGVEAVMYMGTLSYEQFKKGVQIPCTCGKQATKYLVQQESPFVMMSAPPAHYELKHGTFTCASEYTGNYQCGHYKHITSKETLYCIDGALLTKSSEYKGPITDVFYKENSYTTTIKPVTYKLDGVVCTEIDPKLDNYYKKDNSYFTEQPIDLVPNQPYPNASFDNFKFVCDNIKFADDLNQLTGYKKPASRELKVTFFPDLNGDVVAIDYKHYTPSFKKGAKLLHKPIVWHVNNATNKATYKPNTWCIRCLWSTKPVETSNSFDVLKSEDAQGMDNLACEDLKPVSEEVVENPTIQKDVLECNVKTTEVVGDIILKPANNSLKITEEVGHTDLMAAYVDNSSLTIKKPNELSRVLGLKTLATHGLAAVNSVPWDTIANYAKPFLNKVVSTTTNIVTRCLNRVCTNYMPYFFTLLLQLCTFTRSTNSRIKASMPTTIAKNTVKSVGKFCLEASFNYLKSPNFSKLINIIIWFLLLSVCLGSLIYSTAALGVLMSNLGMPSYCTGYREGYLNSTNVTIATYCTGSIPCSVCLSGLDSLDTYPSLETIQITISSFKWDLTAFGLVAEWFLAYILFTRFFYVLGLAAIMQLFFSYFAVHFISNSWLMWLIINLVQMAPISAMVRMYIFFASFYYVWKSYVHVVDGCNSSTCMMCYKRNRATRVECTTIVNGVRRSFYVYANGGKGFCKLHNWNCVNCDTFCAGSTFISDEVARDLSLQFKRPINPTDQSSYIVDSVTVKNGSIHLYFDKAGQKTYERHSLSHFVNLDNLRANNTKGSLPINVIVFDGKSKCEESSAKSASVYYSQLMCQPILLLDQALVSDVGDSAEVAVKMFDAYVNTFSSTFNVPMEKLKTLVATAEAELAKNVSLDNVLSTFISAARQGFVDSDVETKDVVECLKLSHQSDIEVTGDSCNNYMLTYNKVENMTPRDLGACIDCSARHINAQVAKSHNIALIWNVKDFMSLSEQLRKQIRSAAKKNNLPFKLTCATTRQVVNVVTTKIALKGG

SEQ ID NO: 16001 - protein, 1946 aa, Artificial Sequence
  SARS-CoV-2__MT811515.1__non-structural protein 3 (NSP3)
MAPTKVTFGDDTVIEVQGYKSVNITFELDERIDKVLNEKCSAYTVELGTEVNEFACVVADAVIKTLQPVSELLTPLDIDLDEWSMATYYLFDESGEFKLASHMYCSFYPPDEDEEEGDCEEEEFEPSTQYEYGTEDDYQGKPLEFGATSAALQPEEEQEEDWLDDDSQQTVGQQDGSEDNQTTTIQTIVEVQPQLEMELTPVVQTIEVNSFSGYLKLTDNVYIKNADIVEEAKKVKPTVVVNAANVYLKHGGGVAGALNKATNNAMQVESDDYIATNGPLKVGGSCVLSGHNLAKHCLHVVGPNVNKGEDIQLLKSAYENFNQHEVLLAPLLSAGIFGADPIHSLRVCVDTVRTNVYLAVFDKNLYDKLVSSFLEMKSEKQVEQKIAEIPKEEVKPFITESKPSVEQRKQDDKKIKACVEEVTTTLEETKFLTENLLLYIDINGNLHPDSATLVSDIDITFLKKDAPYIVGDVVQEGVLTAVVIPTKKAGGTTEMLAKALRKVPTDNYITTYPGQGLNGYTVEEAKTVLKKCKSAFYILPSIISNEKQEILGTVSWNLREMLAHAEETRKLMPVCVETKAIVSTIQRKYKGIKIQEGVVDYGARFYFYTSKTTVASLINTLNDLNETLVTMPLGYVTHGLNLEEAARYMRSLKVPATVSVSSPDAVTAYNGYLTSSSKTPEEHFIETISLAGSYKDWSYSGQSTQLGIEFLKRGDKSVYYTSNPTTFHLDGEVITFDNLKTLLSLREVRTIKVFTTVDNINLHTQVVDMSMTYGQQFGPTYLDGADVTKIKPHNSHEGKTFYVLPNDDTLRVEAFEYYHTTDPSFLGRYMSALNHTKKWKYPQVNGLTSIKWADNNCYLATALLTLQQIELKFNPPALQDAYYRARAGEAANFCALILAYCNKTVGELGDVRETMSYLFQHANLDSCKRVLNVVCKTCGQQQTTLKGVEAVMYMGTLSYEQFKKGVQIPCTCGKQATKYLVQQESPFVMMSAPPAQYELKHGTFTCASEYTGNYQCGHYKHITSKETLYCIDGALLTKSSEYKGPITDVFYKENSYTTTIKPVTYKLDGVVCTEIDPKLDNYYKKDNSYFTEQPIDLVPNQPYPNASFDNFKFVCDNIKFADDLNQLTGYKKPASRELKVTFFPDLNGDVVAIDYKHYTPSFKKGAKLLHKPIVWHVNNATNKATYKPNTWCIRCLWSTKPVETSNSFDVLKSEDAQGMDNLACEDLKPVSEEVVENPTIQKDVLECNVKTTEVVGDIILKPANNSLKITEEVGHTDLMAAYVDNSSLTIKKPNELSRVLGLKTLATHGLAAVNSVPWDTIANYAKPFLNKVVSTTTNIVTRCLNRVCTNYMPYFFTLLLQLCTFTRSTNSRIKASMPTTIAKNTVKSVGKFCLEASFNYLKSPNFSKLINIIIWFLLLSVCLGSLIYSTAALGVLMSNLGMPSYCTGYREGYLNSTNVTIATYCTGSIPCSVCLSGLDSLDTYPSLETIQITISSFKWDLTAFGLVAEWFLAYILFTRFFYVLGLAAIMQLFFSYFAVHFISNSWLMWLIINLVQMAPISAMVRMYIFFASFYYVWKSYVHVVDGCNSSTCMMCYKRNRATRVECTTIVNGVRRSFYVYANGGKGFCKLHNWNCVNCDTFCAGSTFISDEVARDLSLQFKRPINPTDQSSYIVDSVTVKNGSIHLYFDKAGQKTYERHSLSHFVNLDNLRANNTKGSLPINVIVFDGKSKCEESSAKSASVYYSQLMCQPILLLDQALVSDVGDSAEVAVKMFDAYVNTFSSTFNVPMEKLKTLVATAEAELAKNVSLDNVLSTFISAARQGFVDSDVETKDVVECLKLSHQSDIEVTGDSCNNYMLTYNKVENMTPRDLGACIDCSARHINAQVAKSHNIALIWNVKDFMSLSEQLRKQIRSAAKKNNLPFKLTCATTRQVVNVVTTKIALKGG

SEQ ID NO: 16002 - protein, 1946 aa, Artificial Sequence
  SARS-CoV-2__MT811519.1__non-structural protein 3 (NSP3)
MAPTKVTFGDDTVIEVQGYKSVNITFELDERIDKVLNEKCSAYTVELGTEVNEFACVVADAVIKTLQPVSELLTPLGIDLDEWSMATYYLFDESGEFKLASHMYCFFYPPDEDEEEGDCEEEEFEPSTQYEYGTEDDYQGKPLEFGATSAALQPEEEQEEDWLDDDSQQTVGQQDGSEDNQTTTIQTIVEVQPQLEMELTPVVQTIEVNSFSGYLKLTDNVYIKNADIVEEAKKVKPTVVVNAANVYLKHGGGVAGALNKATNNAMQVESDDYIATNGPLKVGGSCVLSGHNLAKHCLHVVGPNVNKGEDIQLLKSAYENFNQHEVLLAPLLSAGIFGADPIHSLRVCVDTVRTNVYLAVFDKNLYDKLVSSFLEMKSEKQVEQKIAEIPKEEVKPFITESKPSVEQRKQDDKKIKACVEEVTTTLEETKFLTENLLLYIDINGNLHPDSATLVSDIDITFLKKDAPYIVGDVVQEGVLTAVVIPTKKAGGTTEMLAKALRKVPTDNYITTYPGQGLNGYTVEEAKTVLKKCKSAFYILPSIISNEKQEILGTVSWNLREMLAHAEETRKLMPVCVETKAIVSTIQRKYKGIKIQEGVVDYGARFYFYTSKTTVASLINTLNDLNETLVTMPLGYVTHGLNLEEAARYMRSLKVPATVSVSSPDAVTAYNGYLTSSSKTPEEHFIETISLAGSYKDWSYSGQSTQLGIEFLKRGDKSVYYTSNPTTFHLDGEVITFDNLKTLLSLREVRTIKVFTTVDNINLHTQVVDMSMTYGQQFGPTYLDGADVTKIKPHNSHEGKTFYVLPNDDTLRVEAFEYYHTTDPSFLGRYMSALNHTKKWKYPQVNGLTSIKWADNNCYLATALLTLQQIELKFNPPALQDAYYRARAGEAANFCALILAYCNKTVGELGDVRETMSYLFQHANLDSCKRVLNVVCKTCGQQQTTLKGVEAVMYMGTLSYEQFKKGVQIPCTCGKQATKYLVQQESPFVMMSAPPAQYELKHGTFTCASEYTGNYQCGHYKHITSKETLYCIDGALLTKSSEYKGPITDVFYKENSYTTTIKPVTYKLDGVVCTEIDPKLDNYYKKDNSYFTEQPIDLVPNQPYPNASFDNFKFVCDNIKFADDLNQLTGYKKPASRELKVTFFPDLNGDVVAIDYKHYTPSFKKGAKLLHKPIVWHVNNATNKATYKPNTWCIRCLWSTKPVETSNSFDVLKSEDAQGMDNLACEDLKPVSEEVVENPTIQKDVLECNVKTTEVVGDIILKPANNSLKITEEVGHTDLMAAYVDNSSLTIKKPNELSRVLGLKTLATHGLAAVNSVPWDTIANYAKPFLNKVVSTTTNIVTRCLNRVCTNYMPYFFTLLLQLCTFTRSTNSRIKASMPTTIAKNTVKSVGKFCLEASFNYLKSPNFSKLINIIIWFLLLSVCLGSLIYSTAALGVLMSNLGMPSYCTGYREGYLNSTNVTIATYCTGSIPCSVCLSGLDSLDTYPSLETIQITISSFKWDLTAFGLVAEWFLAYILFTRFFYVLGLAAIMQLFFSYFAVHFISNSWLMWLIINLVQMAPISAMVRMYIFFASFYYVWKSYVHVVDGCNSSTCMMCYKRNRATRVECTTIVNGVRRSFYVYANGGKGFCKLHNWNCVNCDTFCAGSTFISDEVARDLSLQFKRPINPTDQSSYIVDSVTVKNGSIHLYFDKAGQKTYERHSLSHFVNLDNLRANNTKGSLPINVIVFDGKSKCEESSAKSASVYYSQLMCQPILLLDQALVSDVGDSAEVAVKMFDAYVNTFSSTFNVPMEKLKTLVATAEAELAKNVSLDNVLSTFISAVRQGFVDSDVETKDVVECLKLSHQSDIEVTGDSCNNYMLTYNKVENMTPRDLGACIDCSARHINAQVAKSHNIALIWNVKDFMSLSEQLRKQIRSAAKKNNLPFKLTCATTRQVVNVVTTKIALKGG

SEQ ID NO: 16003 - protein, 1946 aa, Artificial Sequence
  SARS-CoV-2__MT811521.1__non-structural protein 3 (NSP3)
MAPTKVTFGDDTVIEVQGYKSVNITFELDERIDKVLNEKCSAYTVELGTEVNEFACVVADAVIKTLQPVSELLTPLGIDLDEWSMATYYLFDESGEFKLASHMYCSFYPPDEDEEEGDCEEEEFEPSTQYEYGTEDDYQGKPLEFGATSAALQPEEEQEEDWLDDDSQQTVGQQDGSEDNQTTTIQTIVEVQPQLEMELTPVVQTIEVNSFSGYLKLTDNVYIKNADIVEEAKKVKPTVVVNAANVYLKHGGGVAGALNKATNNAMQVESDDYIATNGPLKVGGSCVLSGHNLAKHCLHVVGPNVNKGEDIQLLKSAYENFNQHEVLLAPLLSAGIFGADPIHSLRVCVDTVRTNVYLAVFDKNLYDKLVSSFLEMKSEKQVEQKIAEIPKEEVKPFITESKPSVEQRKQDDKKIKACVEEVTTTLEETKFLTENLLLYIDINGNLHPDSATLVSDIDITFLKKDAPYIVGDVVQEGVLTAVVIPTKKAGGTTEMLAKALRKVPTDNYITTYPGQGLNGYTVEEAKTVLKKCKSAFYILPSIISNEKQEILGTVSWNLREMLAHAEETRKLMPVCVETKAIVSTIQRKYKGIKIQEGVVDYGARFYFYTSKTTVASLINTLNDLNETLVTMPLGYVTHGLNLEEAARYMRSLKVPATVSVSSPDAVTAYNGYLTSSSKTPEEHFIETISLAGSYKDWSYSGQSTQLGIEFLKRGDKSVYYTSNPTTFHLDGEVITFDNLKTLLSLREVRTIKVFTTVDNINLHTQVVDMSMTYGQQFGPTYLDGADVTKIKPHNSHEGKTFYVLPNDDTLRVEAFEYYHTTDPSFLGRYMSALNHTKKWKYPQVNGLTSIKWADNNCYLATALLTLQQIELKFNPPALQDAYYRARAGEAANFCALILAYCNKTVGELGDVRETMSYLFQHANLDSCKRVLNVVCKTCGQQQTTLKGVEAVMYMGTLSYEQFKKGVQIPCTCGKQATKYLVQQESPFVMMSAPPAQYELKHGTFTCASEYTGNYQCGHYKHITSKETLYCIDGALLTKSSEYKGPITDVFYKENSYTTTIKPVTYKLDGVVCTEIDPKLDNYYKKDNSYFTEQPIDLIPNQPYPNASFDNFKFVCDNIKFADDLNQLTGYKKPASRELKVTFFPDLNGDVVAIDYKHYTPSFKKGAKLLHKPIVWHVNNATNKATYKPNTWCIRCLWSTKPVETSNSFDVLKSEDAQGMDNLACEDLKPVSEEVVENPTIQKDVLECNVKTTEVVGDIILKPANNSLKITEEVGHTDLMAAYVDNSSLTIKKPNELSRVLGLKTLATHGLAAANSVPWDTIANYAKPFLNKVVSTTTNIVTRCLNRVCTNYMPYFFTLLLQLCTFTRSTNSRIKASMPTTIAKNTVKSVGKFCLEASFNYLKSPNFSKLINIIIWFLLLSVCLGSLIYSTAALGVLMSNLGMPSYCTGYREGYLNSTNVTIATYCTGSIPCSVCLSGLDSLDTYPSLETIQITISSFKWDLTAFGLVAEWFLAYILFTRFFYVLGLAAIMQLFFSYFAVHFISNSWLMWLIINLVQMAPISAMVRMYIFFASFYYVWKSYVHVVDGCNSSTCMMCYKRNRATRVECTTIVNGVRRSFYVYANGGKGFCKLHNWNCVNCDTFCAGSTFISDEVARDLSLQFKRPINPTDQSSYIVDSVTVKNGSIHLYFDKAGQKTYERHSLSHFVNLDNLRANNTKGSLPINVIVFDGKSKCEESSAKSASVYYSQLMCQPILLLDQALVSDVGDSAEVAVKMFDAYVNTFSSTFNVPMEKLKTLVATAEAELAKNVSLDNVLSTFISAARQGFVDSDVETKDVVECLKLSHQSDIEVTGDSCNNYMLTYNKVENMTPRDLGACIDCSARHINAQVAKSHNIALIWNVKDFMSLSEQLRKQIRSAAKKNNLPFKLTCATTRQVVNVVTTKIALKGG

SEQ ID NO: 16004 - protein, 1946 aa, Artificial Sequence
  SARS-CoV-2__MT811528.1__non-structural protein 3 (NSP3)
MAPTKVTFGDDTVIEVQGYKSVNITFELDERIDKVLNEKCSAYTVELGTEVNEFACVVADAVIKTLQPVSELLTPLGIDLDEWSMATYYLFDESGEFKLASHMYCSFYPPDEDEEEGDCEEEEFEPSTQYEYGTEDDYQGKPLEFGATSAALQPEEEQEEDWLDDDSQQTVGQQDGSEDNQTTTIQTIVEVQPQLEMELTPVVQTIEVNSFSGYLKLTDNVYIKNADIVEEAKKVKPTVVVNAANVYLKHGGGVAGALNKATNNAMQVESDDYIATNGPLKVGGSCVLSGHNLAKHCLHVVGPNVNKGEDIQLLKSAYENFNQHEVLLAPLLSAGIFGADPIHSLRVCVDTVRTNVYLAVFDKNLYDKLVSSFLEMKSEKQVEQKIAEIPKEEVKPFITESKPSVEQRKQDDKKIKACVEEVTTTLEETKFLTENLLLYIDINGNLHPDSATLVSDIDITFLKKDAPYIVGDVVQEGVLTAVVIPTKKAGGTTEMLAKALRKVPTDNYITTYPGQGLNGYTVEEAKTVLKKCKSAFYILPSIISNEKQEILGTVSWNLREMLAHAEETRKLMPVCVETKAIVSTIQRKYKGIKIQEGVVDYGARFYFYTSKTTVASLINTLNDLNETLVTMPLGYVTHGLNLEEAARYMRSLKVPATVSVSSPDAVTAYNGYLTSSSKTPEEHFIETISLAGSYKDWSYSGQSTQLGIEFLKRGDKSVYYTSNPTTFHLDGEVITFDNLKTLLSLREVRTIKVFTTVDNINLHTQVVDMSMTYGQQFGPTYLDGADVTKIKPHNSHEGKTFYVLPNDDTLRVEAFEYYHTTDPSFLGRYMSALNHTKKWKYPQVNGLTSIKWADNNCYLATALLTLQQIELKFNPPALQDAYYRARAGEAANFCALILAYCNKTVGELGDVRETMSYLFQHANLDSCKRVLNVVCKTCGQQQTTLKGVEAVMYMGTLSYEQFKKGVQIPCTCGKQATKYLVQQESPFVMMSAPPAQYELKHGTFTCASEYTGNYQCGHYKHITSKETLYCIDGALLTKSSEYKGPITDVFYKENSYTTTIKPVTYKLDGVVCTEIDPKLDNYYKKDNSYFTEQPIDLVPNQPYPNASFDNFKFVCDNIKFADDLNQLTGYKKPASRELKVTFFPDLNGDVVAIDYKHYTPSFKKGAKLLHKPIVWHVNNATNKATYKPNTWCIRCLWSTKPVETSNSFDVLKSEDAQGMDNLACEDLKPVSEEVVENPTIQKDVLECNVKTTEVVGDIILKPANNSLKITEEVGHTDLMAAYVDNSSLTIKKPNELSRVLGLKTLATHGLAAVNSVPWDTIANYAKPFLNKVVSTTTNIVTRCLNRVCTNYMPYFFTLLLQLCTFTRSTNSRIKASMPTTIAKNTVKSVGKFCLEASFNYLKSLNFSKLINIIIWFLLLSVCLGSLIYSTAALGVLMSNLGMPSYCTGYREGYLNSTNVTIATYCTGSIPCSVCLSGLDSLDTYPSLETIQITISSFKWDLTAFGLVAEWFLAYILFTRFFYVLGLAAIMQLFFSYFAVHFISNSWLMWLIINLVQMAPISAMVRMYIFFASFYYVWKSYVHVVDGCNSSTCMMCYKRNRATRVECTTIVNGVRRSFYVYANGGKGFCKLHNWNCVNCDTFCAGSTFISDEVARDLSLQFKRPINPTDQSSYIVDSVTVKNGSIHLYFDKAGQKTYERHSLSHFVNLDNLRANNTKGSLPINVIVFDGKSKCEESSAKSASVYYSQLMCQPILLLDQALVSDVGDSAEVAVKMFDAYVNTFSSTFNVPMEKLKTLVATAEAELAKNVSLDNVLSTFISAARQGFVDSDVETKDVVECLKLSHQSDIEVTGDSCNNYMLTYNKVENMTPRDLGACIDCSARHINAQVAKSHNIALIWNVKDFMSLSEQLRKQIRSAAKKNNLPFKLTCATTRQVVNVVTTKIALKGG

SEQ ID NO: 16005 - protein, 1946 aa, Artificial Sequence
  SARS-CoV-2__MT811530.1__non-structural protein 3 (NSP3)
MAPTKVTFGDDTVIEVQGYKSVNITFELDERIDKVLNEKCSAYTVELGTEVNEFACVVADAVIKTLQPVSELLTPLGIDLDEWSMATYYLFDESGEFKLASHMYCSFYPPDEDEEEGDCEEEEFEPSTQYEYGTEDDYQGKPLEFGATSAALQPEEEQEEDWLDDDSQQTVGQQDGSEDNQTTTIQTIVEVQPQLEMELTPVVQTIEVNSFSGYLKLIDNVYIKNADIVEEAKKVKPTVVVNAANVYLKHGGGVAGALNKATNNAMQVESDDYIATNGPLKVGGSCVLSGHNLAKHCLHVVGPNVNKGEDIQLLKSAYENFNQHEVLLAPLLSAGIFGADPIHSLRVCVDTVRTNVYLAVFDKNLYDKLVSSFLEMKSEKQVEQKIAEIPKEEVKPFITESKPSVEQRKQDDKKIKACVEEVTTTLEETKFLTENLLLYIDINGNLHPDSATLVSDIDITFLKKDAPYIVGDVVQEGVLTAVVIPTKKAGGTTEMLAKALRKVPTDNYITTYPGQGLNGYTVEEAKTVLKKCKSAFYILPSIISNEKQEILGTVSWNLREMLAHAEETRKLMPVCVETKAIVSTIQRKYKGIKIQEGVVDYGARFYFYTSKTTVASLINTLNDLNETLVTMPLGYVTHGLNLEEAARYMRSLKVPATVSVSSPDAVTAYNGYLTSSSKTPEEHFIETISLAGSYKDWSYSGQSTQLGIEFLKRGDKSVYYTSNPTTFHLDGEVITFDNLKTLLSLREVRTIKVFTTVDNINLHTQVVDMSMTYGQQFGPTYLDGADVTKIKPHNSHEGKTFYVLPNDDTLRVEAFEYYHTTDPSFLGRYMSALNHTKKWKYPQVNGLTSIKWADNNCYLATALLTLQQIELKFNPPALQDAYYRARAGEAANFCALILAYCNKTVGELGDVRETMSYLFQHANLDSCKRVLNVVCKTCGQQQTTLKGVEAVMYMGTLSYEQFKKGVQIPCTCGKQATKYLVQQESPFVMMSAPPAQYELKHGTFTCASEYTGNYQCGHYKHITSKETLYCIDGALLTKSSEYKGPITDVFYKENSYTTTIKPVTYKLDGVVCTEIDPKLDNYYKKDNSYFTEQPIDLVPNQPYPNASFDNFKFVCDNIKFADDLNQLTGYKKPASRELKVTFFPDLNGDVVAIDYKHYTPSFKKGAKLLHKPIVWHVNNATNKATYKPNTWCIRCLWSTKPVETSNSFDVLKSEDAQGMDNLACEDLKPVSEEVVENPTIQKDVLECNVKTTEVVGDIILKPANNSLKITEEVGHTDLMAAYVDNSSLTIKKPNELSRVLGLKTLATHGLAAVNSVPWDTIANYAKPFLNKVVSTTTNIVTRCLNRVCTNYMPYFFTLLLQLCTFTRSTNSRIKASMPTTIAKNTVKSVGKFCLEASFNYLKSPNFSKLINIIIWFLLLSVCLGSLIYSTAALGVLMSNLGMPSYCTGYREGYLNSTNVTIATYCTGSIPCSVCLSGLDSLDTYPSLETIQITISSFKWDLTAFGLVAEWFLAYILFTRFFYVLGLAAIMQLFFSYFAVHFISNSWLMWLIINLVQMAPISAMVRMYIFFASFYYVWKSYVHVVDGCNSSTCMMCYKRNRATRVECTTIVNGVRRSFYVYANGGKGFCKLHNWNCVNCDTFCAGSTFISDEVARDLSLQFKRPINPTDQSSYIVDSVTVKNGSIHLYFDKAGQKTYERHSLSHFVNLDNLRANNTKGSLPINVIVFDGKSKCEESSAKSASVYYSQLMCQPILLLDQALVSDVGDSAEVAVKMFDAYVNTFSSTFNVPMEKLKTLVATAEAELAKNVSLDNVLSTFISAARQGFVDSDVETKDVVECLKLSHQSDIEVTGDSCNNYMLTYNKVENMTPRDLGACIDCSARHINAQVAKSHNIALIWNVKDFMSLSEQLRKQIRSAAKKNNLPFKLTCATTRQVVNVVTTKIALKGG

SEQ ID NO: 16006 - protein, 1946 aa, Artificial Sequence
  SARS-CoV-2__MT811552.1__non-structural protein 3 (NSP3)
MAPTKVTFGDDTVIEVQGYKSVNITFELDERIDKVLNEKCSAYTVELGTEVNEFACVVADAVIKTLQPVSELLTPLGIDLDEWSMATYYLFDESGEFKLASHMYCSFYPPDEDEEEGDCEEEEFEPSTQYEYGTEDDYQGKPLEFGATSAALQPEEEQEEDWLDDDSQQTVGQQDGSEDNQTTTIQTIVEVQPQLEMELTPVVQTIEVNSFSGYLKLTDNVYIKNADIVEEAKKVKPTVVVNAANVYLKHGGGVAGALNKATNNAMQVESDDYIATNGPLKVGGSCVLSGHNLAKHCLHVVGPNVNKGEDIQLLKSAYENFNQHEVLLAPLLSAGIFGADPIHSLRVCVDTVRTNVYLAVFDKNLYDKLVSSFLEMKSEKQVEQKIAEIPKEEVKPFITESKPSVEQRKQDDKKIKACVEEVTTTLEETKFLTENLLLYIDINGNLHPDSATLVSDIDITFLKKDAPYIVGDVVQEGVLTAVVIPTKKAGGTTEMLAKALRKVPTDNYITTYPGQGLNGYTVEEAKTVLKKCKSAFYILPSIISNEKQEILGTVSWNLREMLAHAEETRKLMPVCVETKAIVSTIQRKYKGIKIQEGVVDYGARFYFYTSKTTVASLINTLNDLNETLVTMPLGYVTHGLNLEEAARYMRSLKVPATVSVSSPDAVTAYNGYLTSSSKTPEEHFIETISLAGSYKDWSYSGQSTQLGIEFLKRGDKSVYYTSNPTTFHLDGEVITFDNLKTLLSLREVRTIKVFTTVDNINLHTQVVDMSMTYGQQFGPTYLDGADVTKIKPHNSHEGKTFYVLPNDDTLRVEAFEYYHTTDPSFLGRYMSALNHTKKWKYPQVNGLTSIKWADNNCYLATALLTLQQIELKFNPPALQDAYYRARAGEAANFCALILAYCNKTVGELGDVRETMSYLFQHANLDSCKRVLNVVCKTCGQQQTTLKGVEAVMYMGTLSYEQFKKGVQIPCTCGKQATKYLVQQESPFVMMSAPPAQYELKHGTFTCASEYTGNYQCGHYKHITSKETLYCIDGALLTKSSEYKGPITDVFYKENSYTTTIKPVTYKLDGVVCTEIDPKLDNYYKKDNSYFTEQPIDLVPNQPYPNASFDNFKFVCDNIKFADDLNQLTGYKKPASRELKVTFFPDLNGDVVAIDYKHYTPSFKKGAKLLHKPIVWHVNNATNKATYKPNTWCIRCLWSTKPVETSNSFDVLKSEDAQGMDNLACEDLKPVSEEVVENPTIQKDVLECNVKTTEVVGDIILKPANNSLKITEEVGHTDLMAAYVDNSSLTIKKPNELSRVLGLKTLATHGLAAVNSVPWDTIANYAKPFLNKVVSTTTNIVTRCLNRVCTNYMPYFFTLLLQLCTFTRSTNSRIKASMPTTIAKNTVKSVGKFCLEASFNYLKSPNFSKLINIIIWFLLLSVCLGSLIYSTAALGVLMSNLGMPSYCTGYREGYLNSTNVTIATYCTGSIPCSVCLSGLDSLDTYPSLETIQITISSFKWDLTAFGLVAEWFLAYILFTRFFYVLGLAAIMQLFFSYFAVHFISNSWLMWLIINLVQMAPISAMVRMYIFFASFYYVWKSYVHVVDGCSSSTCMMCYKRNRATRVECTTIVNGVRRSFYVYANGGKGFCKLHNWNCVNCDTFCAGSTFISDEVARDLSLQFKRPINPTDQSSYIVDSVTVKNGSIHLYFDKAGQKTYERHSLSHFVNLDNLRANNTKGSLPINVIVFDGKSKCEESSAKSASVYYSQLMCQPILLLDQALVSDVGDSAEVAVKMFDAYVNTFSSTFNVPMEKLKTLVATAEAELAKNVSLDNVLSTFISAARQGFVDSDVETKDVVECLKLSHQSDIEVTGDSCNNYMLTYNKVENMTPRDLGACIDCSARHINAQVAKSHNIALIWNVKDFMSLSEQLRKQIRSAAKKNNLPFKLTCATTRQVVNVVTTKIALKGG

SEQ ID NO: 16007 - protein, 1946 aa, Artificial Sequence
  SARS-CoV-2__MT811557.1__non-structural protein 3 (NSP3)
MAPTKVTFGDDTVIEVQGYKSVNITFELDERIDKVLNEKCSAYTVELGTEVNEFACVVADAVIKTLQPVSELLTPLGIDLDEWSMATYYLFDESGEFKLASHMYCSFYPPDEDEEEGDCEEEEFEPSTQYEYGTEDDYQGKPLEFGATSAALQPEEEQEEDWLDDDSQQTVGQQDGSEDNQTTTIQTIVEVQPQLEMELTPVVQTIEVNSFSGYLKLTDNVYIKNADIVEEAKKVKPTVVVNAANVYLKHGGGVAGALNKATNNAMQVESDDYIATNGPLKVGGSCVLSGHNLAKHCLHVVGPNVNKGEDIQLLKSAYENFNQHEVLLAPLLSAGIFGADPIHSLRVCVDTVRTNVYLAVFDKNLYDKLVSSFLEMKSEKQVEQKIAEIPKEEVKPFITESKPSVEQRKQDDKKIKACVEEVTTTLEETKFLTENLLLYIDINGNLHPDSATLVSDIDITFLKKDAPYIVGDVVQEGVLTAVVIPTKKAGGTTEMLAKALRKVPTDNYITTYPGQGLNGYTVEEAKTVLKKCKSAFYILPSIISNEKQEILGTVSWNLREMLAHAEETRKLMPVCVETKAIVSTIQRKYKGIKIQEGVVDYGARFYFYTSKTTVASLINTLNDLNETLVTMPLGYVTHGLNLEEAARYMRSLKVPATVSVSSPDAVTAYNGYLTSSSKTPEEHFIETISLAGSYKDWSYSGQSTQLGIEFLKRGDKSVYYTSNPTTFHLDGEVITFDNLKTLLSLREVRTIKVFTTVDNINLHTQVVDMSMTYGQQFGPTYLDGADVTKIKPHNSHEGKTFYVLPNDDTLRVEAFEYYHTTDPSFLGRYMSALNHTKKWKYPQVNGLTSIKWADNNCYLATALLTLQQIELKFNPPALQDAYYRARAGEAANFCALILAYCNKTVGELGDVRETMSYLFQHANLDSCKRVLNVVCKTCGQQQTTLKGVEAVMYMGTLSYEQFKKGVQIPCTCGKQATKYLVQQESPFVMMSAPPAQYELKHGTFTCASEYTGNYQCGHYKHITSKETLYCIDGALLTKSSEYKGPITDVFYKENSYTTTIKPVTYKLDGVVCTEIDPKLDNYYKKDNSYFTEQPIDLVPNQPYPNASFDNFKFVCDNIKFADDLNQLTGYKKPASRELKVTFFPDLNGDVVAIDYKHYTPSFKKGAKLLHKPIVWHVNNATNKATYKPNTWCIRCLWSTKPVETSNSFDVLKSEDAQGMDNLACEDLKPVSEEVVENPTIQKDVLECNVKTTEVVGDIILKPANNSLKITEEVGHTDLMAAYVDNSSLTIKKPNELSRVLGLKTLATHGLAAVNSVPWDTIANYAKPFLNKVVSTTTNIVTRCLNRVCTNYMPYFFTLLLQLCTFTRSTNSRIKASMPTTIAKNTVKSVGKFCLEASFNYLKSPNFSKLINIIIWFLLLSVCLGSLIYSTAALGVLMSNLGMPSYCTGYREGYLNSTNVTIATYCTGSIPCSVCLSGLDSLDTYSSLETIQITISSFKWDLTAFGLVAEWFLAYILFTRFFYVLGLAAIMQLFFSYFAVHFISNSWLMWLIINLVQMAPISAMVRMYIFFASFYYVWKSYVHVVDGCNSSTCMMCYKRNRATRVECTTIVNGVRRSFYVYANGGKGFCKLHNWNCVNCDTFCAGSTFISDEVARDLSLQFKRPINPTDQSSYIVDSVTVKNGSIHLYFDKAGQKTYERHSLSHFVNLDNLRANNTKGSLPINVIVFDGKSKCEESSAKSASVYYSQLMCQPILLLDQALVSDVGDSAEVAVKMFDAYVNTFSSTFNVPMEKLKTLVATAEAELAKNVSLDNVLSTFISAARQGFVDSDVETKDVVECLKLSHQSDIEVTGDSCNNYMLTYNKVENMTPRDLGACIDCSARHINAQVAKSHNIALIWNVKDFMSLSEQLRKQIRSAAKKNNLPFKLTCATTRQVVNVVTTKIALKGG

SEQ ID NO: 16008 - protein, 1946 aa, Artificial Sequence
  SARS-CoV-2__MT811659.1__non-structural protein 3 (NSP3)
MAPTKVTFGADTVIEVQGYKSVNITFELDERIDKVLNEKCSAYTVELGTEVNEFACVVADAVIKTLQPVSELLTPLGIDLDEWSMATYYLFDESGEFKLASHMYCSFYPPDEDEEEGDCEEEEFEPSTQYEYGTEDDYQGKPLEFGATSAALQPEEEQEEDWLDDDSQQTVGQQDGSEDNQTTTIQTIVEVQPQLEMELTPVVQTIEVNSFSGYLKLTDNVYIKNADIVEEAKKVKPTVVVNAANVYLKHGGGVAGALNKATNNAMQVESDDYIATNGPLKVGGSCVLSGHNLAKHCLHVVGPNVNKGEDIQLLKSAYENFNQHEVLLAPLLSAGIFGADPIHSLRVCVDTVRTNVYLAVFDKNLYDKLVSSFLEMKSEKQVEQKIAEIPKEEVKPFITESKPSVEQRKQDDKKIKACVEEVTTTLEETKFLTENLLLYIDINGNLHPDSATLVSDIDITFLKKDAPYIVGDVVQEGVLTAVVIPTKKAGGTTEMLAKALRKVPTDNYITTYPGQGLNGYTVEEAKTVLKKCKSAFYILPSIISNEKQEILGTVSWNLREMLAHAEETRKLMPVCVETKAIVSTIQRKYKGIKIQEGVVDYGARFYFYTSKTTVASLINTLNDLNETLVTMPLGYVTHGLNLEEAARYMRSLKVPATVSVSSPDAVTAYNGYLTSSSKTPEEHFIETISLAGSYKDWSYSGQSTQLGIEFLKRGDKSVYYTSNPTTFHLDGEVITFDNLKTLLSLREVRTIKVFTTVDNINLHTQVVDMSMTYGQQFGPTYLDGADVTKIKPHNSHEGKTFYVLPNDDTLRVEAFEYYHTTDPSFLGRYMSALNHTKKWKYPQVNGLTSIKWADNNCYLATALLTLQQIELKFNPPALQDAYYRARAGEAANFCALILAYCNKTVGELGDVRETMSYLFQHANLDSCKRVLNVVCKTCGQQQTTLKGVEAVMYMGTLSYEQFKKGVQIPCTCGKQATKYLVQQESPFVMMSAPPAQYELKHGTFTCASEYTGNYQCGHYKHITSKETLYCIDGALLTKSSEYKGPITDVFYKENSYTTTIKPVTYKLDGVVCTEIDPKLDNYYKKDNSYFTEQPIDLVPNQPYPNASFDNFKFVCDNIKFADDLNQLTGYKKPASRELKVTFFPDLNGDVVAIDYKHYTPSFKKGAKLLHKPIVWHVNNATNKATYKPNTWCIRCLWSTKPVETSNSFDVLKSEDAQGMDNLACEDLKPVSEEVVENPTIQKDVLECNVKTTEVVGDIILKPANNSLKITEEVGHTDLMAAYVDNSSLTIKKPNELSRVLGLKTLATHGLAAVNSVPWDTIANYAKPFLNKVVSTTTNIVTRCLNRVCTNYMPYFFTLLLQLCTFTRSTNSRIKASMPTTIAKNTVKSVGKFCLEASFNYLKSPNFSKLINIIIWFLLLSVCLGSLIYSTAALGVLMSNLGMPSYCTGYREGYLNSTNVTIATYCTGSIPCSVCLSGLDSLDTYPSLETIQITISSFKWDLTAFGLVAEWFLAYILFTRFFYVLGLAAIMQLFFSYFAVHFISNSWLMWLIINLVQMAPISAMVRMYIFFASFYYVWKSYVHVVDGCNSSTCMMCYKRNRATRVECTTIVNGVRRSFYVYANGGKGFCKLHNWNCVNCDTFCAGSTFISDEVARDLSLQFKRPINPTDQSSYIVDSVTVKNGSIHLYFDKAGQKTYERHSLSHFVNLDNLRANNTKGSLPINVIVFDGKSKCEESSAKSASVYYSQLMCQPILLLDQALVSDVGDSAEVAVKMFDAYVNTFSSTFNVPMEKLKTLVATAEAELAKNVSLDNVLSTFISAARQGFVDSDVETKDVVECLKLSHQSDIEVTGDSCNNYMLTYNKVENMTPRDLGACIDCSARHINAQVAKSHNIALIWNVKDFMSLSEQLRKQIRSAAKKNNLPFKLTCATTRQVVNVVTTKIALKGG

SEQ ID NO: 16009 - protein, 1946 aa, Artificial Sequence
  SARS-CoV-2__MT811670.1__non-structural protein 3 (NSP3)
MAPTKVTFGDDTVIEVQGYKSVNITFELDERIDKVLNEKCSAYTVELGTEVNEFACVVADAVIKTLQPVSELLTPLGIDLDEWSMATYYLFDESGEFKLASHMYCSFYPPDEDEEEGDCEEEEFEPSTQYEYGTEDDYQGKPLEFGATSAALQPEEEQEEDWLDDDSQQTVGQQDGSEDNQTTTIQTIVEVQPQLEMELTPVVQTIEVNSFSGYLKLTDNVYIKNADIVEEAKKVKPTVVVNAANVYLKHGGGVAGALNKATNNAMQVESDDYIATNGPLKVGGSCVLSGHNLAKHCLHVVGPNVNKGEDIQLLKSAYENFNQHEVLLAPLLSAGIFGADPIHSLRVCVDTVRTNVYLAVFDKNLYDKLVSSFLEMKSEKQVEQNIAEIPKEEVKPFITESKPSVEQRKQDDKKIKACVEEVTTTLEETKFLTENLLLYIDINGNLHPDSATLVSDIDITFLKKDAPYIVGDVVQEGVLTAVVIPTKKAGGTTEMLAKALRKVPTDNYITTYPGQGLNGYTVEEAKTVLKKCKSAFYILPSIISNEKQEILGTVSWNLREMLAHAEETRKLMPVCVETKAIVSTIQRKYKGIKIQEGVVDYGARFYFYTSKTTVASLINTLNDLNETLVTMPLGYVTHGLNLEEAARYMRSLKVPATVSVSSPDAVTAYNGYLTSSSKTPEEHFIETISLAGSYKDWSYSGQSTQLGIEFLKRGDKSVYYTSNPTTFHLDGEVITFDNLKTLLSLREVRTIKVFTTVDNINLHTQVVDMSMTYGQQFGPTYLDGADVTKIKPHNSHEGKTFYVLPNDDTLRVEAFEYYHTTDPSFLGRYMSALNHTKKWKYPQVNGLTSIKWADNNCYLATALLTLQQIELKFNPPALQDAYYRARAGEAANFCALILAYCNKTVGELGDVRETMSYLFQHANLDSCKRVLNVVCKTCGQQQTTLKGVEAVMYMGTLSYEQFKKGVQIPCTCGKQATKYLVQQESPFVMMSAPPAQYELKHGTFTCASEYTGNYQCGHYKHITSKETLYCIDGALLTKSSEYKGPITDVFYKENSYTTTIKPVTYKLDGVVCTEIDPKLDNYYKKDNSYFTEQPIDLVPNQPYPNASFDNFKFVCDNIKFADDLNQLTGYKKPASRELKVTFFPDLNGDVVAIDYKHYTPSFKKGAKLLHKPIVWHVNNATNKATYKPNTWCIRCLWSTKPVETSNSFDVLKSEDAQGMDNLACEDLKPVSEEVVENPTIQKDVLECNVKTTEVVGDIILKPANNSLKITEEVGHTDLMAAYVDNSSLTIKKPNELSRVLGLKTLATHGLAAVNSVPWDTIANYAKPFLNKVVSTTTNIVTRCLNRVCTNYMPYFFTLLLQLCTFTRSTNSRIKASMPTTIAKNTVKSVGKFCLEASFNYLKSPNFSKLINIIIWFLLLSVCLGSLIYSTAALGVLMSNLGMPSYCTGYREGYLNSTNVTIATYCTGSIPCSVCLSGLDSLDTYPSLETIQITISSFKWDLTAFGLVAEWFLAYILFTRFFYVLGLAAIMQLFFSYFAVHFISNSWLMWLIINLVQMAPISAMVRMYIFFASFYYVWKSYVHVVDGCNSSTCMMCYKRNRATRVECTTIVNGVRRSFYVYANGGKGFCKLHNWNCVNCDTFCAGSTFISDEVARDLSLQFKRPINPTDQSSYIVDSVTVKNGSIHLYFDKAGQKTYERHSLSHFVNLDNLRANNTKGSLPINVIVFDGKSKCEESSAKSASVYYSQLMCQPILLLDQALVSDVGDSAEVAVKMFDAYVNTFSSTFNVPMEKLKTLVATAEAELAKNVSLDNVLSTFISAARQGFVDSDVETKDVVECLKLSHQSDIEVTGDSCNNYMLTYNKVENMTPRDLGACIDCSARHINAQVAKSHNIALIWNVKDFMSLSEQLRKQIRSAAKKNNLPFKLTCATTRQVVNVVTTKIALKGG

SEQ ID NO: 16010 - protein, 1946 aa, Artificial Sequence
  SARS-CoV-2__MT811680.1__non-structural protein 3 (NSP3)
MAPTKVTFGDDTVIEVQGYKSVNITFELDERIDKVLNEKCSAYTVELGTEVNEFACVVADAVIKTLQPVSELLTPLGIDLDEWSMATYYLFDESGEFKLASHMYCSFYPPDEDEEEGDCEEEEFEPSTQYEYGTEDDYQGKPLEFGATSAALQPEEEQEEDWLDDDSQQTVGQQDGSEDNQTTTIQTIVEVQPQLEMELTPVVQTIEVNSFSGYLKLTDNVYIKNADIVEEAKKVKPTVVVNAANVYLKHGGGVAGALNKATNNAMQVESDDYIATNGPLKVGGSCVLSGHNLAKHCLHVVGPNVNKGEDIQLLKSAYENFNQHEVLLAPLLSAGIFGADLIHSLRVCVDTVRTNVYLAVFDKNLYDKLVSSFLEMKSEKQVEQKIAEIPKEEVKPFITESKPSVEQRKQDDKKIKACVEEVTTTLEETKFLTENLLLYIDINGNLHPDSATLVSDIDITFLKKDAPYIVGDVVQEGVLTAVVIPTKKAGGTTEMLAKALRKVPTDNYITTYPGQGLNGYTVEEAKTVLKKCKSAFYILPSIISNEKQEILGTVSWNLREMLAHAEETRKLMPVCVETKAIVSTIQRKYKGIKIQEGVVDYGARFYFYTSKTTVASLINTLNDLNETLVTMPLGYVTHGLNLEEAARYMRSLKVPATVSVSSPDAVTAYNGYLTSSSKTPEEHFIETISLAGSYKDWSYSGQSTQLGIEFLKRGDKSVYYTSNPTTFHLDGEVITFDNLKTLLSLREVRTIKVFTTVDNINLHTQVVDMSMTYGQQFGPTYLDGADVTKIKPHNSHEGKTFYVLPNDDTLRVEAFEYYHTTDPSFLGRYMSALNHTKKWKYPQVNGLTSIKWADNNCYLATALLTLQQIELKFNPPALQDAYYRARAGEAANFCALILAYCNKTVGELGDVRETMSYLFQHANLDSCKRVLNVVCKTCGQQQTTLKGVEAVMYMGTLSYEQFKKGVQIPCTCGKQATKYLVQQESPFVMMSAPPAQYELKHGTFTCASEYTGNYQCGHYKHITSKETLYCIDGALLTKSSEYKGPITDVFYKENSYTTTIKPVTYKLDGVVCTEIDPKLDNYYKKDNSYFTEQPIDLVPNQPYPNASFDNFKFVCDNIKFADDLNQLTGYKKPASRELKVTFFPDLNGDVVAIDYKHYTPSFKKGAKLLHKPIVWHVNNATNKATYKPNTWCIRCLWSTKPVETSNSFDVLKSEDAQGMDNLACEDLKPVSEEVVENPTIQKDVLECNVKTTEVVGDIILKPANNSLKITEEVGHTDLMAAYVDNSSLTIKKPNELSRVLGLKTLATHGLAAVNSVPWDTIANYAKPFLNKVVSTTTNIVTRCLNRVCTNYMPYFFTLLLQLCTFTRSTNSRIKASMPTTIAKNTVKSVGKFCLEASFNYLKSPNFSKLINIIIWFLLLSVCLGSLIYSTAALGVLMSNLGMPSYCTGYREGYLNSTNVTIATYCTGSIPCSVCLSGLDSLDTYPSLETIQITISSFKWDLTAFGLVAEWFLAYILFTRFFYVLGLAAIMQLFFSYFAVHFISNSWLMWLIINLVQMAPISAMVRMYIFFASFYYVWKSYVHVVDGCNSSTCMMCYKRNRATRVECTTIVNGVRRSFYVYANGGKGFCKLHNWNCVNCDTFCAGSTFISDEVARDLSLQFKRPINPTDQSSYIVDSVTVKNGSIHLYFDKAGQKTYERHSLSHFVNLDNLRANNTKGSLPINVIVFDGKSKCEESSAKSASVYYSQLMCQPILLLDQALVSDVGDSAEVAVKMFDAYVNTFSSTFNVPMEKLKTLVATAEAELAKNVSLDNVLSTFISAARQGFVDSDVETKDVVECLKLSHQSDIEVTGDSCNNYMLTYNKVENMTPRDLGACIDCSARHINAQVAKSHNIALIWNVKDFMSLSEQLRKQIRSAAKKNNLPFKLTCATTRQVVNVVTTKIALKGG

SEQ ID NO: 16011 - protein, 1946 aa, Artificial Sequence
  SARS-CoV-2__MT811683.1__non-structural protein 3 (NSP3)
MAPTKVTFGDDTVIEVQGYKSVNITFELDERIDKVLNEKCSAYTVELGTEVNEFACVVADAVIKTLQPVSELLTPLGIDLDEWSMATYYLFDESGEFKLASHMYCSFYPPDEDEEEGDCEEEEFEPSTQYEYGTEDDYQGKPLEFGATSAALQPEEEQEEDWLDDDSQQTVGQQDGSEDNQTTTIQTIVEVQPQLEMELTPVVQTIEVNSFSGYLKLTDNVYIKNADIVEEAKKVKPTVVVNAANVYLKHGGGVAGALNKATNNAMQVESDDYIATNGPLKVGGSCVLSGHNLAKHCLHVVGPNVNKGEDIQLLKSAYENFNQHEVLLAPLLSAGIFGADPIHSLRVCVDTVRTNVYLAVFDKNLYDKLVSSFLEMKSEKQVEQKIAEIPKEEVKPFITESKPSVEQRKQDDKKIKACVEEVTTTLEETKFLTENLLLYIDINGNLHPDSATLVSDIDITFLKKDAPYIVGDVVQEGVLTAVVIPTKKAGGTTEMLAKALRKVPTDNYITTYPGQGLNGYTVEEAKTVLKKCKSAFYILPSIISNEKQEILGTVSWNLREMLAHAEETRKLMPVCVETKAIVSTIQRKYKGIKIQEGVVDYGARFYFYTSKTTVASLINTLNDLNETLVTMPLGYVTHGLNLEEAARYMRSLKVPATVSVSSPDAVTAYNGYLTSSSKTPEEHFIETISLAGSYKDWSYSGQSTQLGIEFLKRGDKSVYYTSNPTTFHLDGEVITFDNLKTLLSLREVRTIKVFTTVDNINLHTQVVDMSMTYGQQFGPTYLDGADVTKIKPHNSHEGKTFYVLPNDDTLRVEAFEYYHTTDPSFLGRYMSALNHTKKWKYPQVNGLTSIKWADNNCYLATALLTLQQIELKFNPPALQDAYYRARAGEAANFCALILAYCNKTVGELGDVRETMSYLFQHANLDSCKRVLNVVCKTCGQQQTTLKGVEAVMYMGTLSYEQFKKGVQIPCTCGKQATKYLVQQESPFVMMSAPPAQYELKHGTFTCASEYTGNYQCGHYKHITSKETLYCIDGALLTKSSEYKGPITDVFYKENSYTTTIKPVTYKLDGVVCTEIDPKLDNYYKKDNSYFTEQPIDLVPNQPYPNASFDNFKFVCDNIKFADDLNQLTGYKKPASRELKVTFFPDLNGDVVAIDYKHYTPSFKKGAKLLHKPIVWHVNNATNKATYKPNTWCIRCLWSTKPVETSNSFDVLKSEDAQGMDNLACEDLKPVSEEVVENPTIQKDVLECNVKTTEVVGDIILKPANNSLKITEEVGHTDLMAAYVDNSSLTIKKPNELSRVLGLKTLATHGLAAVNSVPWDTIANYAKPFLNKVVSTTTNIVTRCLNRVCTNYMPYFFTLLLQLCTFTRSTNSRIKASMPTTIAKNTVKSVGKFCLEASFNYLKSPNFSKLINIIIWFLLLSVCLGSLIYSTAALGVLMSNLGMPSYCTGYREGYLNSTNVTIATYCTGSIPCSVCLSGLDSLDTYPSLETIQITISSFKWDLTAFGLVAEWFLAYILFTRFFYVLGLAAIMQLFFSYFAVHFISNSWLMWLIINLVQMAPISAMVRMYIFFASFYYVWKSYVHVVDGCNSSTCMMCYKRNRATRVECTTIVNGVRRPFYVYANGGKGFCKLHNWNCVNCDTFCAGSTFISDEVARDLSLQFKRPINPTDQSSYIVDSVTVKNGSIHLYFDKAGQKTYERHSLSHFVNLDNLRANNTKGSLPINVIVFDGKSKCEESSAKSASVYYSQLMCQPILLLDQALVSDVGDSAEVAVKMFDAYVNTFSSTFNVPMEKLKTLVATAEAELAKNVSLDNVLSTFISAARQGFVDSDVETKDVVECLKLSHQSDIEVTGDSCNNYMLTYNKVENMTPRDLGACIDCSARHINAQVAKSHNIALIWNVKDFMSLSEQLRKQIRSAAKKNNLPFKLTCATTRQVVNVVTTKIALKGG

SEQ ID NO: 16012 - protein, 1946 aa, Artificial Sequence
  SARS-CoV-2__MT811688.1__non-structural protein 3 (NSP3)
MAPTKVTFGDDTVIEVQGYKSVNITFELDERIDKVLNEKCSAYTVELGTEVNEFACVVADAVIKTLQPVSELLTPLGIDLDEWSMATYYLFDESGEFKLASHMYCSFYPPDEDEEEGDCEEEEFEPSTQYEYGTEDDYQGKPLEFGATSAALQPEEEQEEDWLDDDSQQTVGQQDGSEDNQTTTIQTIVEVQPQLEMELTPVVQTIEVNSFSGYLKLTDNVYIKNADIVEEAKKVKPTVVVNAANVYLKHGGGVAGALNKATNNAMQVESDDYIATNGPLKVGGSCVLSGHNLAKHCLHVVGPNVNKGEDIQLLKSAYENFNQHEVLLAPLLSAGIFGADPIHSLRVCVDTVRTNVYLAVFDKNLYDKLVSSFLEMKSEKQVEQKIAEIPKEEVKPFITESKPSVEQRKQDDKKIKACVEEVTTTLEETKFLTENLLLYIDINGNLHPDSATLVSDIDITFLKKDAPYIVGDVVQEGFLTAVVIPTKKAGGTTEMLAKALRKVPTDNYITTYPGQGLNGYTVEEAKTVLKKCKSAFYILPSIISNEKQEILGTVSWNLREMLAHAEETRKLMPVCVETKAIVSTIQRKYKGIKIQEGVVDYGARFYFYTSKTTVASLINTLNDLNETLVTMPLGYVTHGLNLEEAARYMRSLKVPATVSVSSPDAVTAYNGYLTSSSKTPEEHFIETISLAGSYKDWSYSGQSTQLGIEFLKRGDKSVYYTSNPTTFHLDGEVITFDNLKTLLSLREVRTIKVFTTVDNINLHTQVVDMSMTYGQQFGPTYLDGADVTKIKPHNSHEGKTFYVLPNDDTLRVEAFEYYHTTDPSFLGRYMSALNHTKKWKYPQVNGLTSIKWADNNCYLATALLTLQQIELKFNPPALQDAYYRARAGEAANFCALILAYCNKTVGELGDVRETMSYLFQHANLDSCKRVLNVVCKTCGQQQTTLKGVEAVMYMGTLSYEQFKKGVQIPCTCGKQATKYLVQQESPFVMMSAPPAQYELKHGTFTCASEYTGNYQCGHYKHITSKETLYCIDGALLTKSSEYKGPITDVFYKENSYTTTIKPVTYKLDGVVCTEIDPKLDNYYKKDNSYFTEQPIDLVPNQPYPNASFDNFKFVCDNIKFADDLNQLTGYKKPASRELKVTFFPDLNGDVVAIDYKHYTPSFKKGAKLLHKPIVWHVNNATNKATYKPNTWCIRCLWSTKPVETSNSFDVLKSEDAQGMDNLACEDLKPVSEEVVENPTIQKDVLECNVKTTEVVGDIILKPANNSLKITEEVGHTDLMAAYVDNSSLTIKKPNELSRVLGLKTLATHGLAAVNSVPWDTIANYAKPFLNKVVSTTTNIVTRCLNRVCTNYMPYFFTLLLQLCTFTRSTNSRIKASMPTTIAKNTVKSVGKFCLEASFNYLKSPNFSKLINIIIWFLLLSVCLGSLIYSTAALGVLMSNLGMPSYCTGYREGYLNSTNVTIATYCTGSIPCSVCLSGLDSLDTYPSLETIQITISSFKWDLTAFGLVAEWFLAYILFTRFFYVLGLAAIMQLFFSYFAVHFISNSWLMWLIINLVQMAPISAMVRMYIFFASFYYVWKSYVHVVDGCNSSTCMMCYKRNRATRVECTTIVNGVRRSFYVYANGGKGFCKLHNWNCVNCDTFCAGSTFISDEVARDLSLQFKRPINPTDQSSYIVDSVTVKNGSIHLYFDKAGQKTYERHSLSHFVNLDNLRANNTKGSLPINVIVFDGKSKCEESSAKSASVYYSQLMCQPILLLDQALVSDVGDSAEVAVKMFDAYVNTFSSTFNVPMEKLKTLVATAEAELAKNVSLDNVLSTFISAARQGFVDSDVETKDVVECLKLSHQSDIEVTGDSCNNYMLTYNKVENMTPRDLGACIDCSARHINAQVAKSHNIALIWNVKDFMSLSEQLRKQIRSAAKKNNLPFKLTCATTRQVVNVVTTKIALKGG

SEQ ID NO: 16013 - protein, 1946 aa, Artificial Sequence
  SARS-CoV-2__MT811695.1__non-structural protein 3 (NSP3)
MAPTKVTFGDDTVIEVQGYKSVNITFELDERIDKVLNEKCSAYTVELGTEVNEFACVVADAVIKTLQPVSELLTPLGIDLDEWSMATYYLFDESGEFKLASHMYCSFYPPDEDEEEGDCEEEEFEPSTQYEYGTEDDYQGKPLEFGATSAALQPEEEQEEDWLDDDSQQTVGQQDGSEDNQTTTIQTIVEVQPQLEMELTPVVQTIEVNSFSGYLKLTDNVYIKNADIVEEAKKVKPTVVVNAANVYLKHGGGVAGALNKATNNAMQVESDDYIATNGPLKVGGSCVLSGHNLAKHCLHVVGPNVNKGEDIQLLKSAYENFNQHEVLLAPLLSAGIFGADPIHSLRVCVDTVRTNVYLAVFDKNLYDKLVSSFLEMKSEKQVEQKIAEIPKEEVKPFITESKPSVEQRKQDDKKIKACVEEVTTTLEETKFLTENLLLYIDINGNLHPDSATLVSDIDITFLKKDAPYIVGDVVQEGVLTAVVIPTKKAGGTTEMLAKALRKVPTDNYITTYPGQGLNGYTVEEAKTVLKKCKSAFYILPSIISNEKQEILGTVSWNLREMLAHAEETRKLMPVCVETKAIVSTIQRKYKGIKIQEGVVDYGARFYFYTSKTTVASLINTLNDLNETLVTMPLGYVTHGLNLEEAARYMRSLKVPATVSVSSPDAVTAYNGYLTSSSKTPEEHFIETISLAGSYKDWSYSGQSTQLGIEFLKRGDKSVYYTSNPTTFHLDGEVITFDNLKTLLSLREVRTIKVFTTVDNINLHTQVVDMSMTYGQQFGPTYLDGADVTKIKPHNSHEGKTFYVLPNDDTLRVEAFEYYHTTDPSFLGRYMSALNHTKKWKYPQVNGLTSIKWADNNCYLATALLTLQQIELKFNPPALQDAYYRARAGEAANFCALILAYCNKTVGELGDVRETMSYLFQHANLDSCKRVLNVVCKTCGQQQTTLKGVEAVMYMGTLSYEQFKKGVQIPCTCGKQATKYLVQQESPFVMMSAPPAQYELKHGTFTCASEYTGNYQCGHYKHITSKETLYCIDGALLTKSSEYKGPITDVFYKENSYTTTIKPVTYKLDGVVCTEIDPKLDNYYKKDNSYFTEQPIDLVPNQPYPNASFDNFKFVCDNIKFADDLNQLTGYKKPASRELKVTFFPDLNGDVVAIDYKHYTPSFKKGAKLLHKPIVWHVNNATNKATYKPNTWCIRCLWSTKPVETSNSFDVLKSEDTQGMDNLACEDLKPVSEEVVENPTIQKDVLECNVKTTEVVGDIILKPANNSLKITEEVGHTDLMAAYVDNSSLTIKKPNELSRVLGLKTLATHGLAAVNSVPWDTIANYAKPFLNKVVSTTTNIVTRCLNRVCTNYMPYFFTLLLQLCTFTRSTNSRIKASMPTTIAKNTVKSVGKFCLEASFNYLKSPNFSKLINIIIWFLLLSVCLGSLIYSTAALGVLMSNLGMPSYCTGYREGYLNSTNVTIATYCTGSIPCSVCLSGLDSLDTYPSLETIQITISSFKWDLTAFGLVAEWFLAYILFTRFFYVLGLAAIMQLFFSYFAVHFISNSWLMWLIINLVQMAPISAMVRMYIFFASFYYVWKSYVHVVDGCNSSTCMMCYKRNRATRVECTTIVNGVRRSFYVYANGGKGFCKLHNWNCVNCDTFCAGSTFISDEVARDLSLQFKRPINPTDQSSYIVDSVTVKNGSIHLYFDKAGQKTYERHFLSHFVNLDNLRANNTKGSLPINVIVFDGKSKCEESSAKSASVYYSQLMCQPILLLDQALVSDVGDSAEVAVKMFDAYVNTFSSTFNVPMEKLKTLVATAEAELAKNVSLDNVLSTFISAARQGFVDSDVETKDVVECLKLSHQSDIEVTGDSCNNYMLTYNKVENMTPRDLGACIDCSARHINAQVAKSHNIALIWNVKDFMSLSEQLRKQIRSAAKKNNLPFKLTCATTRQVVNVVTTKIALKGG

SEQ ID NO: 16014 - protein, 1946 aa, Artificial Sequence
  SARS-CoV-2__MT811708.1__non-structural protein 3 (NSP3)
MAPTKVTFGDDTVIEVQGYKSVNITFELDERIDKVLNEKCSAYTVELGTEVNEFACVVADAVIKTLQPVSELLTPLGIDLDEWSMATYYLFDESGEFKLASHMYCSFYPPDEDEEEGDCEEEEFEPSTQYEYGTEDDYQGKPLEFGATSAALQPEEEQEEDWLDDDSQQTVGQQDGSEDNQTTTIQTIVEVQPQLEMELTPVVQTIEVNSFSGYLKLTDNVYIKNADIVEEAKKVKPTVVVNAANVYLKHGGGVAGALNKATNNAMQVESDDYIATNGPLKVGGSCVLSGHNLAKHCLHVVGPNVNKGEDIQLLKSAYENFNQHEVLLAPLLSAGIFGADPIHSLRVCVDTVRTNVYLAVFDKNLYDKLVSSFLEMKSEKQVEQKIAEIPKEEVKPFITESKPSVEQRKQDDKKIKACVEEVTTTLEETKFLTENLLLYIDINGNLHPDSATLVSDIDITFLKKDAPYIVGDVVQEGVLTAVVIPTKKAGGTTEMLAKALRKVPTDNYITTYPGQGLNGYTVEEAKTVLKKCKSAFYILPSIISNEKQEILGTVSWNLREMLAHAEETRKLMPVCVETKAIVSTIQRKYKGIKIQEGVVDYGARFYFYTSKTTVASLINTLNDLNETLVTMPLGYVTHGLNLEEAARYMRSLKVPATVSVSSPDAVTAYNGYLTSSSKTPEEHFIETISLAGSYKDWSYSGQSTQLGIEFLKRGDKSVYYTSNPTTFHLDGEVITFDNLKTLLSLREVRTIKVFTTVDNINLHTQVVDMSMTYGQQFGPTYLDGADVTKIKPHNSHEGKTFYVLPNDDTLRVEAFEYYHTTDPSFLGRYMSALNHTKKWKYPQVNGLTSIKWADNNCYLATALLTLQQIELKFNPPALQDAYYRARAGEAANFCALILAYCNKTVGELGDVRETMSYLFQHANLDSCKRVLNVVCKTCGQQQTTLKGVEAVMYMGTLSYEQFKKGVQIPCTCGKQATKYLVQQESPFVMMSAPPAQYELKHGTFTCASEYTGNYQCGHYKHITSKETLYCIDGALLTKSSEYKGPITDVFYKENSYTTTIKPVTYKLDGVVCTEIDPKLDNYYKKDNSYFTEQPIDLVPNQPYPNASFDNFKFVCDNIKFADDLNQLTGYKKPASRELKVTFFPDLNGDVVAIDYKHYTPSFKKGAKLLHKPIVWHVNNATNKATYKPNTWCIRCLWSTKPVETSNSFDVLKSEDTQGMDNLACEDLKPVSEEVVENPTIQKDVLECNVKTTEVVGDIILKPANNSLKITEEVGHTDLMAAYVDNSSLTIKKPNELSRVLGLKTLATHGLAAVNSVPWDTIANYAKPFLNKVVSTTTNIVTRCLNRVCTNYMPYFFTLLLQLCTFTRSTNSRIKASMPTTIAKNTVKSVGKFCLEASFNYLKSPNFSKLINIIIWFLLLSVCLGSLIYSTAALGVLMSNLGMPSYCTGYREGYLNSTNVTIATYCTGSIPCSVCLSGLDSLDTYPSLETIQITISSFKWDLTAFGLVAEWFLAYILFTRFFYVLGLAAIMQLFFSYFAVHFISNSWLMWLIINLVQMAPISAMVRMYIFFASFYYVWKSYVHVVDGCNSSTCMMCYKRNRATRVECTTIVNGVRRSFYVYANGGKGFCKLHNWNCVNCDTFCAGSTFISDEVARDLSLQFKRPINPTDQSSYIVDSVTVKNGSIHLYFDKAGQKTYERHSLSHFVNLDNLRANNTKGSLPINVIVFDGKSKCEESSAKSASVYYSQLMCQPILLLDQALVSDVGDSAEVAVKMFDAYVNTFSSTFNVPMEKLKTLVATAEAELAKNVSLDNVLSTFISAARQGFVDSDVETKDVVECLKLSHQSDIEVTGDSCNNYMLTYNKVENMTPRDLGACIDCSARHINAQVAKSHNIALIWNVKDFMSLSEQLRKQIRSAAKKNNLPFKLTCATTRQVVNVVTTKIALKGG

SEQ ID NO: 16015 - protein, 1946 aa, Artificial Sequence
  SARS-CoV-2__MT811713.1__non-structural protein 3 (NSP3)
MAPTKVTFGDDTVIEVQGYKSVNITFELDERIDKVLNEKCSAYTVELGTEVNEFACVVADAVIKTLQPVSELLTPLGIDLDEWSMATYYLFDESGEFKLASHMYCSFYPPDEDEEEGDCEEEEFEPSTQYEYGTEDDYQGKPLEFGATSAALQPEEEQEEDWLDDDSQQTVGQQDGSEDNQTTTIQTIVEVQPQLEMELTPVVQTIEVNSFSGYLKLTDNVYIKNADIVEEAKKVKPTVVVNAANVYLKHGGGVAGALNKATNNAMQVESDDYIATNGPLKVGGSCVLSGHNLAKHCLHVVGPNVNKGEDIQLLKSAYENFNQHEVLLAPLLSAGIFGADPIHSLRVCVDTVRTNVYLAVFDKNLYDKLVSSFLEMKSEKQVEQKIAEIPKEEVKPFITESKPSVEQRKQDDKKIKACVEEVTTTLEETKFLTENLLLYIDINGNLHPDSATLVSDIDITFLKKDAPYIVGDVVQEGVLTAVVIPTKKAGGTTEMLAKALRKVPTDNYITTYPGQGLNGYTVEEAKTVLKKCKSAFYILPSIISNEKQEILGTVSWNLREMLAHAEETRKLMPVCVETKAIVSTIQRKYKGIKIQEGVVDYGARFYFYTSKTTVASLINTLNDLNETLVTMPLGYVTHGLNLEEAARYMRSLKVPATVSVSSPDAVTAYNGYLTSSSKTPEEHFIETISLAGSYKDWSYSGQSTQLGIEFLKRGDKSVYYTSNPTTFHLDGEVITFDNLKTLLSLREVRTIKVFTTVDNINLHTQVVDMSMTYGQQFGPTYLDGADVTKIKPHNSHEGKTFYVLPNDDTLRVEAFEYYHTTDPSFLGRYMSALNHTKKWKYPQVNGLTSIKWADNNCYLATALLTLQQIELKFNPPALQDAYYRARAGEAANFCALILAYCNKTVGELGDVRETMSYLFQHANLDSCKRVLNVVCKTCGQQQTTLKGVEAVMYMGTLSYEQFKKGVQIPCTCGKQATKYLVQQESPFVMMSAPPAQYELKHGTFTCASEYTGNYQCGHYKHITSKETLYCIDGALLTKSSEYKGPITDVFYKENSYTTTIKPVTYKLDGVVCTEIDPKLDNYYKKDNSYFTEQPIDLVPNQPYPNASFDNFKFVCDNIKFADDLNQLTGYKKPASRELKVTFFPDLNGDVVAIDYKHYTPSFKKGAKLLHKPIVWHVNNATNKATYKPNTWCIRCLWSTKPVETSNSFDVLKSEDAQGMDNLACEDLKPVSEEVVENPTIQKDVLECNVKTTEVVGDIILKPANNSLKITEEVGHTDLMAAYVDNSSLTIKKPNELSRVLGLKTLATHGLAAVNSVPWDTIANYAKPFLNKVVSTTTNIVTRCLNRVCTNYMPYFFTLLLQLCTFTRSTNSRIKASMPTTIAKNTVKSVGKFCLEASFNYLKSPNFSKLINIIIWFLLLSVCLGSLIYSTAALGVLMSNLGMPSYCTGYREGYLNSTNVTIATYCTGSIPCSVCLSGLDSLDTYPSLETIQITISSFKWDLTAFGLVAEWFLAYILFTRFFYVLGLAAIMQLFFSYFAVHFISNSWLMWLIINLVQMAPISAMVRMYIFFASFYYVWKSYVHVVDGCNSSTCMMCYKRNRATRVECTTIVNGVRRSFYVYANGGKGFCKLHNWNCVNCDTFCAGSTFISDEVARDLSLQFKRPINPTDQSSYIVDSVTVKNGSIHLYFDKAGQKTYERHSLSHFVNLDNLRANNTKGSLPINVIVFDGKSKCEESSAKSASVYYSQLMCQPILLLDQALVSDVGDSAEVAVKMFDAYVNTFSSTFNVPMEKLKTLVATAEAELANNVSLDNVLSTFISAARQGFVDSDVETKDVVECLKLSHQSDIEVTGDSCNNYMLTYNKVENMTPRDLGACIDCSARHINAQVAKSHNIALIWNVKDFMSLSEQLRKQIRSAAKKNNLPFKLTCATTRQVVNVVTTKIALKGG

SEQ ID NO: 16016 - protein, 1946 aa, Artificial Sequence
  SARS-CoV-2__MT811720.1__non-structural protein 3 (NSP3)
MAPTKVTFGDDTVIEVQGYKSVNITFELDERIDKVLNEKCSAYTVELGTEVNEFACVVADAIIKTLQPVSELLTPLGIDLDEWSMATYYLFDESGEFKLASHMYCSFYPPDEDEEEGDCEEEEFEPSTQYEYGTEDDYQGKPLEFGATSAALQPEEEQEEDWLDDDSQQTVGQQDGSEDNQTTTIQTIVEVQPQLEMELTPVVQTIEVNSFSGYLKLTDNVYIKNADIVEEAKKVKPTVVVNAANVYLKHGGGVAGALNKATNNAMQVESDDYIATNGPLKVGGSCVLSGHNLAKHCLHVVGPNVNKGEDIQLLKSAYENFNQHEVLLAPLLSAGIFGADPIHSLRVCVDTVRTNVYLAVFDKNLYDKLVSSFLEMKSEKQVEQKIAEIPKEEVKPFITESKPSVEQRKQDDKKIKACVEEVTTTLEETKFLTENLLLYIDINGNLHPDSATLVSDIDITFLKKDAPYIVGDVVQEGVLTAVVIPTKKAGGTTEMLAKALRKVPTDNYITTYPGQGLNGYTVEEAKTVLKKCKSAFYILPSIISNEKQEILGTVSWNLREMLAHAEETRKLMPVCVETKAIVSTIQRKYKGIKIQEGVVDYGARFYFYTSKTTVASLINTLNDLNETLVTMPLGYVTHGLNLEEAARYMRSLKVPATVSVSSPDAVTAYNGYLTSSSKTPEEHFIETISLAGSYKDWSYSGQSTQLGIEFLKRGDKSVYYTSNPTTFHLDGEVITFDNLKTLLSLREVRTIKVFTTVDNINLHTQVVDMSMTYGQQFGPTYLDGADVTKIKPHNSHEGKTFYVLPNDDTLRVEAFEYYHTTDPSFLGRYMSALNHTKKWKYPQVNGLTSIKWADNNCYLATALLTLQQIELKFNPPALQDAYYRARAGEAANFCALILAYCNKTVGELGDVRETMSYLFQHANLDSCKRVLNVVCKTCGQQQTTLKGVEAVMYMGTLSYEQFKKGVQIPCTCGKQATKYLVQQESPFVMMSAPPAQYELKHGTFTCASEYTGNYQCGHYKHITSKETLYCIDGALLTKSSEYKGPITDVFYKENSYTTTIKPVTYKLDGVVCTEIDPKLDNYYKKDNSYFTEQPIDLVPNQPYPNASFDNFKFVCDNIKFADDLNQLTGYKKPASRELKVTFFPDLNGDVVAIDYKHYTPSFKKGAKLLHKPIVWHVNNATNKATYKPNTWCIRCLWSTKPVETSNSFDVLKSEDAQGMDNLACEDLKPVSEEVVENPTIQKDVLECNVKTTEVVGDIILKPANNSLKITEEVGHTDLMAAYVDNSSLTIKKPNELSRVLGLKTLATHGLAAVNSVPWDTIANYAKPFLNKVVSTTTNIVTRCLNRVCTNYMPYFFTLLLQLCTFTRSTNSRIKASMPTTIAKNTVKSVGKFCLEASFNYLKSPNFSKLINIIIWFLLLSVCLGSLIYSTAALGVLMSNLGMPSYCTGYREGYLNSTNVTIATYCTGSIPCSVCLSGLDSLDTYPSLETIQITISSFKWDLTAFGLVAEWFLAYILFTRFFYVLGLAAIMQLFFSYFAVHFISNSWLMWLIINLVQMAPISAMVRMYIFFASFYYVWKSYVHVVDGCNSSTCMMCYKRNRATRVECTTIVNGVRRSFYVYANGGKGFCKLHNWNCVNCDTFCAGSTFISDEVARDLSLQFKRPINPTDQSSYIVDSVTVKNGSIHLYFDKAGQKTYERHSLSHFVNLDNLRANNTKGSLPINVIVFDGKSKCEESSAKSASVYYSQLMCQPILLLDQALVSDVGDSAEVAVKMFDAYVNTFSSTFNVPMEKLKTLVATAEAELAKNVSLDNVLSTFISAARQGFVDSDVETKDVVECLKLSHQSDIEVTGDSCNNYMLTYNKVENMTPRDLGACIDCSARHINAQVAKSHNIALIWNVKDFMSLSEQLRKQIRSAAKKNNLPFKLTCATTRQVVNVVTTKIALKGG

SEQ ID NO: 16017 - protein, 1946 aa, Artificial Sequence
  SARS-CoV-2__MT811723.1__non-structural protein 3 (NSP3)
MAPTKVTFGDDTVIEVQGYKSVNITFELDERIDKVLNEKCSAYTVELGTEVNEFACVVADAVIKTLQPVSELLTPLGIDLDEWSMATYYLFDESGEFKLASHMYCSFYPPDEDEEEGDCEEEEFEPSTQYEYGTEDDYQGKPLEFGATSAALQPEEEQEEDWLDDDSQQAVGQQDGSEDNQTTTIQTIVEVQPQLEMELTPVVQTIEVNSFSGYLKLTDNVYIKNADIVEEAKKVKPTVVVNAANVYLKHGGGVAGALNKATNNAMQVESDDYIATNGPLKVGGSCVLSGHNLAKHCLHVVGPNVNKGEDIQLLKSAYENFNQHEVLLAPLLSAGIFGADPIHSLRVCVDTVRTNVYLAVFDKNLYDKLVSSFLEMKSEKQVEQKIAEIPKEEVKPFITESKPSVEQRKQDDKKIKACVEEVTTTLEETKFLTENLLLYIDINGNLHPDSATLVSDIDITFLKKDAPYIVGDVVQEGVLTAVVIPTKKAGGTTEMLAKALRKVPTDNYITTYPGQGLNGYTVEEAKTVLKKCKSAFYILPSIISNEKQEILGTVSWNLREMLAHAEETRKLMPVCVETKAIVSTIQRKYKGIKIQEGVVDYGARFYFYTSKTTVASLINTLNDLNETLVTMPLGYVTHGLNLEEAARYMRSLKVPATVSVSSPDAVTAYNGYLTSSSKTPEEHFIETISLAGSYKDWSYSGQSTQLGIEFLKRGDKSVYYTSNPTTFHLDGEVITFDNLKTLLSLREVRTIKVFTTVDNINLHTQVVDMSMTYGQQFGPTYLDGADVTKIKPHNSHEGKTFYVLPNDDTLRVEAFEYYHTTDPSFLGRYMSALNHTKKWKYPQVNGLTSIKWADNNCYLATALLTLQQIELKFNPPALQDAYYRARAGEAANFCALILAYCNKTVGELGDVRETMSYLFQHANLDSCKRVLNVVCKTCGQQQTTLKGVEAVMYMGTLSYEQFKKGVQIPCTCGKQATKYLVQQESPFVMMSAPPAQYELKHGTFTCASEYTGNYQCGHYKHITSKETLYCIDGALLTKSSEYKGPITDVFYKENSYTTTIKPVTYKLDGVVCTEIDPKLDNYYKKDNSYFTEQPIDLVPNQPYPNASFDNFKFVCDNIKFADDLNQLTGYKKPASRELKVTFFPDLNGDVVAIDYKHYTPSFKKGAKLLHKPIVWHVNNATNKATYKPNTWCIRCLWSTKPVETSNSFDVLKSEDAQGMDNLACEDLKPVSEEVVENPTIQKDVLECNVKTTEVVGDIILKPANNSLKITEEVGHTDLMAAYVDNSSLTIKKPNELSRVLGLKTLATHGLAAVNSVPWDTIANYAKPFLNKVVSTTTNIVTRCLNRVCTNYMPYFFTLLLQLCTFTRSTNSRIKASMPTTIAKNTVKSVGKFCLEASFNYLKSPNFSKLINIIIWFLLLSVCLGSLIYSTAALGVLMSNLGMPSYCTGYREGYLNSTNVTIATYCTGSIPCSVCLSGLDSLDTYPSLETIQITISSFKWDLTAFGLVAEWFLAYILFTRFFYVLGLAAIMQLFFSYFAVHFISNSWLMWLIINLVQMAPISAMVRMYIFFASFYYVWKSYVHVVDGCNSSTCMMCYKRNRATRVECTTIVNGVRRSFYVYANGGKGFCKLHNWNCVNCDTFCAGSTFISDEVARDLSLQFKRPINPTDQSSYIVDSVTVKNGSIHLYFDKAGQKTYERHSLSHFVNLDNLRANNTKGSLPINVIVFDGKSKCEESSAKSASVYYSQLMCQPILLLDQALVSDVGDSAEVAVKMFDAYVNTFSSTFNVPMEKLKTLVATAEAELAKNVSLDNVLSTFISAARQGFVDSDVETKDVVECLKLSHQSDIEVTGDSCNNYMLTYNKVENMTPRDLGACIDCSARHINAQVAKSHNIALIWNVKDFMSLSEQLRKQIRSAAKKNNLPFKLTCATTRQVVNVVTTKIALKGG

SEQ ID NO: 16018 - protein, 1946 aa, Artificial Sequence
  SARS-CoV-2__MT811727.1__non-structural protein 3 (NSP3)
MAPTKVTFGDDTVIEVQGYKSVNITFELDERIDKVLNEKCSAYTVELGTEVNEFACVVADAVIKTLQPVSELLTPLGIDLDEWSMATYYLFDESGEFKLASHMYCSFYPPDEDEEEGDCEEEEFEPSTQYEYGTEDDYQGKPLEFGATSAALQPEEEQEEDWLDDDSQQTVGQQDGSEDNQTTTIQTIVEVQPQLEMELTPVVQTIEVNSFSGYLKLTDNVYIKNADIVEEAKKVKPTVVVNAANVYLKHGGGVAGALNKATNNAMQVESDDYIATNGPLKVGGSCVLSGHNLAKHCLHVVGPNVNKGEDIQLLKSAYENFNQHEVLLAPLLSAGIFGADPIHSLRVCVDTVRTNVYLAVFDKNLYDKLVSSFLEMKSEKQVEQNIAEIPKEEVKPFITESKPSVEQRKQDDKKIKACVEEVTTTLEETKFLTENLLLYIDINGNLHPDSATLVSDIDITFLKKDAPYIVGDVVQEGVLTAVVIPTKKAGGTTEMLAKALRKVPTDNYITTYPGQGLNGYTVEEAKTVLKKCKSAFYILPSIISNEKQEILGTVSWNLREMLAHAEETRKLMPVCVETKAIVSTIQRKYKGIKIQEGVVDYGARFYFYTSKTTVASLINTLNDLNETLVTMPLGYVTHGLNLEEAARYMRSLKVPATVSVSSPDAVTAYNGYLTSSSKTPEEHFIETISLAGSYKDWSYSGQSTQLGIEFLKRGDKSVYYTSNPTTFHLDGEVITFDNLKTLLSLREVRTIKVFTTVDNINLHTQVVDMSMTYGQQFGPTYLDGADVTKIKPHNSHEGKTFYVLPNDDTLRVEAFEYYHTTDPSFLGRYMSALNHTKKWKYPQVNGLTSIKWADNNCYLATALLTLQQIELKFNPPALQDAYYRARAGEAANFCALILAYCNKTVGELGDVRETMSYLFQHANLDSCKRVLNVVCKTCGQQQTTLKGVEAVMYMGTLSYEQFKKGVQIPCTCGKQATKYLVQQESPFVMMSAPPAQYELKHGTFTCASEYTGNYQCGHYKHITSKETLYCIDGALLTKSSEYKGPITDVFYKENSYTTTIKPVTYKLDGVVCTEIDPKLDNYYKKDNSYFTEQPIDLVPNQPYPNASFDNFKFVCDNIKFADDLNQLTGYKKPASRELKVTFFPDLNGDVVAIDYKHYTPSFKKGAKLLHKPIVWHVNNATNKATYKPNTWCIRCLWSTKPVETSNSFDVLKSEDAQGMDNLVCEDLKPVSEEVVENPTIQKDVLECNVKTTEVVGDIILKPANNSLKITEEVGHTDLMAAYVDNSSLTIKKPNELSRVLGLKTLATHGLAAVNSVPWDTIANYAKPFLNKVVSTTTNIVTRCLNRVCTNYMPYFFTLLLQLCTFTRSTNSRIKASMPTTIAKNTVKSVGKFCLEASFNYLKSPNFSKLINIIIWFLLLSVCLGSLIYSTAALGVLMSNLGMPSYCTGYREGYLNSTNVTIATYCTGSIPCSVCLSGLDSLDTYPSLETIQITISSFKWDLTAFGLVAEWFLAYILFTRFFYVLGLAAIMQLFFSYFAVHFISNSWLMWLIINLVQMAPISAMVRMYIFFASFYYVWKSYVHVVDGCNSSTCMMCYKRNRATRVECTTIVNGVRRSFYVYANGGKGFCKLHNWNCVNCDTFCAGSTFISDEVARDLSLQFKRPINPTDQSSYIVDSVTVKNGSIHLYFDKAGQKTYERHSLSHFVNLDNLRANNTKGSLPINVIVFDGKSKCEESSAKSASVYYSQLMCQPILLLDQALVSDVGDSAEVAVKMFDAYVNTFSSTFNVPMEKLKTLVATAEAELAKNVSLDNVLSTFISAARQGFVDSDVETKDVVECLKLSHQSDIEVTGDSCNNYMLTYNKVENMTPRDLGACIDCSARHINAQVAKSHNIALIWNVKDFMSLSEQLRKQIRSAAKKNNLPFKLTCATTRQVVNVVTTKIALKGG

SEQ ID NO: 16019 - protein, 1946 aa, Artificial Sequence
  SARS-CoV-2__MT811731.1__non-structural protein 3 (NSP3)
MAPTKVTFGDDTVIEVQGYKSVNITFELDERIDKVLNEKCSAYTVELGTEVNEFACVVADAVIKTLQPVSELLTPLGIDLDEWSMATYYLFDESGEFKLASHMYCSFYPPDEDEEEGDCEEEEFEPSTQYEYGTEDDYQGKPLEFGATSAALQPEEEQEEDWLDDDSQQTVGQQDGSEDNQTTTIQTIVEVQPQLEMELTPVVQTIEVNSFSGYLKLTDNVYIKNADIVEEAKKVKPTVVVNAANVYLKHGGGVAGALNKATNNAMQVESDDYIATNGPLKVGGSCVLSGHNLAKHCLHVVGPNVNKGEDIQLLKSAYENFNQHEVLLAPLLSAGIFGADPIHSLRVCVDTVRTNVYLAVFDKNLYDKLVSSFLEMKSEKQVEQKIAEIPKEEVKPFITESKPSVEQRKQDDKKIKACVEEVTTTLEETKFLTENLLLYIDINGNLHPDSATLVSDIDITFLKKDAPYIVGDVVQEGVLTAVVIPTKKAGGTTEMLAKALRKVPTDNYITTYPGQGLNGYTVEEAKTVLKKCKSAFYILPSIISNEKQEILGTVSWNLREMLAHAEETRKLMPVCVETKAIVSTIQRKYKGIKIQEGVVDYGARFYFYTSKTTVASLINTLNDLNETLVTMPLGYVTHGLNLEEAARYMRSLKVPATVSVSSPDAVTAYNGYLTSSSKTPEEHFIETISLAGSYKDWSYSGQSTQLGIEFLKRGDKSVYYTSNPTTFHLDGEVITFDNLKTFLSLREVRTIKVFTTVDNINLHTQVVDMSMTYGQQFGPTYLDGADVTKIKPHNSHEGKTFYVLPNDDTLRVEAFEYYHTTDPSFLGRYMSALNHTKKWKYPQVNGLTSIKWADNNCYLATALLTLQQIELKFNPPALQDAYYRARAGEAANFCALILAYCNKTVGELGDVRETMSYLFQHANLDSCKRVLNVVCKTCGQQQTTLKGVEAVMYMGTLSYEQFKKGVQIPCTCGKQATKYLVQQESPFVMMSAPPAQYELKHGTFTCASEYTGNYQCGHYKHITSKETLYCIDGALLTKSSEYKGPITDVFYKENSYTTTIKPVTYKLDGVVCTEIDPKLDNYYKKDNSYFTEQPIDLVPNQPYPNASFDNFKFVCDNIKFADDLNQLTGYKKPASRELKVTFFPDLNGDVVAIDYKHYTPSFKKGAKLLHKPIVWHVNNATNKATYKPNTWCIRCLWSTKPVETSNSFDVLKSEDAQGMDNLACEDLKPVSEEVVENPTIQKDVLECNVKTTEVVGDIILKPANNSLKITEEVGHTDLMAAYVDNSSLTIKKPNELSRVLGLKTLATHGLAAVNSVPWDTIANYAKPFLNKVVSTTTNIVTRCLNRVCTNYMPYFFTLLLQLCTFTRSTNSRIKASMPTTIAKNTVKSVGKFCLEASFNYLKSPNFSKLINIIIWFLLLSVCLGSLIYSTAALGVLMSNLGMPSYCTGYREGYLNSTNVTIATYCTGSIPCSVCLSGLDSLDTYPSLETIQITISSFKWDLTAFGLVAEWFLAYILFTRFFYVLGLAAIMQLFFSYFAVHFISNSWLMWLIINLVQMAPISAMVRMYIFFASFYYVWKSYVHVVDGCNSSTCMMCYKRNRATRVECTTIVNGVRRSFYVYANGGKGFCKLHNWNCVNCDTFCAGSTFISDEVARDLSLQFKRPINPTDQSSYIVDSVTVKNGSIHLYFDKAGQKTYERHSLSHFVNLDNLRANNTKGSLPINVIVFDGKSKCEESSAKSASVYYSQLMCQPILLLDQALVSDVGDSAEVAVKMFDAYVNTFSSTFNVPMEKLKTLVATAEAELAKNVSLDNVLSTFISAARQGFVDSDVETKDVVECLKLSHQSDIEVTGDSCNNYMLTYNKVENMTPRDLGACIDCSARHINAQVAKSHNIALIWNVKDFMSLSEQLRKQIRSAAKKNNLPFKLTCATTRQVVNVVTTKIALKGG

SEQ ID NO: 16020 - protein, 1946 aa, Artificial Sequence
  SARS-CoV-2__MT811755.1__non-structural protein 3 (NSP3)
MAPTKVTFGDDTVIEVQGYKSVNITFELDERIDKVLNEKCSAYTVELGTEVNEFACVVADAVIKTLQPVSELLTPLGIDLDEWSMATYYLFDESGEFKLASHMYCSFYPPDEDEEEGDCEEEEFEPSTQYEYGTEDDYQGKPLEFGATSAALQPEEEQEEDWLDDDSQQTVGQQDGSEDNQTTTIQTIVEVQPQLEMELTPVVQTIEVNSFSGYLKLTDNVYIKNADIVEEAKKVKPTVVVNAANVYLKHGGGVAGALNKATNNAMQVESDDYIATNGPLKVGGSCVLSGHNLAKHCLHVVGPNVNKGEDIQLLKSAYENFNQHEVLLAPLLSAGIFGADPIHSLRVCVDTVRTNVYLAVFDKNLYDKLVSSFLEMKSEKQVEQKIAEIPKEEVKPFITESKPSVEQRKQDDKKIKACVEEVTTTLEETKFLTENLLLYIDINGNLHPDSATLVSDIDITFLKKDAPYIVGDVVQEGVLTAVVIPTKKAGGTTEMLAKALRKVPTDNYITTYPGQGLNGYTVEEAKTVLKKCKSAFYILPSIISNEKQEILGTVSWNLREMLAHAEETRKLMPVCVETKAIVSTIQRKYKGIKIQEGVVDYGARFYFYTSKTTVASLINTLNDLNETLVTMPLGYVTHGLNLEEAARYMRSLKVPATVSVSSPDAVTAYNGYLTSSSKTPEEHFIETISLAGSYKDWSYSGQSTQLGIEFLKRGDKSVYYTSNPTTFHLDGEVITFDNLKTLLSLREVRTIKVFTTVDNINLHTQVVDMSMTYGQQFGPTYLDGADVTKIKPHNSHEGKTFYVLPNDDTLRVEAFEYYHTTDPSFLGRYMSALNHTKKWKYPQVNGLTSIKWADNNCYLATALLTLQQIELKFNPPALQDAYYRARAGEAANFCALILAYCNKTVGELGDVRETMSYLFQHANLDSCKRVLNVVCKTCGQQQTTLKGVEAVMYMGTLSYEQFKKGVQIPCTCGKQATKYLVQQESPFVMMSAPPAQYELKHGTFTCASEYTGNYQCGHYKHITSKETLYCIDGALLTKSSEYKGPITDVFYKENSYTTTIKPVTYKLDGVVCTEIDPKLDNYYKKDNSYFTEQPIDLVPNQPYPNASFDNFKFVCDNIKFADDLNQLTGYKKPASRELKVTFFPDLNGDVVAIDYKHYTPSFKKGAKLLHKPIVWHVNNATNKATYKPNTWCIRCLWSTKPVETSNSFDVLKSEDAQGMDNLACEDLKPVSEEVVENPTIQKDVLECNVKTTEVVGDIILKPANNSLKITEEVGHTDLMAAYVDNSSLTIKKPNELSRVLGLKTLATHGLAAVNSVPWDTIANYAKPFLNKVVSTTTNIVTRCLNRVCTNYMPYFFTLLLQLCTFTRSTNSRIKASMPTTIAKNTVKSVGKFCLEASFNYLKSPNFSKLINIIIWFLLLSVCLGSLIYSTAALGVLMSNLGMPSYCTGYREGYLNSTNVTIATYCTGSIPCSVCLSGLDSLDTYPSLETIQITISSFKWDLTAFGLVAEWFLAYILFTRFFYVLGLAAIMQLFFSYFAVHFISNSWLMWLIINLVQMAPISAMVRMYIFFASFYYVWKSYVHVVDGCNTSTCMMCYKRNRATRVECTTIVNGVRRSFYVYANGGKGFCKLHNWNCVNCDTFCAGSTFISDEVARDLSLQFKRPINPTDQSSYIVDSVTVKNGSIHLYFDKAGQKTYERHSLSHFVNLDNLRANNTKGSLPINVIVFDGKSKCEESSAKSASVYYSQLMCQPILLLDQALVSDVGDSAEVAVKMFDAYVNTFSSTFNVPMEKLKTLVATAEAELAKNVSLDNVLSTFISAARQGFVDSDVETKDVVECLKLSHQSDIEVTGDSCNNYMLTYNKVENMTPRDLGACIDCSARHINAQVAKSHNIALIWNVKDFMSLSEQLRKQIRSAAKKNNLPFKLTCATTRQVVNVVTTKIALKGG

SEQ ID NO: 16021 - protein, 1946 aa, Artificial Sequence
  SARS-CoV-2__MT806104.1__non-structural protein 3 (NSP3)
MAPTKVTFGDDTVIEVQGYKSVNITFELDERIDKVLNEKCSAYTVELGTEVNEFACVVADAVIKTLQPVSELLTPLGIDLDEWSMATYYLFDESGEFKLASHMYCSFYPPDEDEEEGDCEEEEFEPSTQYEYGTEDDYQGKPLEFGATSAALQPEEEQEEDWLDDDSQQTVGQQDGSEDNQTTTIQTIVEVQPQLEMELTPVVQTIEVNSFSGYLKLTDNVYIKNADIVEEAKKVKPTVVVNAANVYLKHGGGVAGALNKATNNAMQVESDDYIATNGPLKVGGSCVLSGHNLAKHCLHVVGPNVNKGEDIQLLKSAYENFNQHEVLLAPLLSAGIFGADPIHSLRVCVDTVRTNVYLAVFDKNLYDKLVSSFLEMKSEKQVEQKIAEIPKEEVKPFITESKPSVEQRKQDDKKIKACVEEVTTTLEETKFLTENLLLYIDINGNLHPDSATLVSDIDITFLKKDAPYIVGDVVQEGVLTAVVIPTKKAGGTTEMLAKALRKVPTDNYITTYPGQGLNGYTVEEAKTVLKKCKSAFYILPSIISNEKQEILGTVSWNLREMLAHAEETRKLMPVCVETKAIVSTIQRKYKGIKIQEGVVDYGARFYFYTSKTTVASLINTLNDLNETLVTMPLGYVTHGLNLEEAARYMRSLKVPATVSVSSPDAVTAYNGYLTSSSKTPEEHFIETISLAGSYKDWSYSGQSTQLGIEFLKRGDKSVYYTSNPTTFHLDGEVITFDNLKTLLSLREVRTIKVFTTVDNINLHTQVVDMSMTYGQQFGPTYLDGADVTKIKPHNSHEGKTFYVLPNDDTLRVEAFEYYHTTDPSFLGRYMSALNHTKKWKYPQVNGLTSIKWADNNCYLATALLTLQQIELKFNPPALQDAYYRARAGEAANFCALILAYCNKTVGELGDVRETMSYLFQHANLDSCKRVLNVVCKTCGQQQTTLKGVEAVMYMGTLSYEQFKKGVQIPCTCGKQATKYLVQQESPFVMMSAPPAQYELKHGTFTCASEYTGNYQCGHYKHITSKETLYCIDGALLTKSSEYKGPITDVFYKENSYTTTIKPVTYKLDGVVCTEIDPKLDNYYKKDNSYFTEQPIDLVPNQPYPNASFDNFKFVCDNIKFADDLNQLTGYKKPASRELKVTFFPDLNGDVVAIDYKHYTPSFKKGAKLLHKPIVWHVNNATNKATYKPNTWCIRCLWSTKPVETSNSFDVLNSEDAQGMDNLACEDLKPVSEEVVENPTIQKDVLECNVKTTEVVGDIILKPANNSLKITEEVGHTDLMAAYVDNSSLTIKKPNELSRVLGLKTLATHGLAAVNSVPWDTIANYAKPFLNKVVSTTTNIVTRCLNRVCTNYMPYFFTLLLQLCTFTRSTNSRIKASMPTTIAKNTVKSVGKFCLEASFNYLKSPNFSKLINIIIWFLLLSVCLGSLIYSTAALGVLMSNLGMPSYCTGYREGYLNSTNVTIATYCTGSIPCSVCLSGLDSLDTYPSLETIQITISSFKWDLTAFGLVAEWFLAYILFTRFFYVLGLAAIMQLFFSYFAVHFISNSWLMWLIINLVQMAPISAMVRMYIFFASFYYVWKSYVHVVDGCNSSTCMMCYKRNRATRVECTTIVNGVRRSFYVYANGGKGFCKLHNWNCVNCDTFCAGSTFISDEVARDLSLQFKRPINPTDQSSYIVDSVTVKNGSIHLYFDKAGQKTYERHSLSHFVNLDNLRANNTKGSLPINVIVFDGKSKCEESSAKSASVYYSQLMCQPILLLDQALVSDVGDSAEVAVKMFDAYVNTFSSTFNVPMEKLKTLVATAEAELAKNVSLDNVLSTFISAARQGFVDSDVETKDVVECLKLSHQSDIEVTGDSCNNYMLTYNKVENMTPRDLGACIDCSARHINAQVAKSHNIALIWNVKDFMSLSEQLRKQIRSAAKKNNLPFKLTCATTRQVVNVVTTKIALKGG

SEQ ID NO: 16022 - protein, 1946 aa, Artificial Sequence
  SARS-CoV-2__MT806765.1__non-structural protein 3 (NSP3)
MAPTKVTFGDDTVIEVQGYKSVNITFELDERIDKVLNEKCSAYTVELGTEVNEFACVVADAVIKTLQPVSELLTPLGIDLDEWSMATYYLFDESGEFKLASHMYCSFYPPDEDEEEGDCEEEEFEPSTQYEYGTEDDYQGKPLEFGATSAALQPEEEQEEDWLDDDSQQTVGQQDGSEDNQTTTIQTIVEVQPQLEMELTPVVQTIEVNSFSGYLKLTDNVYIKNADIVEEAKKVKPTVVVNAANVYLKHGGGVAGALNKATNNAMQVESDDYIATNGPLKVGGSCVLSGHNLAKHCLHVVGPNVNKGEDIQLLKSAYENFNQHEVLLAPLLSAGIFGADPIHSLRVCVDTVRTNVYLAVFDKNLYDKLVSSFLEMKSEKQVEQKIAEIPKEEVKPFITESKPSVEQRKQDDKKIKACVEEVTTTLEETKFLTENLLLYIDINGNLHPDSATLVSDIDITFLKKDAPYIVGDVVQEGVLTAVVIPTKKAGGTTEMLAKALRKVPTDNYITTYPGQGLNGYTVEEAKTVLKKCKSAFYILPSIISNEKQEILGTVSWNLREMLAHAEETRKLMPVCVETKAIVSTIQRKYKGIKIQEGVVDYGARFYFYTSKTTVASLINTLNDLNETLVTMPLGYVTHGLNLEEAARYMRSLKVPATVSVSSPDAVTAYNGYLTSSSKTPEEHFIETISLAGSYKDWSYSGQSTQLGIEFLKRGDKSVYYTSNPTTFHLDGEVITFDNLKTLLSLREVRTIKVFTTVDNINLHTQVVDMSMTYGQQFGPTYLDGADVTKIKPHNSHEGKTFYVLPNDDTLRVEAFEYYHTTDPSFLGRYMSALNHTKKWKYPQVNGLTSIKWADNNCYLATALLTLQQIELKFNPPALQDAYYRARAGEAANFCALILAYCNKTVGELGDVRETMSYLFQHANLDSCKRVLNVVCKTCGQQQTTLKGVEAVMYMGTLSYEQFKKGVQIPCTCGKQATKYLVQQESPFVMMSAPPAQYELKHGTFTCASEYTGNYQCGHYKHITSKETLYCIDGALLTKSSEYKGPITDVFYKENSYTTTIKPVTYKLDGVVCTEIDPKLDNYYKKDNSYFTEQPIDLVPNQPYPNASFDNFKFVCDNIKFADDLNQLTGYKKPASRELKVTFFPDLNGDVVAIDYKHYTPSFKKGAKLLHKPIVWHVNNATNKATYKPNTWCIRCLWSTKPVETSNSLDVLKSEDAQGMDNLACEDLKPVSEEVVENPTIQKDVLECNVKTTEVVGDIILKPANNSLKITEEVGHTDLMAAYVDNSSLTIKKPNELSRVLGLKTLATHGLAAVNSVPWDTIANYAKPFLNKVVSTTTNIVTRCLNRVCTNYMPYFFTLLLQLCTFTRSTNSRIKASMPTTIAKNTVKSVGKFCLEASFNYLKSPNFSKLINIIIWFLLLSVCLGSLIYSTAALGVLMSNLGMPSYCTGYREGYLNSTNVTIATYCTGSIPCSVCLSGLDSLDTYPSLETIQITISSFKWDLTAFGLVAEWFLAYILFTRFFYVLGLAAIMQLFFSYFAVHFISNSWLMWLIINLVQMAPISAMVRMYIFFASFYYVWKSYVHVVDGCNSSTCMMCYKRNRATRVECTTIVNGVRRSFYVYANGGKGFCKLHNWNCVNCDTFCAGSTFISDEVARDLSLQFKRPINPTDQSSYIVDSVTVKNGSIHLYFDKAGQKTYERHSLSHFVNLDNLRANNTKGSLPINVIVFDGKSKCEESSAKSASVYYSQLMCQPILLLDQALVSDVGDSAEVAVKMFDAYVNTFSSTFNVPMEKLKTLVATAEAELAKNVSLDNVLSTFISAARQGFVDSDVETKDVVECLKLSHQSDIEVTGDSCNNYMLTYNKVENMTPRDLGACIDCSARHINAQVAKSHNIALIWNVKDFMSLSEQLRKQIRSAAKKNNLPFKLTCATTRQVVNVVTTKIALKGG

SEQ ID NO: 16023 - protein, 1946 aa, Artificial Sequence
  SARS-CoV-2__MT806772.1__non-structural protein 3 (NSP3)
MAPTKVTFGDDTVIEVQGYKSVNITFELDERIDKVLNEKCSAYTVELGTEVNEFACVVADAVIKTLQPVSELLTPLGIDLDEWSMATYYLFDESGEFKLASHMYCSFYPPDEDEEEGDCEEEEFEPSTQYEYGTEDDYQGKPLEFGATSAALQPEEEQEEDWLDDDSQQTVGQQDGSEDNQTTTIQTIVEVQPQLEMELTPVVQTIEVNSFSGYLKLTDNVYIKNADIVEEAKKVKPTVVVNAANVYLKHGGGVAGALNKATNNAMQVESDDYIATNGPLKVGGSCVLSGHNLAKHCLHVVGPNVNKGEDIQLLKSAYENFNQHEVLLAPLLSAGIFGADPIHSLRVCVDTVRTNVYLAVFDKNLYDKLVSSFLEMKSEKQVEQKIAEIPKEEVKPFITESKPSVEQRKQDDKKIKACVEEVTTTLEETKFLTENLLLYIDINGNLHPDSATLVSDIDITFLKKDAPYIVGDVVQEGVLTAVVIPTKKAGGTTEMLAKALRKVPTDNYITTYPGQGLNGYTVEEAKTVLKKCKSAFYILPSIISNEKQEILGTVSWNLREMLAHAEETRKLMPVCVETKAIVSTIQRKYKGIKIQEGVVDYGARFYFYTSKTTVASLINTLNDLNETLVTMPLGYVTHGLNLEEAARYMRSLKVPATVSVSSPDAVTAYNGYLTSSSKTPEEHFIETISLAGSYKDWSYSGQSTQLGIEFLKRGDKSVYYTSNPTTFHLDGEVITFDNLKTLLSLREVRTIKVFTTVDNINLHTQVVDMSMTYGQQFGPTYLDGADVTKIKPHNSHEGKTFYVLPNDDTLRVEAFEYYHTTDPSFLGRYMSALNHTKKWKYPQVNGLTSIKWADNNCYLATALLTLQQIELKFNPPALQDAYYRARAGEAANFCALILAYCNKTVGELGDVRETMSYLFQHANLDSCKRVLNVVCKTCGQQQTTLKGVEAVMYMGTLSYEQFKKGVQIPCTCGKQATKYLVQQESPFVMMSAPPAQYELKHGTFTCASEYTGNYQCGHYKHITSKETLYCIDGALLTKSSEYKGPITDVFYKENSYTTTIKPVTYKLDGVVCTEIDPKLDNYYKKDNSYFTEQPIDLVPNQPYPNASFDNFKFVCDNIKFADDLNQLTGYKKPASRELKVTFFPDLNGDVVAIDYKHYTPSFKKGAKLLHKPIVWHVNNATNKATYKPNTWCIRCLWSTKPVETSNSFDVLKSEDAQGMDNLACEDLKPVSEEVVENPTIQKDVLECNVKTTEVVGDIILKPANNSLKITEEVGHTDLMAAYVDNSSLTIKKPNELSRVLGLKILATHGLAAVNSVPWDTIANYAKPFLNKVVSTTTNIVTRCLNRVCTNYMPYFFTLLLQLCTFTRSTNSRIKASMPTTIAKNTVKSVGKFCLEASFNYLKSPNFSKLINIIIWFLLLSVCLGSLIYSTAALGVLMSNLGMPSYCTGYREGYLNSTNVTIATYCTGSIPCSVCLSGLDSLDTYPSLETIQITISSFKWDLTAFGLVAEWFLAYILFTRFFYVLGLAAIMQLFFSYFAVHFISNSWLMWLIINLVQMAPISAMVRMYIFFASFYYVWKSYVHVVDGCNSSTCMMCYKRNRATRVECTTIVNGVRRSFYVYANGGKGFCKLHNWNCVNCDTFCAGSTFISDEVARDLSLQFKRPINPTDQSSYIVDSVTVKNGSIHLYFDKAGQKTYERHSLSHFVNLDNLRANNTKGSLPINVIVFDGKSKCEESSAKSASVYYSQLMCQPILLLDQALVSDVGDSAEVAVKMFDAYVNTFSSTFNVPMEKLKTLVATAEAELAKNVSLDNVLSTFISAARQGFVDSDVETKDVVECLKLSHQSDIEVTGDSCNNYMLTYNKVENMTPRDLGACIDCSARHINAQVAKSHNIALIWNVKDFMSLSEQLRKQIRSAAKKNNLPFKLTCATTRQVVNVVTTKIALKGG

SEQ ID NO: 16024 - protein, 1946 aa, Artificial Sequence
  SARS-CoV-2__MT806773.1__non-structural protein 3 (NSP3)
MAPTKVTFGDDTVIEVQGYKSVNITFELDERIDKVLNEKCSAYTVELGTEVNEFACVVADAVIKTLQPVSELLTPLGIDLDEWSMATYYLFDESGEFKLASHMYCSFYPPDEDEEEGDCEEEEFEPSTQYEYGTEDDYQGKPLEFGATSAALQPEEEQEEDWLDDDSQQTVGQQDGSEDNQTTTIQTIVEVQPQLEMELTPVVQTIEVNSFSGYLKLTDNVYIKNADIVEEAKKVKPTVVVNAANVYLKHGGGVAGALNKATNNAMQVESDDYIATNGPLKVGGSCVLSGHNLAKHCLHVVGPNVNKGEDIQLLKSAYENFNQHEVLLAPLLSAGIFGADPIHSLRVCVDTVRTNVYLAVFDKNLYDKLVSSFLEMKSEKQVEQKIAEIPKEEVKPFITESKPSVEQRKQDDKKIKACVEEVTTTLEETKFLTENLLLYIDINGNLHPDSATLVSDIDITFLKKDAPYIVGDVVQEGVLTAVVIPTKKAGGTTEMLAKALRKVPTDNYITTYPGQGLNGYTVEEAKTVLKKCKSAFYILPSIISNEKQEILGTVSWNLREMLAHAEETRKLMPVCVETKAIVSTIQRKYKGIKIQEGVVDYGARFYFYTSKTTVASLINTLNDLNETLVTMPLGYVTHGLNLEEAARYMRSLKVPATVSVSSPDAVTAYNGYLTSSSKTPEEHFIETISLAGSYKDWSYSGQSTQLGIEFLKRGDKSVYYTSNPTTFHLDGEVITFDNLKTLLSLREVRTIKVFTTVDNINLHTQVVDMSMTYGQQFGPTYLDGADVTKIKPHNSHEGKTFYVLPNDDTLRVEAFEYYHTTDPSFLGRYMSALNHTKKWKYPQVNGLTSIKWADNNCYLATALLTLQQIELKFNPPALQDAYYRARAGEAANFCALILAYCNKTVGELGDVRETMSYLFQHANLDSCKRVLNVVCKTCGQQQTTLKGVEAVMYMGTLSYEQFKKGVQIPCTCGKQATKYLVQQESPFVMMSAPPAQYELKHGTFTCASEYTGNYQCGHYKHITSKETLYCIDGALLTKSSEYKGPITDVFYKENSYTTTIKPVTYKLDGVVCTEIDPKLDNYYKKDNSYFTEQPIDLVPNQPYPNASFDNFKFVCDNIKFADDLNQLTGYKKPASRELKVTFFPDLNGDVVAIDYKHYTPSFKKGAKLLHKPIVWHVNNATNKATYKPNTWCIRCLWSIKPVETSNSFDVLKSEDAQGMDNLACEDLKPVSEEVVENPTIQKDVLECNVKTTEVVGDIILKPANNSLKITEEVGHTDLMAAYVDNSSLTIKKPNELSRVLGLKTLATHGLAAVNSVPWDTIANYAKPFLNKVVSTTTNIVTRCLNRVCTNYMPYFFTLLLQLCTFTRSTNSRIKASMPTTIAKNTVKSVGKFCLEASFNYLKSPNFSKLINIIIWFLLLSVCLGSLIYSTAALGVLMSNLGMPSYCTGYREGYLNSTNVTIATYCTGSIPCSVCLSGLDSLDTYPSLETIQITISSFKWDLTAFGLVAEWFLAYILFTRFFYVLGLAAIMQLFFSYFAVHFISNSWLMWLIINLVQMAPISAMVRMYIFFASFYYVWKSYVHVVDGCNSSTCMMCYKRNRATRVECTTIVNGVRRSFYVYANGGKGFCKLHNWNCVNCDTFCAGSTFISDEVARDLSLQFKRPINPTDQSSYIVDSVTVKNGSIHLYFDKAGQKTYERHSLSHFVNLDNLRANNTKGSLPINVIVFDGKSKCEESSAKSASVYYSQLMCQPILLLDQALVSDVGDSAEVAVKMFDAYVNTFSSTFNVPMEKLKTLVATAEAELAKNVSLDNVLSTFISAARQGFVDSDVETKDVVECLKLSHQSDIEVTGDSCNNYMLTYNKVENMTPRDLGACIDCSARHINAQVAKSHNIALIWNVKDFMSLSEQLRKQIRSAAKKNNLPFKLTCATTRQVVNVVTTKIALKGG

SEQ ID NO: 16025 - protein, 1946 aa, Artificial Sequence
  SARS-CoV-2__MT806774.1__non-structural protein 3 (NSP3)
MAPTKVTFGDDTVIEVQGYKSVNITFELDERIDKVLNEKCSAYTVELGTEVNEFACVVADAVIKTLQPVSELLTPLGIDLDEWSMATYYLFDESGEFKLASHMYCSFYPPDEDEEEGDCEEEEFEPSTQYEYGTEDDYQGKPLEFGATSAALQPEEEQEEDWLDDDSQQTVGQQDGSEDNQTTTIQTIVEVQPQLEMELTPVVQTIEVNSFSGYLKLTDNVYIKNADIVEEAKKVKPTVVVNAANVYLKHGGGVAGALNKATNNAMQVESDDYIATNGPLKVGGSCVLSGHNLAKHCFHVVGPNVNKGEDIQLLKSAYENFNQHEVLLAPLLSAGIFGADPIHSLRVCVDTVRTNVYLAVFDKNLYDKLVSSFLEMKSEKQVEQKIAEIPKEEVKPFITESKPSVEQRKQDDKKIKACVEEVTTTLEETKFLTENLLLYIDINGNLHPDSATLVSDIDITFLKKDAPYIVGDVVQEGVLTAVVIPTKKAGGTTEMLAKALRKVPTDNYITTYPGQGLNGYTVEEAKTVLKKCKSAFYILPSIISNEKQEILGTVSWNLREMLAHAEETRKLMPVCVETKAIVSTIQRKYKGIKIQEGVVDYGARFYFYTSKTTVASLINTLNDLNETLVTMPLGYVTHGLNLEEAARYMRSLKVPATVSVSSPDAVTAYNGYLTSSSKTPEEHFIETISLAGSYKDWSYSGQSTQLGIEFLKRGDKSVYYTSNPTTFHLDGEVITFDNLKTLLSLREVRTIKVFTTVDNINLHTQVVDMSMTYGQQFGPTYLDGADVTKIKPHNSHEGKTFYVLPNDDTLRVEAFEYYHTTDPSFLGRYMSALNHTKKWKYPQVNGLTSIKWADNNCYLATALLTLQQIELKFNPPALQDAYYRARAGEAANFCALILAYCNKTVGELGDVRETMSYLFQHANLDSCKRVLNVVCKTCGQQQTTLKGVEAVMYMGTLSYEQFKKGVQIPCTCGKQATKYLVQQESPFVMMSAPPAQYELKHGTFTCASEYTGNYQCGHYKHITSKETLYCIDGALLTKSSEYKGPITDVFYKENSYTTTIKPVTYKLDGVVCTEIDPKLDNYYKKDNSYFTEQPIDLVPNQPYPNASFDNFKFVCDNIKFADDLNQLTGYKKPASRELKVTFFPDLNGDVVAIDYKHYTPSFKKGAKLLHKPIVWHVNNATNKATYKPNTWCIRCLWSTKPVETSNSFDVLKSEDAQGMDNLACEDLKPVSEEVVENPTIQKDVLECNVKTTEVVGDIILKPANNSLKITEEVGHTDLMAAYVDNSSLTIKKPNELSRVLGLKTLATHGLAAVNSVPWDTIANYAKPFLNKVVSTTTNIVTRCLNRVCTNYMPYFFTLLLQLCTFTRSTNSRIKASMPTTIAKNTVKSVGKFCLEASFNYLKSPNFSKLINIIIWFLLLSVCLGSLIYSTAALGVLMSNLGMPSYCTGYREGYLNSTNVTIATYCTGSIPCSVCLSGLDSLDTYPSLETIQITISSFKWDLTAFGLVAEWFLAYILFTRFFYVLGLAAIMQLFFSYFAVHFISNSWLMWLIINLVQMAPISAMVRMYIFFASFYYVWKSYVHVVDGCNSSTCMMCYKRNRATRVECTTIVNGVRRSFYVYANGGKGFCKLHNWNCVNCDTFCAGSTFISDEVARDLSLQFKRPINPTDQSSYIVDSVTVKNGSIHLYFDKAGQKTYERHSLSHFVNLDNLRANNTKGSLPINVIVFDGKSKCEESSAKSASVYYSQLMCQPILLLDQALVSDVGDSAEVAVKMFDAYVNTFSSTFNVPMEKLKTLVATAEAELAKNVSLDNVLSTFISAARQGFVDSDVETKDVVECLKLSHQSDIEVTGDSCNNYMLTYNKVENMTPRDLGACIDCSARHINAQVAKSHNIALIWNVKDFMSLSEQLRKQIRSAAKKNNLPFKLTCATTRQVVNVVTTKIALKGG

SEQ ID NO: 16026 - protein, 1946 aa, Artificial Sequence
  SARS-CoV-2__MT806787.1__non-structural protein 3 (NSP3)
MAPTKVTFGDDTVIEVQGYKSVNITFELDERIDKVLNEKCSAYTVELGTEVNEFACVVADAVIKTLQPVSELLTPLGIDLDEWSMATYYLFDESGEFKLASHMYCSFYPPDEDEEEGDCEEEEFEPSTQYEYGTEDDYQGKPLEFGATSAALQPEEEQEEDWLDDDSQQTVGQQDGSEDNQTTTIQTIVEVQPQLEMELTPVVQTIEVNSFSGYLKLTDNVYIKNADIVEEAKKVKPTVVVNAANVYLKHGGGVAGALNKATNNAMQVESDDYIATNGPLKVGGSCVLSGHNLAKHCLHVVGPNVNKGEDIQLLKSAYENFNQHEVLLAPLLSAGIFGADPIHSLRVCVDTVRTNVYLAVFDKNLYDKLVSSFLEMKSEKQVEQKIAEIPKEEVKPFITESKPSVEQRKQDDKKIKACVEEVTTTLEETKFLTENLLLYIDINGNLHPDSATLVSDIDITFLKKDAPYIVGDVVQEGVLTAVVIPTKKAGGTTEMLAKALRKVPTDNYITTYPGQGLNGYTVEEAKTVLKKCKSAFYILPSIISNEKQEILGTVSWNLREMLAHAEETRKLMPVCVETKAIVSTIQRKYKGIKIQEGVVDYGARFYFYTSKTTVASLINTLNDLNETLVTMPLGYVTHGLNLEEAARYMRSLKVPATVSVSSPDAVTAYNGYLTSSSKTPEEHFIETISLAGSYKDWSYSGQSTQLGIEFLKRGDKSVYYTSNPTTFHLDGEVITFDNLKTLLSLREVRTIKVFTTVDNINLHTQVVDMSMTYGQQFGPTYLDGADVTKIKPHNSHEGKTFYVLPNDDTLRVEAFEYYHTTDPSFLGRYMSALNHTKKWKYPQVNGLTSIKWADNNCYLATALLTLQQIELKFNPPALQDAYYRARAGEAANFCALILAYCNKTVGELGDVRETMSYLFQHANLDSCKRVLNVVCKTCGQQQTTLKGVEAVMYMGTLSYEQFKKGVQIPCTCGKQATKYLVQQESPFVMMSAPPAQYELKHGTFTCASEYTGNYQCGHYKHITSKETLYCIDGALLTKSSEYKGPITDVFYKENSYTTTIKPVTYKLDGVVCTEIDPKLDNYYKKDNSYFTEQPIDLVPNQPYPNASFDNFKFVCDNIKFADDLNQLTGYKKPASRELKVTFFPDLNGDVVAIDYKHYTPSFKKGAKLLHKPIVWHVNNATNKATYKPNTWCIRCLWSTKPVETSNSFDVLKSEDAQGMDNLACEDLKPVSEEVVENPTIQKDVLECNVKTTEVVGDIILKPANNSLKITEEVGHTDLMAAYVDNSSLTIKKPNELSRVLGLKTLATHGLAAVNSVPWDTIANYAKPFLNKVVSTTTNIVTRCLNRVCTNYMPYFFTLLLQLCTFTRSTNSRIKASMPTTIAKNTVKSVGKFCLEASFNYLKSPNFSKLINIIIWFLLLSVCLGSLIYSTAALGVLMSNLGMPSYCTGYREGYLNSTNVTIATYCTGSIPCSVCLSGLDSLDTYPSLETIQITISSFKWDLTAFGLVAEWFLAYILFTRFFYVLGLAAIMQLFFSYFAVHFISNSWLMWLIINLVQMAPISAMVRMYIFFASFYYVWKSYVHVVDGCNSSTCMMCYKRNRATRVECTTIVNGVRRSFYVYANGGKGFCKLHNWNCVNCDTFCAGSTFISDEVARDLSLQFKRPINPTDQSSYIVDSVTVKNGSIHLYFDKAGQKTYERHSLSHFVNLDNLRANNTKGSLPINVIVLDGKSKCEESSAKSASVYYSQLMCQPILLLDQALVSDVGDSAEVAVKMFDAYVNTFSSTFNVPMEKLKTLVATAEAELAKNVSLDNVLSTFISAARQGFVDSDVETKDVVECLKLSHQSDIEVTGDSCNNYMLTYNKVENMTPRDLGACIDCSARHINAQVAKSHNIALIWNVKDFMSLSEQLRKQIRSAAKKNNLPFKLTCATTRQVVNVVTTKIALKGG

SEQ ID NO: 16027 - protein, 1946 aa, Artificial Sequence
  SARS-CoV-2__MT806789.1__non-structural protein 3 (NSP3)
MAPTKVTFGDDTVIEVQGYKSVNITFELDERIDKVLNEKCSAYTVELGTEVNEFACVVADAVIKTLQPVSELLTPLGIDLDEWSMATYYLFDESGEFKLASHMYCSFYPPDEDEEEGDCEEEEFEPSTQYEYGTEDDYQGKPLEFGATSAALQPEEEQEEDWLDDDSQQTVGQQDGSEDNQTTTIQTIVEVQPQLEMELTPVVQTIEVNSFSGYLKLTDNVYIKNADIVEEAKKVKPTVVVNAANVYLKHGGGVAGALNKATNNAMQVESDDYIATNGPLKVGGSCVLSGHNLAKHCLHVVGPNVNKGEDIQLLKSAYENFNQHEVLLAPLLSAGIFGADPIHSLRVCVDTVRTNVYLAVFDKNLYDKLVSSFLEMKSEKQVEQKIAEIPKEEVKPFITESKPSVEQRKQDDKKIKACVEEVTTTLEETKFLTENLLLYIDINGNLHPDSATLVSDIDITFLKKDAPYIVGDVVQEGVLTAVVIPTKKAGGTTEMLAKALRKVPTDNYITTYPGQGLNGYTVEEAKTVLKKCKSAFYILPSIISNEKQEILGTVSWNLREMLAHAEETRKLMPVCVETKAIVSTIQRKYKGIKIQEGVVDYGARFYFYTSKTTVASLINTLNDLNETLVTMPLGYVTHGLNLEEAARYMRSLKVPATVSVSSPDAVTAYNGYLTSSSKTPEEHFIETISLAGSYKDWSYSGQSTQLGIEFLKRGDKSVYYTSNPTTFHLDGEVITFDNLKTLLSLREVRTIKVFTTVDNINLHTHVVDMSMTYGQQFGPTYLDGADVTKIKPHNSHEGKTFYVLPNDDTLRVEAFEYYHTTDPSFLGRYMSALNHTKKWKYPQVNGLTSIKWADNNCYLATALLTLQQIELKFNPPALQDAYYRARAGEAANFCALILAYCNKTVGELGDVRETMSYLFQHANLDSCKRVLNVVCKTCGQQQTTLKGVEAVMYMGTLSYEQFKKGVQIPCTCGKQATKYLVQQESPFVMMSAPPAQYELKHGTFTCASEYTGNYQCGHYKHITSKETLYCIDGALLTKSSEYKGPITDVFYKENSYTTTIKPVTYKLDGVVCTEIDPKLDNYYKKDNSYFTEQPIDLVPNQPYPNASFDNFKFVCDNIKFADDLNQLTGYKKPASRELKVTFFPDLNGDVVAIDYKHYTPSFKKGAKLLHKPIVWHVNNATNKATYKPNTWCIRCLWSTKPVETSNSFDVLKSEDAQGMDNLACEDLKPVSEEVVENPTIQKDVLECNVKTTEVVGDIILKPANNSLKITEEVGHTDLMAAYVDNSSLTIKKPNELSRVLGLKTLATHGLAAVNSVPWDTIANYAKPFLNKVVSTTTNIVTRCLNRVCTNYMPYFFTLLLQLCTFTRSTNSRIKASMPTTIAKNTVKSVGKFCLEASFNYLKSPNFSKLINIIIWFLLLSVCLGSLIYSTAALGVLMSNLGMPSYCTGYREGYLNSTNVTIATYCTGSIPCSVCLSGLDSLDTYPSLETIQITISSFKWDLTAFGLVAEWFLAYILFTRFFYVLGLAAIMQLFFSYFAVHFISNSWLMWLIINLVQMAPISAMVRMYIFFASFYYVWKSYVHVVDGCNSSTCMMCYKRNRATRVECTTIVNGVRRSFYVYANGGKGFCKLHNWNCVNCDTFCAGSTFISDEVARDLSLQFKRPINPTDQSSYIVDSVTVKNGSIHLYFDKAGQKTYERHSLSHFVNLDNLRANNTKGSLPINVIVFDGKSKCEESSAKSASVYYSQLMCQPILLLDQALVSDVGDSAEVAVKMFDAYVNTFSSTFNVPMEKLKTLVATAEAELAKNVSLDNVLSTFISAARQGFVDSDVETKDVVECLKLSHQSDIEVTGDSCNNYMLTYNKVENMTPRDLGACIDCSARHINAQVAKSHNIALIWNVKDFMSLSEQLRKQIRSAAKKNNLPFKLTCATTRQVVNVVTTKIALKGG

SEQ ID NO: 16028 - protein, 1946 aa, Artificial Sequence
  SARS-CoV-2__MT806792.1__non-structural protein 3 (NSP3)
MAPTKVTFGDDTVIEVQGYKSVNITFELDERIDKVLNEKCSAYTVELGTEVNEFACVVADAVIKTLQPVSELLTPLGIDLDEWSMATYYLFDESGEFKLASHMYCSFYPPDEDEEEGDCEEEEFEPSTQYEYGTEDDYQGKPLEFGATSAALQPEEEQEEDWLDDDSQQTVGQQDGSEDNQTTTIQTIVEVQPQLEMELTPVVQTIEVNSFSGYLKLTDNVYIKNADIVEEAKKVKPTVVVNAANVYLKHGGGVAGALNKATNNAMQVESDDYIATNGPLKVGGSCVLSGHNLAKHCLHVVGPNVNKGEDIQLLKSAYENFNQHEVLLAPLLSAGIFGADPIHSLRVCVDTVRTNVYLAVFDKNLYDKLVSSFLEMKSEKQVEQKIAEIPKEEVKPFITESKPSVEQRKQDDKKIKACVEEVTTTLEETKFLTENLLLYIDINGNLHPDSATLVSDIDITFLKKDAPYIVGDVVQEGVLTAVVIPTKKAGGTTEMLAKALRKVPTDNYITTYPGQGLNGYTVEEAKTVLKKCKSAFYILPSIISNEKQEILGTVSWNLREMLAHAEETRKLMPVCVETKAIVSTIQRKYKGIKIQEGVVDYGARFYFYTSKTTVASLINTLNDLNETLVTMPLGYVTHGLNLEEAARYMRSLKVPATVSVSSPDAVTAYNGYLTSSSKTPEEHFIETISLAGSYKDWSYSGQSTQLGIEFLKRGDKSVYYTSNPTTFHLDGEVITFDNLKTLLSLREVRTIKVFTTVDNINLHTQVVDMSMTYGQQFGPTYLDGADVTKIKPHNSHEGKTFYVLPNDDTLRVEAFEYYHTTDPSFLGRYMSALNHTKKWKYPQVNGLTSIKWADNNCYLATALLTLQQIELKFNPPALQDAYYRARAGEAANFCALILAYCNKTVGELGDVRETMSYLFQHANLDSCKRVLNVVCKTCGQQQTTLKGVEAVMYMGTLSYEQFKKGVQIPCTCGKQATKYLVQQESPFVMMSAPPAQYELKHGTFTCASEYTGNYQCGHYKHITSKETLYCIDGALLTKSSEYKGPITDVFYKENSYTTTIKPVTYKLDGVVCTEIDPKLDNYYKKDNSYFTEQPIDLVPNQPYPNASFDNFKFVCDNIKFADDLNQLTGYKKPASRELKVTFFPDLNGDVVAIDYKHYTPSFKKGAKLLHKPIVWHVNNAINKATYKPNTWCIRCLWSTKPVETSNSFDVLKSEDAQGMDNLACEDLKPVSEEVVENPTIQKDVLECNVKTTEVVGDIILKPANNSLKITEEVGHTDLMAAYVDNSSLTIKKPNELSRVLGLKTLATHGLAAVNSVPWDTIANYAKPFLNKVVSTTTNIVTRCLNRVCTNYMPYFFTLLLQLCTFTRSTNSRIKASMPTTIAKNTVKSVGKFCLEASFNYLKSPNFSKLINIIIWFLLLSVCLGSLIYSTAALGVLMSNLGMPSYCTGYREGYLNSTNVTIATYCTGSIPCSVCLSGLDSLDTYPSLETIQITISSFKWDLTAFGLVAEWFLAYILFTRFFYVLGLAAIMQLFFSYFAVHFISNSWLMWLIINLVQMAPISAMVRMYIFFASFYYVWKSYVHVVDGCNSSTCMMCYKRNRATRVECTTIVNGVRRSFYVYANGGKGFCKLHNWNCVNCDTFCAGSTFISDEVARDLSLQFKRPINPTDQSSYIVDSVTVKNGSIHLYFDKAGQKTYERHSLSHFVNLDNLRANNTKGSLPINVIVFDGKSKCEESSAKSASVYYSQLMCQPILLLDQALVSDVGDSAEVAVKMFDAYVNTFSSTFNVPMEKLKTLVATAEAELAKNVSLDNVLSTFISAARQGFVDSDVETKDVVECLKLSHQSDIEVTGDSCNNYMLTYNKVENMTPRDLGACIDCSARHINAQVAKSHNIALIWNVKDFMSLSEQLRKQIRSAAKKNNLPFKLTCATTRQVVNVVTTKIALKGG

SEQ ID NO: 16029 - protein, 1946 aa, Artificial Sequence
  SARS-CoV-2__MT806798.1__non-structural protein 3 (NSP3)
MAPTKVTFGDDTVIEVQGYKSVNITFELDERIDKVLNEKCSAYTVELGTEVNEFACVVADAVIKTLQPVSELLTPLGIDLDEWSMATYYLFDESGEFKLASHMYCSFYPPDEDEEEGDCEEEEFEPSTQYEYGTEDDYQGKPLEFGATSAALQPEEEQEEDWLDDDSQQTVGQQDGSEDNQTTTIQTIVEVQPQLEMELTPVVQTIEVNSFSGYLKLTDNVYIKNADIVEEAKKVKPTVVVNAANVYLKHGGGVAGALNKATNNAMQVESDDYIATNGPLKVGGSCVLSGHNLAKHCLHVVGPNVNKGEDIQLLKSAYENFNQHEVLLAPLLSAGIFGADPIHSLRVCVDTVRTNVYLAVFDKNLYDKLVSSFLEMKSEKQVEQKIAEIPKEEVKPFITESKPSVEQRKQDDKKIKACVEEVTTTLEETKFLTENLLLYIDINGNLHPDSATLVSDIDITFLKKDAPYIEGDVVQEGVLTAVVIPTKKAGGTTEMLAKALRKVPTDNYITTYPGQGLNGYTVEEAKTVLKKCKSAFYILPSIISNEKQEILGTVSWNLREMLAHAEETRKLMPVCVETKAIVSTIQRKYKGIKIQEGVVDYGARFYFYTSKTTVASLINTLNDLNETLVTMPLGYVTHGLNLEEAARYMRSLKVPATVSVSSPDAVTAYNGYLTSSSKTPEEHFIETISLAGSYKDWSYSGQSTQLGIEFLKRGDKSVYYTSNPTTFHLDGEVITFDNLKTLLSLREVRTIKVFTTVDNINLHTQVVDMSMTYGQQFGPTYLDGADVTKIKPHNSHEGKTFYVLPNDDTLRVEAFEYYHTTDPSFLGRYMSALNHTKKWKYPQVNGLTSIKWADNNCYLATALLTLQQIELKFNPPALQDAYYRARAGEAANFCALILAYCNKTVGELGDVRETMSYLFQHANLDSCKRVLNVVCKTCGQQQTTLKGVEAVMYMGTLSYEQFKKGVQIPCTCGKQATKYLVQQESPFVMMSAPPAQYELKHGTFTCASEYTGNYQCGHYKHITSKETLYCIDGALLTKSSEYKGPITDVFYKENSYTTTIKPVTYKLDGVVCTEIDPKLDNYYKKDNSYFTEQPIDLVPNQPYPNASFDNFKFVCDNIKFADDLNQLTGYKKPASRELKVTFFPDLNGDVVAIDYKHYTPSFKKGAKLLHKPIVWHVNNATNKATYKPNTWCIRCLWSTKPVETSNSFDVLKSEDAQGMDNLACEDLKPVSEEVVENPTIQKDVLECNVKTTEVVGDIILKPANNSLKITEEVGHTDLMAAYVDNSSLTIKKPNELSRVLGLKTLATHGLAAVNSVPWDTIANYAKPFLNKVVSTTTNIVTRCLNRVCTNYMPYFFTLLLQLCTFTRSTNSRIKASMPTTIAKNTVKSVGKFCLEASFNYLKSPNFSKLINIIIWFLLLSVCLGSLIYSTAALGVLMSNLGMPSYCTGYREGYLNSTNVTIATYCTGSIPCSVCLSGLDSLDTYPSLETIQITISSFKWDLTAFGLVAEWFLAYILFTRFFYVLGLAAIMQLFFSYFAVHFISNSWLMWLIINLVQMAPISAMVRMYIFFASFYYVWKSYVHVVDGCNSSTCMMCYKRNRATRVECTTIVNGVRRSFYVYANGGKGFCKLHNWNCVNCDTFCAGSTFISDEVARDLSLQFKRPINPTDQSSYIVDSVTVKNGSIHLYFDKAGQKTYERHSLSHFVNLDNLRANNTKGSLPINVIVFDGKSKCEESSAKSASVYYSQLMCQPILLLDQALVSDVGDSAEVAVKMFDAYVNTFSSTFNVPMEKLKTLVATAEAELAKNVSLDNVLSTFISAARQGFVDSDVETKDVVECLKLSHQSDIEVTGDSCNNYMLTYNKVENMTPRDLGACIDCSARHINAQVAKSHNIALIWNVKDFMSLSEQLRKQIRSAAKKNNLPFKLTCATTRQVVNVVTTKIALKGG

SEQ ID NO: 16030 - protein, 1946 aa, Artificial Sequence
  SARS-CoV-2__MT799969.1__non-structural protein 3 (NSP3)
MAPTKVTFGDDTVIEVQGYKSVNITFELDERIDKVLNEKCSAYTVELGTEVNEFACVVADAVIKTLQPVSELLTPLGIDLDEWSMATYYLFDESGEFKLASHMYCSFYPPDEDEEEGDCEEEEFEPSTQYEYGTEDDYQGKPLEFGATSAALQPEEEQEEDWLDDDSQQTVGQQDGSEDNQTTTIQTIVEVQPQLEMELTPVVQTIEVNSFSGYLKLTDNVYIKNADIVEEAKKVKPTVVVNAANVYLKHGGGVAGALNKATNNAMQVESDDYIATNGPLKVGGSCVLSGHNLAKHCLHVVGPNVNKGEDIQLLKSAYENFNQHEVLLAPLLSAGIFGADSIHSLRVCVDTVRTNVYLAVFDKNLYDKLVSSFLEMKSEKQVEQKIAEIPKEEFKPFITESKPSVEQRKQDDKKIKACVEEVTTTLEETKFLTENLLLYIDINGNLHPDSATLVSDIDITFLKKDAPYIVGDVVQEGVLTAVVIPTKKAGGTTEMLAKALRKVPTDNYITTYPGQGLNGYTVEEAKTVLKKCKSAFYILPSIISNEKQEILGTVSWNLREMLAHAEETRKLMPVCVETKAIVSTIQRKYKGIKIQEGVVDYGARFYFYTSKTTVASLINTLNDLNETLVTMPLGYVTHGLNLEEAARYMRSLKVPATVSVSSPDAVTAYNGYLTSSSKTPEEHFIETISLAGSYKDWSYSGQSTQLGIEFLKRGDKIVYYTSNPTTFHLDGEVITFDNLKTLLSLREVRTIKVFTTVDNINLHTQVVDMSMTYGQQFGPTYLDGADVTKIKPHNSHEGKTFYVLPNDYTLRVEAFEYYHTTDPSFLGRYMSALNHTKKWKYPQVNGLTSIKWADNNCYLATALLTLQQIELKFNPPALQDAYYRARAGEAANFCALILAYCNKTVGELGDVRETMSYLFQHANLDSCKRVLNVVCKTCGQQQTTLKGVEAVMYMGTLSYEQFKKGVQIPCTCGKQATKYLVQQESPFVMMSAPPAQYELKHGTFTCASEYTGNYQCGHYKHITSKETLYCIDGALLTKSSEYKGPITDVFYKENSYTTTIKPVTYKLDGVVCTEIDPKLDNYYKKDNSYFTEQPIDLVPNQPYPNASFDNFKFVCDNIKFADDLNQLTGYKKPASRELKVTFFPDLNGDVVAIDYKHYTPSFKKGAKLLHKPIVWHVNNATNKATYKPNTWCIRCLWSTKPVETSNSFDVLKSEDAQGMDNLACEDLKPVSEEVVENPTIQKDVLECNVKTTEVVGDIILKPANNSLKITEEVGHTDLMAAYVDNSSLTIKKPNELSRVLGLKTLATHGLAAVNSVPWDTIANYAKPFLNKVVSTTTNIVTRCLNRVCTNYMPYFFTLLLQLCTFTRSTNSRIKASMPTTIAKNTVKSVGKFCLEASFNYLKSPNFSKLINIIIWFLLLSVCLGSLIYSTAALGVLMSNLGMPSYCTGYREGYLNSTNVTIATYCTGSIPCSVCLSGLDSLDTYPSLETIQITISSFKWDLTAFGLVAEWFLAYILFTRFFYVLGLAAIMQLFFSYFAVHFISNSWLMWLIINLVQMAPISAMVRMYIFFASFYYVWKSYVHVVDGCNSSTCMMCYKRNRATRVECTTIVNGVRRSFYVYANGGKGFCKLHNWNCVNCDTFCAGSTFISDEVARDLSLQFKRPINPTDQSSYIVDSVTVKNGSIHLYFDKAGQKTYERHSLSHFVNLDNLRANNTKGSLPINVIVFDGKSKCEESSAKSASVYYSQLMCQPILLLDQALVSDVGDSAEVAVKMFDAYVNTFSSTFNVPMEKLKTLVATAEAELAKNVSLDNVLSTFISAARQGFVDSDVETKDVVECLKLSHQSDIEVTGDSCNNYMLTYNKVENMTPRDLGACIDCSARHINAQVAKSHNIALIWNVKDFMSLSEQLRKQIRSAAKKNNLPFKLTCATTRQVVNVVTTKIALKGG

SEQ ID NO: 16031 - protein, 1946 aa, Artificial Sequence
  SARS-CoV-2__MT799998.1__non-structural protein 3 (NSP3)
MAPTKVTFGDDTVIEVQGYKSVNITFELDERIDKVLNEKCSAYTVELGTEVNEFACVVADAVIKTLQPVSELLTPLGIDLDEWSMATYYLFDESGEFKLASHMYCSFYPPDEDEEEGDCEEEEFEPSTQYEYGTEDDYQGKPLEFGATSAALQPEEEQEEDWLDDDSQQTVGQQDGSEDNQTTTIQTIVEVQPQLEMELTPVVQTIEVNSFSGYLKLTDNVYIKNADIVEEAKKVKPTVVVNAANVYLKHGGGVAGALNKATNNAMQVESDDYIATNGPLKVGGSCVLSGHNLAKHCLHVVGPNVNKGEDIQLLKSAYENFNQHEVLLAPLLSAGIFGADPIHSLRVCVDTVRTNVYLAVFDKNLYDKLVSSFLEMKSEKQVEQKIAEIPKEEVKPFITESKPSVEQRKQDDKKIKACVEEVTTTLEETKFLTENLLLYIDINGNLHPDSATLVSDIDITFLKKDAPYIVGDVVQEGVLTAVVIPTKKAGGTTEMLAKALRKVPTDNYITTYPGQGLNGYTVEEAKTVLKKCKSAFYILPSIISNEKQEILGTVSWNLREMLAHAEETRKLMPVCVETKAIVSTIQRKYKGIKIQEGVVDYGARFYFYTSKTTVASLINTLNDLNETLVTMPLGYVTHGLNLEEAARYMRSLKVPATVSVSSPDAVTAYNGYLTSSSKTPEEHFIETISLAGSYKDWSYSGQSTQLGIEFLKRGDKSVYYTSNPTTFHLDGEVITFDNLKTLLSLREVRTIKVFTTVDNINLHTQVVDMSMTYGQQFGPTYLDGADVTKIKPHNSHEGKTFYVLPNDDTLRVEAFEYYHTTDPSFLGRYMSALNHTKKWKYPQVNGLTSIKWADNNCYLATALLTLQQIELKFNPPALQDAYYRARAGEAANFCALILAYCNKTVGELGDVRETMSYLFQHANLDSCKRVLNVVCKTCGQQQTTLKGVEAVMYMGTLSYEQFKKGVQIPCTCGKQATKYLVQQESPFVMMSAPPDQYELKHGTFTCASEYTGNYQCGHYKHITSKETLYCIDGALLTKSSEYKGPITDVFYKENSYTTTIKPVTYKLDGVVCTEIDPKLDNYYKKDNSYFTEQPIDLVPNQPYPNASFDNFKFVCDNIKFADDLNQLTGYKKPASRELKVTFFPDLNGDVVAIDYKHYTPSFKKGAKLLHKPIVWHVNNATNKATYKPNTWCIRCLWSTKPVETSNSFDVLKSEDAQGMDNLACEDLKPVSEEVVENPTIQKDVLECNVKTTEVVGDIILKPANNSLKITEEVGHTDLMAAYVDNSSLTIKKPNELSRVLGLKTLATHGLAAVNSVPWDTIANYAKPFLNKVVSTTTNIVTRCLNRVCTNYMPYFFTLLLQLCTFTRSTNSRIKASMPTTIAKNTVKSVGKFCLEASFNYLKSPNFSKLINIIIWFLLLSVCLGSLIYSTAALGVLMSNLGMPSYCTGYREGYLNSTNVTIATYCTGSIPCSVCLSGLDSLDTYPSLETIQITISSFKWDLTAFGLVAEWFLAYILFTRFFYVLGLAAIMQLFFSYFAVHFISNSWLMWLIINLVQMAPISAMVRMYIFFASFYYVWKSYVHVVDGCNSSTCMMCYKRNRATRVECTTIVNGVRRSFYVYANGGKGFCKLHNWNCVNCDTFCAGSTFISDEVARDLSLQFKRPINPTDQSSYIVDSVTVKNGSIHLYFDKAGQKTYERHSLSHFVNLDNLRANNTKGSLPINVIVFDGKSKCEESSAKSASVYYSQLMCQPILLLDQALVSDVGDSAEVAVKMFDAYVNTFSSTFNVPMEKLKTLVATAEAELAKNVSLDNVLSTFISAARQGFVDSDVETKDVVECLKLSHQSDIEVTGDSCNNYMLTYNKVENMTPRDLGACIDCSARHINAQVAKSHNIALIWNVKDFMSLSEQLRKQIRSAAKKNNLPFKLTCATTRQVVNVVTTKIALKGG

SEQ ID NO: 16032 - protein, 1946 aa, Artificial Sequence
  SARS-CoV-2__MT800024.1__non-structural protein 3 (NSP3)
MAPTKVTFGDDTVIEVQGYKSVNITFELDERIDKVLNEKCSAYTVELGTEVNEFACVVADAVIKTLQPVSELLTPLGIDLDEWSMATYYLFDESGEFKLASHMYCSFYPPDEDEEEGDCEEEEFEPSTQYEYGTEDDYQGKPLEFGATSAALQPEEEQEEDWLDDDSQQTVGQQDGSEDNQTTTIQTIVEVQPQLEMELTPVVQTIEVNSFSGYLKLTDNVYIKNADIVEEAKKVKPTVVVNAANVYLKHGGGVAGALNKATNNAMQVESDDYIATNGPLKVGGSCVLSGHNLAKHCLHVVGPNVNKGEDIQLLKSAYENFNQHEVLLAPLLSAGIFGADPIHSLRVCVDTVRTNVYLAVFDKNLYDKLVSSFLEMKSEKQVEQKIAEIPKEEVKPFITESKPSVEQRKQDDKKIKACVEEVTTTLEETKFLTKNLLLYIDINGNLHPDSATLVSDIDITFLKKDAPYIVGDVVQEGVLTAVVIPTKKAGGTTEMLAKALRKVPTDNYITTYPGQGLNGYTVEEAKTVLKKCKSAFYILPSIISNEKQEILGTVSWNLREMLAHAEETRKLMPVCVETKAIVSTIQRKYKGIKIQEGVVDYGARFYFYTSKTTVASLINTLNDLNETLVTMPLGYVTHGLNLEEAARYMRSLKVPATVSVSSPDAVTAYNGYLTSSSKTPEEHFIETISLAGSYKDWSYSGQSTQLGIEFLKRGDKSVYYTSNPTTFHLDGEVITFDNLKTLLSLREVRTIKVFTTVDNINLHTQVVDMSMTYGQQFGPTYLDGADVTKIKPHNSHEGKTFYVLPNDDTLRVEAFEYYHTTDPSFLGRYMSALNHTKKWKYPQVNGLTSIKWADNNCYLATALLTLQQIELKFNPPALQDAYYRARAGEAANFCALILAYCNKTVGELGDVRETMSYLFQHANLDSCKRVLNVVCKTCGQQQTTLKGVEAVMYMGTLSYEQFKKGVQIPCTCGKQATKYLVQQESPFVMMSAPPAQYELKHGTFTCASEYTGNYQCGHYKHITSKETLYCIDGALLTKSSEYKGPITDVFYKENSYTTTIKPVTYKLDGVVCTEIDPKLDNYYKKDNSYFTEQPIDLVPNQPYPNASFDNFKFVCDNIKFADDLNQLTGYKKPASRELKVTFFPDLNGDVVAIDYKHYTPSFKKGAKLLHKPIVWHVNNATNKATYKPNTWCIRCLWSTKPVETSNSFDVLKSEDAQGMDNLACEDLKPVSEEVVENPTIQKDVLECNVKTTEVVGDIILKPANNSLKITEEVGHTDLMAAYVDNSSLTIKKPNELSRVLGLKTLATHGLAAVNSVPWDTIANYAKPFLNKVVSTTTNIVTRCLNRVCTNYMPYFFTLLLQLCTFTRSTNSRIKASMPTTIAKNTVKSVGKFCLEASFNYLKSPNFSKLINIIIWFLLLSVCLGSLIYSTAALGVLMSNLGMPSYCTGYREGYLNSTNVTIATYCTGSIPCSVCLSGLDSLDTYPSLETIQITISSFKWDLTAFGLVAEWFLAYILFTRFFYVLGLAAIMQLFFSYFAVHFISNSWLMWLIINLVQMAPISAMVRMYIFFASFYYVWKSYVHVVDGCNSSTCMMCYKRNRATRVECTTIVNGVRRSFYVYANGGKGFCKLHNWNCVNCDTFCAGSTFISDEVARDLSLQFKRPINPTDQSSYIVDSVTVKNGSIHLYFDKAGQKTYERHSLSHFVNLDNLRANNTKGSLPINVIVFDGKSKCEESSAKSASVYYSQLMCQPILLLDQALVSDVGDSAEVAVKMFDAYVNTFSSTFNVPMEKLKTLVATAEAELAKNVSLDNVLSTFISAARQGFVDSDVETKDVVECLKLSHQSDIEVTGDSCNNYMLTYNKVENMTPRDLGACIDCSARHINAQVAKSHNIALIWNVKDFMSLSEQLRKQIRSAAKKNNLPFKLTCATTRQVVNVVTTKIALKGG

SEQ ID NO: 16033 - protein, 1946 aa, Artificial Sequence
  SARS-CoV-2__MT800030.1__non-structural protein 3 (NSP3)
MAPTKVTFGDDTVIEVQGYKSVNITFELDERIDKVLNEKCSAYTVELGTEVNEFACVVADAVIKTLQPVSELLTPLGIDLDEWSMATYYLFDESGEFKLASHMYCSFYPPDEDEEEGDCEEEEFEPSTQYEYGTEDDYQGKPLEFGATSAALQPEEEQEEDWLDDDSQQTVGQQDGSEDNQTTTIQTIVEVQPQLEMELTPVVQTIEVNSFSGYLKLTDNVYIKNADIVEEAKKVKPTVVVNAANVYLKHGGGVAGALNKATNNAMQVESDDYIATNGPLKVGGSCVLSGHNLAKHCLHVVGPNVNKGEDIQLLKSAYENFNQHEVLLAPLLSAGIFGADPIYSLRVCVDTVRTNVYLAVFDKNLYDKLVSSFLEMKSEKQVEQKIAEIPKEEVKPFITESKPSVEQRKQDDKKIKACVEEVTTTLEETKFLTENLLLYIDINGNLHPDSATLVSDIDITFLKKDAPYIVGDVVQEGVLTAVVIPTKKAGGTTEMLAKALRKVPTDNYITTYPGQGLNGYTVEEAKTVLKKCKSAFYILPSIISNEKQEILGTVSWNLREMLAHAEETRKLMPVCVETKAIVSTIQRKYKGIKIQEGVVDYGARFYFYTSKTTVASLINTLNDLNETLVTMPLGYVTHGLNLEEAARYMRSLKVPATVSVSSPDAVTAYNGYLTSSSKTPEEHFIETISLAGSYKDWSYSGQSTQLGIEFLKRGDKSVYYTSNPTTFHLDGEVITFDNLKTLLSLREVRTIKVFTTVDNINLHTQVVDMSMTYGQQFGPTYLDGADVTKIKPHNSHEGKTFYVLPNDDTLRVEAFEYYHTTDPSFLGRYMSALNHTKKWKYPQVNGLTSIKWADNNCYLATALLTLQQIELKFNPPALQDAYYRARAGEAANFCALILAYCNKTVGELGDVRETMSYLFQHANLDSCKRVLNVVCKTCGQQQTTLKGVEAVMYMGTLSYEQFKKGVQIPCTCGKQATKYLVQQESPFVMMSAPPAQYELKHGTFTCASEYTGNYQCGHYKHITSKETLYCIDGALFTKSSEYKGPITDVFYKENSYTTTIKPVTYKLDGVVCTEIDPKLDNYYKKDNSYFTEQPIDLVPNQPYPNASFDNFKFVCDNIKFADDLNQLTGYKKPASRELKVTFFPDLNGDVVAIDYKHYTPSFKKGAKLLHKPIVWHVNNATNKATYKPNTWCIRCLWSTKPVETSNSFDVLKSEDAQGMDNLACEDLKPVSEEVVENPTIQKDVLECNVKTTEVVGDIILKPANNSLKITEEVGHTDLMAAYVDNSSLTIKKPNELSRVLGLKTLATHGLAAVNSVPWDTIANYAKPFLNKVVSTTTNIVTRCLNRVCTNYMPYFFTLLLQLCTFTRSTNSRIKASMPTTIAKNTVKSVGKFCLEASFNYLKSPNFSKLINIIIWFLLLSVCLGSLIYSTAALGVLMSNLGMPSYCTGYREGYLNSTNVTIATYCTGSIPCSVCLSGLDSLDTYPSLETIQITISSFKWDLTAFGLVAEWFLAYILFTRFFYVLGLAAIMQLFFSYFAVHFISNSWLMWLIINLVQMAPISAMVRMYIFFASFYYVWKSYVHVVDGCNSSTCMMCYKRNRATRVECTTIVNGVRRSFYVYANGGKGFCKLHNWNCVNCDTFCAGSTFISDEVARDLSLQFKRPINPTDQSSYIVDSVTVKNGSIHLYFDKAGQKTYERHSLSHFVNLDNLRANNTKGSLPINVIVFDGKSKCEESSAKSASVYYSQLMCQPILLLDQALVSDVGDSAEVAVKMFDAYVNTFSSTFNVPMEKLKTLVATAEAELAKNVSLDNVLSTFISAARQGFVDSDVETKDVVECLKLSHQSDIEVTGDSCNNYMLTYNKVENMTPRDLGACIDCSARHINAQVAKSHNIALIWNVKDFMSLSEQLRKQIRSAAKKNNLPFKLTCATTRQVVNVVTTKIALKGG

SEQ ID NO: 16034 - protein, 1946 aa, Artificial Sequence
  SARS-CoV-2__MT800047.1__non-structural protein 3 (NSP3)
MAPTKVTFGDDTVIEVQGYKSVNITFELDERIDKVLNEKCSAYTVELGTEVNEFACVVADAVIKTLQPVSELLTPLGIDLDEWSMATYYLFDESGEFKLASHMYCSFYPPDEDEEEGDCEEEEFEPSTQYEYGTEDDYQGKPLEFGATSAALQPEEEQEEDWLDDDSQQTVGQQDGSEDNQTTTIQTIVEVQPQLEMELTPVVQTIEVNSFSGYLKLTDNVYIKNADIVEEAKKVKPTVVVNAANVYLKHGGGVAGALNKATNNAMQVESDDYIATNGPLKVGGSCVLSGHNLAKHCLHVVGPNVNKGEDIQLLKSAYENFNQHEVLLAPLLSAGIFGADPIHSLRVCVDTVRTNVYLAVFDKNLYDKLVSSFLEMKSEKQVEQKIAEIPKEEVKPFITESKPSVEQRKQDDKKIKACVEEVTTTLEETKFLTENLLLYIDINGNLHPDSATLVSDIDITFLKKDAPYIVGDVVQEGVLTAVVIPTKKAGGTTEMLAKALRKVPTDNYITTYPGQGLNGYTVEEAKTVLKKCKSAFYILPSIISNEKQEILGTVSWNLREMLAHAEETRKLMPVCVETKAIVSTIQRKYKGIKIQEGVVDYGARFYFYTSKTTVASLINTLNDLNETLVTMPLGYVTHGLNLEEAARYMRSLKVPATVSVSSPDAVTAYNGYLTSSSKTPEEHFIETISLAGSYKDWSYSGQSTQLGIEFLKRGDKSVYYTSNPTTFHLDGEVITFDNLKTLLSLREVRTIKVFTTVDNINLHTQVVDMSMTYGQQFGPTYLDGADVTKIKPHNSHEGKTFYVLPNDDTLRVEAFEYYHTTDPSFLGRYMSALNHTKKWKYPQVNGLTSIKWADNNCYLATALLTLQQIELKFNPPALQDAYYRARAGEAANFCALILAYCNKTVGELGDVRETMSYLFQHANLDSCKRVLNVVCKTCGQQQTTLKGVEAVMYMGTLSYEQFKKGVQIPCTCGKQATKYLVQQESPFVMMSAPPAQYELKHGTFTCASEYTGNYQCGHYKHITSKETLYCIDGALLTKSSEYKGPITDVFYKENSYTTTIKPVTYKLDGVVCTEIDPKLDNYYKKDNSYFTEQPIDLVPNQPYPNASFDNFKFVCDNIKFADDLNQLTGYKKPASRELKVTFFPDLNGDVVAIDYKHYTPSFKKGAKLLHKPIVWHVNNATNKATYKPNTWCIRCLWSTKPVETSNSFDVLKSEDAQGMDNLACEDLKPVSEEVVENPTIQKDVLECNVKTTEVVGDIILKPANNSLKITEEVGHTDLMAAYVDNSSLTIKKPNELSRVLGLKTLATHGLAAVNSVPWDTIANYAKPFLNKVVSTTTNIVTRCLNRVCTNYMPYFFTLLLQLCTFTRSTNSRIKASMPTTIAKNTVKSVGKFCLEASFNYLKSPNFSKLINIIIWFLLLSVCLGSLIYSTAALGVLMSNLGMPSYCTGYREGYLNSTNVTIATYCTGSIPCSVCLSGLDSLDTYPSLETTQITISSFKWDLTAFGLVAEWFLAYILFTRFFYVLGLAAIMQLFFSYFAVHFISNSWLMWLIINLVQMAPISAMVRMYIFFASFYYVWKSYVHVVDGCNSSTCMMCYKRNRATRVECTTIVNGVRRSFYVYANGGKGFCKLHNWNCVNCDTFCAGSTFISDEVARDLSLQFKRPINPTDQSSYIVDSVTVKNGSIHLYFDKAGQKTYERHSLSHFVNLDNLRANNTKGSLPINVIVFDGKSKCEESSAKSASVYYSQLMCQPILLLDQALVSDVGDSAEVAVKMFDAYVNTFSSTFNVPMEKLKTLVATAEAELAKNVSLDNVLSTFISAARQGFVDSDVETKDVVECLKLSHQSDIEVTGDSCNNYMLTYNKVENMTPRDLGACIDCSARHINAQVAKSHNIALIWNVKDFMSLSEQLRKQIRSAAKKNNLPFKLTCATTRQVVNVVTTKIALKGG

SEQ ID NO: 16035 - protein, 1946 aa, Artificial Sequence
  SARS-CoV-2__MT800923.1__non-structural protein 3 (NSP3)
MAPTKVTFGDDTVIEVQGYKSVNITFELDERIDKVLNEKCSAYTVELGTEVNEFACVVADAVIKTLQPVSELLTPLGIDLDEWSMATYYLFDESGEFKLASHMYCSFYPPDEDEEEGDCEEEEFEPSTQYEYGTEDDYQGKPLEFGATSAALQPEEEQEEDWLDDDSQQTVGQQDGSEDNQTTTIQTIVEVQPQLEMELTPVVQTIEVNSFSGYLKLTDNVYIKNADIVEEAKKVKPTVVVNAANVYLKHGGGVAGALNKATNNAMQVESDDYIATNGPLKVGGSCVLSGHNLAKHCLHVVGPNVNKGEDIQLLKSAYENFNQHEVLLAPLLSAGIFGADPIHSLRVCVDTVRTNVYLAVFDKNLYDKLVSSFLEMKSEKQVEQKIAEIPKEEVKPFITESKPSVEQRKQDDKKIKACVEEVTTTLEETKFLTENLLLYIDINGNLHPDSATLVSDIDITFLKKDAPYIVGDVVQEGVLTAVVIPTKKAGGTTEMLAKALRKVPTDNYITTYPGQGLNGYTVEEAKTVLKKCKSAFYILPSIISNEKQEILGTVSWNLREMLAHAEETRKLMPVCVETKAIVSTIQRKYKGIKIQEGVVDYGARFYFYTSKTTVASLINTLNDLNETLVTMPLGYVTHGLNLEEAARYMRSLKVPATVSVSSPDAVTAYNGYLTSSSKTPEEHFIETISLAGSYKDWSYSGQSTQLGIEFLKRGDKSVYYTSNPTTFHLDGEVITFDNLKTLLSLREVRTIKVFTTVDNINLHTQVVDMSMTYGQQFGPTYLDGADVTKIKPHNSHEGKTFYVLPNDDTLRVEAFEYYHTTDPSFLGRYMSALNHTKKWKYPQVNGLTSIKWADNNCYLATALLTLQQIELKFNPPALQDAYYRARAGEAANFCALILAYCNKTVGELGDVRETMSYLFQHANLDSCKRVLNVVCKTCGQQQTTLKGVEAVMYMGTLSYEQFKKGVQIPCTCGKQATKYLVQQESPFVMMSAPPAQYELKHGTFTCASEYTGNYQCGHYKHITSKETLYCIDGALLTKSSEYKGPITDVFYKENSYTTTIKPVTYKLDGVVCTEIDPKLDNYYKKDNSYFTEQPIDLVPNQPYPNASFDNFKFVCDNIKFADDLNQLTGYKKPASRELKVTFFPDLNGDVVAIDYKHYTPSFKKGAKLLHKPIVWHVNNATNKATYKPNTWCIRCLWSTKPVETSNSFDVLKSEDAQGMDNLACEDLKPVSEEVVENPTIQKDVLECNVKTTEVVGDIILKPANNIKITEEVGHTDLMAAYVDNSSLTIKKPNELSRVLGLKTLATHGLAAVNSVPWDTIANYAKPFLNKVVSTTTNIVTRCLNRVCTNYMPYFFTLLLQLCTFTRSTNSRIKASMPTTIAKNTVKSVGKFCLEASFNYLKSPNFSKLINIIIWFLLLSVCLGSLIYSTAALGVLMSNLGMPSYCTGYREGYLNSTNVTIATYCTGSIPCSVCLSGLDSLDTYPSLETIQITISSFKWDLTAFGLVAEWFLAYILFTRFFYVLGLAAIMQLFFSYFAVHFISNSWLMWLIINLVQMAPISAMVRMYIFFASFYYVWKSYVHVVDGCNSSTCMMCYKRNRATRVECTTIVNGVRRSFYVYANGGKGFCKLHNWNCVNCDTFCAGSTFISDEVARDLSLQFKRPINPTDQSSYIVDSVTVKNGSIHLYFDKAGQKTYERHSLSHFVNLDNLRANNTKGSLPINVIVFDGKSKCEESSAKSASVYYSQLMCQPILLLDQALVSDVGDSAEVAVKMFDAYVNTFSSTFNVPMEKLKTLVATAEAELAKNVSLDNVLSTFISAARQGFVDSDVETKDVVECLKLSHQSDIEVTGDSCNNYMLTYNKVENMTPRDLGACIDCSARHINAQVAKSHNIALIWNVKDFMSLSEQLRKQIRSAAKKNNLPFKLTCATTRQVVNVVTTKIALKGGK

SEQ ID NO: 16036 - protein, 1946 aa, Artificial Sequence
  SARS-CoV-2__MT797764.1__non-structural protein 3 (NSP3)
MAPTKVTFGDDTVIEVQGYKSVNITFELDERIDKVLNEKCSAYTVELGTEVNEFACVVADAVIKTLQPVSELLTPLGIDLDEWSMATYYLFDESGEFKLASHMYCSFYPPDEDEEEGDCEEEEFEPSTQYEYGTEDDYQGKPLEFGATSAALQPEEEQEEDWLDDDSQQTVGQQDGSEDNQTTTIQTIVEVQPQLEMELTPVVQTIEVNSFSGYLKLTDNVYIKNADIVEEAKKVKPTVVVNAANVYLKHGGGVAGALNKATNNAMQVESDDYIATNGPLKVGGSCVLSGHNLAKHCLHVVGPNVNKGEDIQLLKSAYENFNQHEVLLAPLLSAGIFGADPIHSLRVCVDTVRTNVYLAVFDKNLYDKLVSSFLEMKSEKQVEQKIAEIPKEEVKPFITESKPSVEQRKQDDKKIKACVEEVTTTLEETKFLTENLLLYIDINGNLHPDSATLVSDIDITFLKKDAPYIVGDVVQEGVLTAVVIPTKKAGGTTEMLAKALRKVPTDNYITTYPGQGLNGYTVEEAKTVLKKCKSAFYILPSIISNEKQEILGTVSWNLREMLAHAEETRKLMPVCVETKAIVSTIQRKYKGIKIQEGVVDYGARFYFYTSKTTVASLINTLNDLNETLVTMPLGYVTHGLNLEEAARYMRSLKVPATVSVSSPDAVTAYNGYLTSSSKTPEEHFIETISLAGSYKDWSYSGQSTQLGIEFLKRGDKSVYYTSNPTTFHLDGEVITFDNLKTLLSLREVRTIKVFTTVDNINLHTQVVDMSMTYGQQFGPTYLDGADVTKIKPHNSHEGKTFYVLPNDDTLRVEAFEYYHTTDPSFLGRYMSALNHTKKWKYPQVNGLTSIKWADNNCYLATALLTLQQIELKFNPPALQDAYYRARAGEAANFCALILAYCNKTVGELGDVRETMSYLFQHANLDSCKRVLNVVCKTCGQQQTTLKGVEAVMYMGTLSYEQFKKGVQIPCTCGKQATKYLVQQESPFVMMSAPPAQYELKHGTFTCASEYTGNYQCGHYKHITSKETLYCIDGALLTKSSEYKGPITDVFYKENSYTTTIKPVTYKLDGVVCTEIDPKLDDYYKKDNSYFTEQPIDLVPNQPYPNASFDNFKFVCDNIKFADDLNQLTGYKKPASRELKVTFFPDLNGDVVAIDYKHYTPSFKKGAKLLHKPIVWHVNNATNKATYKPNTWCIRCLWSTKPVETSNSFDVLKSEDAQGMDNLACEDLKPVSEEVVENPTIQKDVLECNVKTTEVVGDIILKPANNSLKITEEVGHTDLMAAYVDNSSLTIKKPNELSRVLGLKTLATHGLAAVNSVPWDTIANYAKPFLNKVVSTTTNIVTRCLNRVCTNYMPYFFTLLLQLCTFTRSTNSRIKASMPTTIAKNTVKSVGKFCLEASFNYLKSPNFSKLINIIIWFLLLSVCLGSLIYSTAALGVLMSNLGMPSYCTGYREGYLNSTNVTIATYCTGSIPCSVCLSGLDSLDTYPSLETIQITISSFKWDLTAFGLVAEWFLAYILFTRFFYVLGLAAIMQLFFSYFAVHFISNSWLMWLIINLVQMAPISAMVRMYIFFASFYYVWKSYVHVVDGCNSSTCMMCYKRNRATRVECTTIVNGVRRSFYVYANGGKGFCKLHNWNCVNCDTFCAGSTFISDEVARDLSLQFKRPINPTDQSSYIVDSVTVKNGSIHLYFDKAGQKTYERHSLSHFVNLDNLRANNTKGSLPINVIVFDGKSKCEESSAKSASVYYSQLMCQPILLLDQALVSDVGDSAEVAVKMFDAYVNTFSSTFNVPMEKLKTLVATAEAELAKNVSLDNVLSTFISAARQGFVDSDVETKDVVECLKLSHQSDIEVTGDSCNNYMLTYNKVENMTPRDLGACIDCSARHINAQVAKSHNIALIWNVKDFMSLSEQLRKQIRSAAKKNNLPFKLTCATTRQVVNVVTTKIALKGG

SEQ ID NO: 16037 - protein, 1946 aa, Artificial Sequence
  SARS-CoV-2__MT797765.1__non-structural protein 3 (NSP3)
MAPTKVTFGDDTVIEVQGYKSVNITFELDERIDKVLNEKCSAYTVELGTEVNEFACVVADAVIKTLQPVSELLTPLGIDLDEWSMATYYLFDESGEFKLASHMYCSFYPPDEDEEEGDCEEEEFEPSTQYEYGTEDDYQGKPLEFGATSAALQLEEEQEEDWLDDDSQQTVGQQDGSEDNQTTTIQTIVEVQPQLEMELTPVVQTIEVNSFSGYLKLTDNVYIKNADIVEEAKKVKPTVVVNAANVYLKHGGGVAGALNKATNNAMQVESDDYIATNGPLKVGGSCVLSGHNLAKHCLHVVGPNVNKGEDIQLLKSAYENFNQHEVLLAPLLSAGIFGADPIHSLRVCVDTVRTNVYLAVFDKNLYDKLVSSFLEMKSEKQVEQKIAEIPKEEVKPFITESKPSVEQRKQDDKKIKACVEEVTTTLEETKFLTENLLLYIDINGNLHPDSATLVSDIDITFLKKDAPYIVGDVVQEGVLTAVVIPTKKAGGTTEMLAKALRKVPTDNYITTYPGQGLNGYTVEEAKTVLKKCKSAFYILPSIISNEKQEILGTVSWNLREMLAHAEETRKLMPVCVETKAIVSTIQRKYKGIKIQEGVVDYGARFYFYTSKTTVASLINTLNDLNETLVTMPLGYVTHGLNLEEAARYMRSLKVPATVSVSSPDAVTAYNGYLTSSSKTPEEHFIETISLAGSYKDWSYSGQSTQLGIEFLKRGDKSVYYTSNPTTFHLDGEVITFDNLKTLLSLREVRTIKVFTTVDNINLHTQVVDMSMTYGQQFGPTYLDGADVTKIKPHNSHEGKTFYVLPNDDTLRVEAFEYYHTTDPSFLGRYMSALNHTKKWKYPQVNGLTSIKWADNNCYLATALLTLQQIELKFNPPALQDAYYRARAGEAANFCALILAYCNKTVGELGDVRETMSYLFQHANLDSCKRVLNVVCKTCGQQQTTLKGVEAVMYMGTLSYEQFKKGVQIPCTCGKQATKYLVQQESPFVMMSAPPAQYELKHGTFTCASEYTGNYQCGHYKHITSKETLYCIDGALLTKSSEYKGPITDVFYKENSYTTTIKPVTYKLDGVVCTEIDPKLDNYYKKDNSYFTEQPIDLVPNQPYPNASFDNFKFVCDNIKFADDLNQLTGYKKPASRELKVTFFPDLNGDVVAIDYKHYTPSFKKGAKLLHKPIVWHVNNATNKATYKPNTWCIRCLWSTKPVETSNSFDVLKSEDAQGMDNLACEDLKPVSEEVVENPTIQKDVLECNVKTTEVVGDIILKPANNSLKIIEEVGHTDLMAAYVDNSSLTIKKPNELSRVLGLKTLATHGLAAVNSVPWDTIANYAKPFLNKVVSTTTNIVTRCLNRVCTNYMPYFFTLLLQLCTFTRSTNSRIKASMPTTIAKNTVKSVGKFCLEASFNYLKSPNFSKLINIIIWFLLLSVCLGSLIYSTAALGVLMSNLGMPSYCTGYREGYLNSTNVTIATYCTGSIPCSVCLSGLDSLDTYPSLETIQITISSFKWDLTAFGLVAEWFLAYILFTRFFYVLGLAAIMQLFFSYFAVHFISNSWLMWLIINLVQMAPISAMVRMYIFFASFYYVWKSYVHVVDGCNSSTCMMCYKRNRATRVECTTIVNGVRRSFYVYANGGKGFCKLHNWNCVNCDTFCAGSTFISDEVARDLSLQFKRPINPTDQSSYIVDSVTVKNGSIHLYFDKAGQKTYERHSLSHFVNLDNLRANNTKGSLPINVIVFDGKSKCEESSAKSASVYYSQLMCQPILLLDQALVSDVGDSAEVAVKMFDAYVNTFSSTFNVPMEKLKTLVATAEAELAKNVSLDNVLSTFISAARQGFVDSDVETKDVVECLKLSHQSDIEVTGDSCNNYMLTYNKVENMTPRDLGACIDCSARHINAQVAKSHNIALIWNVKDFMSLSEQLRKQIRSAAKKNNLPFKLTCATTRQVVNVVTTKIALKGG

SEQ ID NO: 16038 - protein, 1946 aa, Artificial Sequence
  SARS-CoV-2__MT791880.1__non-structural protein 3 (NSP3)
MAPTKVTFGDDTVIEVQGYKSVNITFELDERIDKVLNEKCSAYTVELGTEVNEFACVVADAVIKTLQPVSELLTPLGIDLDEWSMATYYLFDESGEFKLASHMYCSFYPPDEDEEEGDCEEEEFEPSTQYEYGTEDDYQGKPLEFGATSAALQPEEEQEEDWLDDDSQQTVGQQDGSEDNQTTTIQTIVEVQPQLEMELTPVVQTIEVNSFSGYLKLTDNVYIKNADIVEEAKKVKPTVVVNAANVYLKHGGGVAGALNKATNNAMQVESDDYIATNGPLKVGGSCVLSGHNLAKHCLHVVGPNVNKGEDIQLLKSAYENFNQHEVLLAPLLSAGIFGADPIHSLRVCVDTVRTNVYLAVFDKNLYDKLVSSFLEMKSEKQVEQKIAEIPKEEVKPFITESKPSVEQRKQDDKKIKACVEEVTTTLEETKFLTENLLLYIDINGNLHPDSATLVSDIDITFLKKDAPYIVGDVVQEGVLTAVVIPTKKAGGTTEMLAKALRKVPTDNYITTYPGQGLNGYTVEEAKTVLKKCKSAFYILPSIISNEKQEILGTVSWNLREMLAHAEETRKLMPVCVETKAIVSTIQRKYKGIKIQEGVVDYGARFYFYTSKTTVASLINTLNDLNETLVTMPLGYVTHGLNLEEAARYMRSLKVPATVSVSSPDAVTAYNGYLTSSSKTPEEHFIETISLAGSYKDWSYSGQSTQLGIEFLKRGDKSVYYTSNPTTFHLDGEVITFDNLKTLLSLREVRTIKVFTTVDNINLHTQVVDMSMTYGQQFGPTYLDGADVTKIKPHNSHEGKTFYVLPNDDTLRVEAFEYYHTTDPSFLGRYMSALNHTKKWKYPQVNGLTSIKWADNNCYLATALLTLQQIELKFNPPALQDAYYRARAGEAANFCALILAYCNKTVGELGDVRETMSYLFQHANLDSCKRVLNVVCKTCGQQQTTLKGVEAVMYMGTLSYEQFKKGVQIPCTCGKQATKYLVQQESPFVMMSAPPAQYELKHGTFTCASEYTGNYQCGHYKHITSKETLYCIDGALLTKSSEYKGPITDVFYKENSYTTTIKPVTYKLDGVVCTEIDPKLDNYYKKDNSYFTEQPIDLVPNQPYPNASFDNFKFVCDNIKFADDLNQLTGYKKPASRELKVTFFPDLNGDVVAIDYKHYTPSFKKGAKLLHKPIVWHVNNATNKATYKPNTWCIRCLWSTKPVETSNSFDVLKSEDAQGMDNLACEDLKPVSEEVVENPTIQKDVLECNVKTTEVVGDIILKPANNSLKITEEVGHTDLMAAYVDNSSLTIKKPNELSRVLGLKTLATHGLAAVNSVPWDTIANYAKPFLNKVVSTTTNIVTRCLNRVCTNYMPYFFTLLLQLCTFTRSTNSRIKASMPTTIAKNTVKSVGKFCLEASFNYLKSPNFSKLINIIIWFLLLSVCLGSLIYSTAALGVLMSNLGMPSYCTGYREGYLNSTNVTIATYCTGSIPCSVCLSGLDSLDTYPSLETIQITISSFKWDLTAFGLVAEWFLAYILFTRFFYVLGLAAIMQLFFSYFAVHFISNSWLMWLIINLVQMAPISAMVRMYIFFASFYYVWKSYVHVVDGCNSSTCMMCYKRNRATRVECTTIVNGVRRSFYVYANGGKGFCKLHNWNCVNCDTFYAGSTFISDEVARDLSLQFKRPINPTDQSSYIVDSVTVKNGSIHLYFDKAGQKTYERHSLSHFVNLDNLRANNTKGSLPINVIVFDGKSKCEESSAKSASVYYSQLMCQPILLLDQALVSDVGDSAEVAVKMFDAYVNTFSSTFNVPMEKLKTLVATAEAELAKNVSLDNVLSTFISAARQGFVDSDVETKDVVECLKLSHQSDIEVTGDSCNNYMLTYNKVENMTPRDLGACIDCSARHINAQVAKSHNIALIWNVKDFMSLSEQLRKQIRSAAKKNNLPFKLTCATTRQVVNVVTTKIALKGG

SEQ ID NO: 16039 - protein, 1946 aa, Artificial Sequence
  SARS-CoV-2__MT791915.1__non-structural protein 3 (NSP3)
MAPTKVTFGDDTVIEVQGYKSVNITFELDERIDKVLNEKCSAYTVELGTEVNEFACVVADAVIKTLQPVSELLTPLGIDLDEWSMATYYLFDESGEFKLASHMYCSFYPPDEDEEEGDCEEEEFEPSTQYEYRTEDDYQGKPLEFGATSAALQPEEEQEEDWLDDDSQQTVGQQDGSEDNQTTTIQTIVEVQPQLEMELTPVVQTIEVNSFSGYLKLTDNVYIKNADIVEEAKKVKPTVVVNAANVYLKHGGGVAGALNKATNNAMQVESDDYIATNGPLKVGGSCVLSGHNLAKHCLHVVGPNVNKGEDIQLLKSAYENFNQHEVLLAPLLSAGIFGADPIHSLRVCVDTVRTNVYLAVFDKNLYDKLVSSFLEMKSEKQVEQKIAEIPKEEVKPFITESKPSVEQRKQDDKKIKACVEEVTTTLEETKFLTENLLLYIDINGNLHPDSATLVSDIDITFLKKDAPYIVGDVVQEGVLTAVVIPTKKAGGTTEMLAKALRKVPTDNYITTYPGQGLNGYTVEEAKTVLKKCKSAFYILPSIISNEKQEILGTVSWNLREMLAHAEETRKLMPVCVETKAIVSTIQRKYKGIKIQEGVVDYGARFYFYTSKTTVASLINTLNDLNETLVTMPLGYVTHGLNLEEAARYMRSLKVPATVSVSSPDAVTAYNGYLTSSSKTPEEHFIETISLAGSYKDWSYSGQSTQLGIEFLKRGDKSVYYTSNPTTFHLDGEVITFDNLKTLLSLREVRTIKVFTTVDNINLHTQVVDMSMTYGQQFGPTYLDGADVTKIKPHNSHEGKTFYVLPNDDTLRVEAFEYYHTTDPSFLGRYMSALNHTKKWKYPQVNGLTSIKWADNNCYLATALLTLQQIELKFNPPALQDAYYRARAGEAANFCALILAYCNKTVGELGDVRETMSYLFQHANLDSCKRVLNVVCKTCGQQQTTLKGVEAVMYMGTLSYEQFKKGVQIPCTCGKQATKYLVQQESPFVMMSAPPAQYELKHGTFTCASEYTGNYQCGHYKHITSKETLYCIDGALLTKSSEYKGPITDVFYKENSYTTTIKPVTYKLDGVVCTEIDPKLDNYYKKDNSYFTEQPIDLVPNQPYPNASFDNFKFVCDNIKFADDLNQLTGYKKPASRELKVTFFPDLNGDVVAIDYKHYTPSFKKGAKLLHKPIVWHVNNATNKATYKPNTWCIRCLWSTKPVETSNSFDVLKSEDAQGMDNLACEDLKPVSEEVVENPTIQKDVLECNVKTTEVVGDIILKPANNSLKITEEVGHTDLMAAYVDNSSLTIKKPNELSRVLGLKTLATHGLAAVNSVPWDTIANYAKPFLNKVVSTTTNIVTRCLNRVCTNYMPYFFTLLLQLCTFTRSTNSRIKASMPTTIAKNTVKSVGKFCLEASFNYLKSPNFSKLINIIIWFLLLSVCLGSLIYSTAALGVLMSNLGMPSYCTGYREGYLNSTNVTIATYCTGSIPCSVCLSGLDSLDTYPSLETIQITISSFKWDLTAFGLVAEWFLAYILFTRFFYVLGLAAIMQLFFSYFAVHFISNSWLMWLIINLVQMAPISAMVRMYIFFASFYYVWKSYVHVVDGCNSSTCMMCYKRNRATRVECTTIVNGVRRSFYVYANGGKGFCKLHNWNCVNCDTFCAGSTFISDEVARDLSLQFKRPINPTDQSSYIVDSVTVKNGSIHLYFDKAGQKTYERHSLSHFVNLDNLRANNTKGSLPINVIVFDGKSKCEESSAKSASVYYSQLMCQPILLLDQALVSDVGDSAEVAVKMFDAYVNTFSSTFNVPMEKLKTLVATAEAELAKNVSLDNVLSTFISAARQGFVDSDVETKDVVECLKLSHQSDIEVTGDSCNNYMLTYNKVENMTPRDLGACIDCSARHINAQVAKSHNIALIWNVKDFMSLSEQLRKQIRSAAKKNNLPFKLTCATTRQVVNVVTTKIALKGG

SEQ ID NO: 16040 - protein, 1946 aa, Artificial Sequence
  SARS-CoV-2__MT791940.1__non-structural protein 3 (NSP3)
MAPTKVTFGDDTVIEVQGYKSVNITFELDERIDKVLNEKCSAYTVELGTEVNEFACVVADAVIKTLQPVSELLTPLGIDLDEWSMATYYLFDESGEFKLASHMYCSFYPPDEDEEEGDCEEEEFEPSTQYEYGTEDDYQGKPLEFGATSAALQPEEEQEEDWLDDDSQQTVGQQDGSEDNQTTTIQTIVEVQPQLEMELTPVVQTIEVNSFSGYLKLTDNVYIKNADIVEEAKKVKPTVVVNAANVYLKHGGGVAGALNKATNNAMQVESDDYIATNGPLKVGGSCVLSGHNLAKHCLHVVGPNVNKGEDIQLLKSAYENFNQHEVLLAPLLSAGIFGADPIHSLRVCVDTVRTNVYLAVFDKNLYDKLVSSFLEMKSEKQVEQKIAEIPKEEVKPFITESKPSVEQRKQDDKKIKACVEEVTTTLEETKFLTENLLLYIDINGNLHPDSATLVSDIDITFLKKDAPYIVGDVVQEGVLTAVVIPTKKAGGTTEMLAKALRKVPTDNYITTYPGQGLNGYTVEEAKTVLKKCKSAFYILPSIISNEKQEILGTVSWNWREMLAHAEETRKLMPVCVETKAIVSTIQRKYKGIKIQEGVVDYGARFYFYTSKTTVASLINTLNDLNETLVTMPLGYVTHGLNLEEAARYMRSLKVPATVSVSSPDAVTAYNGYLTSSSKTPEEHFIETISLAGSYKDWSYSGQSTQLGIEFLKRGDKSVYYTSNPTTFHLDGEVITFDNLKTLLSLREVRTIKVFTTVDNINLHTQVVDMSMTYGQQFGPTYLDGADVTKIKPHNSHEGKTFYVLPNDDTLRVEAFEYYHTTDPSFLGRYMSALNHTKKWKYPQVNGLTSIKWADNNCYLATALLTLQQIELKFNPPALQDAYYRARAGEAANFCALILAYCNKTVGELGDVRETMSYLFQHANLDSCKRVLNVVCKTCGQQQTTLKGVEAVMYMGTLSYEQFKKGVQIPCTCGKQATKYLVQQESPFVMMSAPPAQYELKHGTFTCASEYTGNYQCGHYKHITSKETLYCIDGALLTKSSEYKGPITDVFYKENSYTTTIKPVTYKLDGVVCTEIDPKLDNYYKKDNSYFTEQPIDLVPNQPYPNASFDNFKFVCDNIKFADDLNQLTGYKKPASRELKVTFFPDLNGDVVAIDYKHYTPSFKKGAKLLHKPIVWHVNNATNKATYKPNTWCIRCLWSTKPVETSNSFDVLKSEDAQGMDNLACEDLKPVSEEVVENPTIQKDVLECNVKTTEVVGDIILKPANNSLKITEEVGHTDLMAAYVDNSSLTIKKPNELSRVLGLKTLATHGLAAVNSVPWDTIANYAKPFLNKVVSTTTNIVTRCLNRVCTNYMPYFFTLLLQLCTFTRSTNSRIKASMPTTIAKNTVKSVGKFCLEASFNYLKSPNFSKLINIIIWFLLLSVCLGSLIYSTAALGVLMSNLGMPSYCTGYREGYLNSTNVTIATYCTGSIPCSVCLSGLDSLDTYPSLETIQITISSFKWDLTAFGLVAEWFLAYILFTRFFYVLGLAAIMQLFFSYFAVHFISNSWLMWLIINLVQMAPISAMVRMYIFFASFYYVWKSYVHVVDGCNSSTCMMCYKRNRATRVECTTIVNGVRRSFYVYANGGKGFCKLHNWNCVNCDTFCAGSTFISDEVARDLSLQFKRPINPTDQSSYIVDSVTVKNGSIHLYFDKAGQKTYERHSLSHFVNLDNLRANNTKGSLPINVIVFDGKSKCEESSAKSASVYYSQLMCQPILLLDQALVSDVGDSAEVAVKMFDAYVNTFSSTFNVPMEKLKTLVATAEAELAKNVSLDNVLSTFISAARQGFVDSDVETKDVVECLKLSHQSDIEVTGDSCNNYMLTYNKVENMTPRDLGACIDCSARHINAQVAKSHNIALIWNVKDFMSLSEQLRKQIRSAAKKNNLPFKLTCATTRQVVNVVTTKIALKGG

SEQ ID NO: 16041 - protein, 1946 aa, Artificial Sequence
  SARS-CoV-2__MT791943.1__non-structural protein 3 (NSP3)
MAPTKVTFGDDTVIEVQGYKSVNITFELDERIDKVLNEKCSAYTVELGTEVNEFACVVADAVIKTLQPVSELLTPLGIDLDEWSMATYYLFDESGEFKLASHMYCSFYPPDEDEEEGDCEEEEFEPSTQYEYGTEDDYQGKPLEFGATSAALQPEEEQEEDWLDDDSQQTVGQQDGSEDNQTTTIQTIVEVQPQLEMELTPVVQTIEVNSFSGYLKLTDNVYIKNADIVEEAKKVKPTVVVNAANVYLKHGGGVAGALNKATNNAMQVESDDYIATNGPLKVGGSCVLSGHNLAKHCLHVVGPNVNKGEDIQLLKSAYENFNQHEVLLAPLLSAGIFGADPIHSLRVCVDTVRTNVYLAVFDKNLYDKLVSSFLEMKSEKQVEQKIAEIPKEEVKPFITESKPSVEQRKQDDKKIKACVEEVTTTLEETKFLTENLLLYIDINGNLHPDSATLVSDIDITFLKKDAPYIVGDVVQEGVLTAVVIPTKKAGGTTEMLAKALRKVPTDNYITTYPGQGLNGYTVEEAKTVLKKCKSAFYILPSIISNEKQEILGTVSWNLREMLAHAEETRKLMPVCVETKAIVSTIQRKYKGIKIQEGVVDYGARFYFYTSKTTVASLINTLNDLNETLVTMPLGYVTHGLNLEEAARYMRSLKVPATVSVSSPDAVTAYNGYLTSSSKTPEEHFIETISLAGSYKDWSYSGQSTQLGIEFLKRGDKSVYYTSNPTTFHLDGEVITFDNLKTLLSLREVRTIKVFTTVDNINLHTQVVDMSMTYGQQFGPTYLDGADVTKIKPHNSHEGKTFYVLPNDDTLRVEAFEYYHTTDPSFLGRYMSALNHTKKWKYPQVNGLTSIKWADNNCYLATALLTLQQIELKFNPPALQDAYYRARAGEAANFCALILAYCNKTVGELGDVRETMSYLFQHANLDSCKRVLNVVCKTCGQQQTTLKGVEAVMYMGTLSYEQFKKGVQIPCTCGKQATKYLVQQESPFVMMSAPPAQYELKHGTFTCASEYTGNYQCGHYKHITSKETLYCIDGALLTKSSEYKGPITDVFYKENSYTTTIKPVTYKLDGVVCTEIDPKLDNYYKKDNSYFTEQPIDLVPNQPYPNASFDNFKFVCDNIKFADDLNQLTGYKKPASRELKVTFFPDLNGDVVAIDYKHYTPSFKKGAKLLHKPIVWHVNNATNKATYKPNTWCIRCLWSTKPVETSNSFDVLKSEDAQGMDNLACEDLKPVSEEVVENPTIQKDVLECNVKTTEVVGDIILKPANNSLKITEEVGHTDLMAAYVDNSSLTIKKPNELSRVLGLKTLATHGLAAVNSVPWDTIANYAKPFLNKVVSTTTNIVTRCLNRVCTNYMPYFFTLLLQLCTFTRSTNSRIKASMPTTIAKNTVKSVGKFCLEASFNYLKSPNFSKLINIIIWFLLLSVCLGFLIYSTAALGVLMSNLGMPSYCTGYREGYLNSTNVTIATYCTGSIPCSVCLSGLDSLDTYPSLETIQITISSFKWDLTAFGLVAEWFLAYILFTRFFYVLGLAAIMQLFFSYFAVHFISNSWLMWLIINLVQMAPISAMVRMYIFFASFYYVWKSYVHVVDGCNSSTCMMCYKRNRATRVECTTIVNGVRRSFYVYANGGKGFCKLHNWNCVNCDTFCAGSTFISDEVARDLSLQFKRPINPTDQSSYIVDSVTVKNGSIHLYFDKAGQKTYERHSLSHFVNLDNLRANNTKGSLPINVIVFDGKSKCEESSAKSASVYYSQLMCQPILLLDQALVSDVGDSAEVAVKMFDAYVNTFSSTFNVPMEKLKTLVATAEAELAKNVSLDNVLSTFISAARQGFVDSDVETKDVVECLKLSHQSDIEVTGDSCNNYMLTYNKVENMTPRDLGACIDCSARHINAQVAKSHNIALIWNVKDFMSLSEQLRKQIRSAAKKNNLPFKLTCATTRQVVNVVTTKIALKGG

SEQ ID NO: 16042 - protein, 1946 aa, Artificial Sequence
  SARS-CoV-2__MT791948.1__non-structural protein 3 (NSP3)
MAPTKVTFGDDTVIEVQGYKSVNITFELDERIDKVLNEKCSAYTVELGTEVNEFACVVADAVIKTLQPVSELLTPLGIDLDEWSMATYYLFDESGEFKLASHMYCSFYPPDEDEEEGDCEEEEFEPSTQYEYGTEDDYQGKPLEFGATSAALQPEEEQEEDWLDDDSQQTVGQQDGSEDNQTTTIQTIVEVQPQLEMELTPVVQTIEVNSFSGYLKLTDNVYIKNADIVEEAKKVKPTVVVNAANVYLKHGGGVAGALNKATNNAMQVESDDYIATNGPLKVGGSCVLSGHNLAKHCLHVVGPNVNKGEDIQLLKSAYENFNQHEVLLAPLLSAGIFGADPIHSLRVCVDTVRTNVYLAVFDKNLYDKLVSSFLEMKSEKQVEQKIAEIPKEEVKPFITESKPSVEQRKQDDKKIKACVEEVTTTLEETKFLTENLLLYIDINGNLHPDSATLVSDIDITFLKKDAPYIVGDVVQEGVLTAVVIPTKKAGGTTEMLAKALRKVPTDNYITTYPGQGLNGYTVEEAKTVLKKCKSAFYILPSIISNEKQEILGTVSWNLREMLAHAEETRKLMPVCVETKAIVSTIQRKYKGIKIQEGVVDYGARFYFYTSKTTVASLINTLNDLNETLVTMPLGYVTHGLNLEEAARYMRSLKVPATVSVSSPDAVTAYNGYLTSSSKTPEEHFIETISLAGSYKDWSYSGQSTQLGIEFLKRGDKSVYYTSNPTTFHLDGEVITFDNLKTLLSLREVRTIKVFTTVDNINLHTQVVDMSMTYGQQFGPTYLDGADVTKIKPHNSHEGKTFYVLPNDDTLRVEAFEYYHTTDPSFLGRYMSALNHTKKWKYPQVNGLTSIKWADNNCYLATALLTLQQIELKFNPPALQDAYYRARAGEAANFCALILAYCNKTVGELGDVRETMSYLFQHANLDSCKRVLNVVCKTCGQQQTTLKGVEAVMYMGTLSYEQFKKGVQIPCTCGKQATKYLVQQESPFVMMSAPPAQYELKHGTFTCASEYTGNYQCGHYKHITSKETLYCIDGALLTKSSEYKGPITDVFYKENSYTTTIKPVTYKLDGVVCTEIDPKLDNYYKKDNSYFTEQPIDLVPNQPYPNASFDNFKFVCDNIKFADDLNQLTGYKKPASRELKVTFFPDLNGDVVAIDYKHYTPSFKKGAKLLHKPIVWHVNNATNKATYKPNTWCIRCLWSTKPVETSNSFDVLKSEDAQGMDNLACEDLKPVSEEVVENPTIQKDVLECNVKTTEVVGDIILKPANNSLKITEEVGYTDLMAAYVDNSSLTIKKPNELSRVLGLKTLATHGLAAVNSVPWDTIANYAKPFLNKVVSTTTNIVTRCLNRVCTNYMPYFFTLLLQLCTFTRSTNSRIKASMPTTIAKNTVKSVGKFCLEASFNYLKSPNFSKLINIIIWFLLLSVCLGSLIYSTAALGVLMSNLGMPSYCTGYREGYLNSTNVTIATYCTGSIPCSVCLSGLDSLDTYPSLETIQITISSFKWDLTAFGLVAEWFLAYILFTRFFYVLGLAAIMQLFFSYFAVHFISNSWLMWLIINLVQMAPISAMVRMYIFFASFYYVWKSYVHVVDGCNSSTCMMCYKRNRATRVECTTIVNGVRRSFYVYANGGKGFCKLHNWNCVNCDTFCAGSTFISDEVARDLSLQFKRPINPTDQSSYIVDSVTVKNGSIHLYFDKAGQKTYERHSLSHFVNLDNLRANNTKGSLPINVIVFDGKSKCEESSAKSASVYYSQLMCQPILLLDQALVSDVGDSAEVAVKMFDAYVNTFSSTFNVPMEKLKTLVATAEAELAKNVSLDNVLSTFISAARQGFVDSDVETKDVVECLKLSHQSDIEVTGDSCNNYMLTYNKVENMTPRDLGACIDCSARHINAQVAKSHNIALIWNVKDFMSLSEQLRKQIRSAAKKNNLPFKLTCATTRQVVNVVTTKIALKGG

SEQ ID NO: 16043 - protein, 1946 aa, Artificial Sequence
  SARS-CoV-2__MT791953.1__non-structural protein 3 (NSP3)
MAPTKVTFGDDTVIEVQGYKSVNITFELDERIDKVLNEKCSAYTVELGTEVNEFACVVADAVIKTLQPVSELLTPLGIDLDEWSMATYYLFDESGEFKLASHMYCSFYPPDEDEEEGDCEEEEFEPSTQYEYGTEDDYQGKPLEFGATSAALQPEEEQEEDWLDDDSQQTVGQQDGSEDNQTTTIQTIVEVQPQLEMEFTPVVQTIEVNSFSGYLKLTDNVYIKNADIVEEAKKVKPTVVVNAANVYLKHGGGVAGALNKATNNAMQVESDDYIATNGPLKVGGSCVLSGHNLAKHCLHVVGPNVNKGEDIQLLKSAYENFNQHEVLLAPLLSAGIFGADPIHSLRVCVDTVRTNVYLAVFDKNLYDKLVSSFLEMKSEKQVEQKIAEIPKEEVKPFITESKPSVEQRKQDDKKIKACVEEVTTTLEETKFLTENLLLYIDINGNLHPDSATLVSDIDITFLKKDAPYIVSDVVQEGVLTAVVIPTKKAGGTTEMLAKALRKVPTDNYITTYPGQGLNGYTVEEAKTVLKKCKSAFYILPSIISNEKQEILGTVSWNLREMLAHAEETRKLMPVCVETKAIVSTIQRKYKGIKIQEGVVDYGARFYFYTSKTTVASLINTLNDLNETLVTMPLGYVTHGLNLEEAARYMRSLKVPATVSVSSPDAVTAYNGYLTSSSKTPEEHFIETISLAGSYKDWSYSGQSTQLGIEFLKRGDKSVYYTSNPTTFHLDGEVITFDNLKTLLSLREVRTIKVFTTVDNINLHTQVVDMSMTYGQQFGPTYLDGADVTKIKPHNSHEGKTFYVLPNDDTLRVEAFEYYHTTDPSFLGRYMSALNHTKKWKYPQVNGLTSIKWADNNCYLATALLTLQQIELKFNPPALQDAYYRARAGEAANFCALILAYCNKTVGELGDVRETMSYLFQHANLDSCKRVLNVVCKTCGQQQTTLKGVEAVMYMGTLSYEQFKKGVQIPCTCGKQATKYLVQQESPFVMMSAPPAQYELKHGTFTCASEYTGNYQCGHYKHITSKETLYCIDGALLTKSSEYKGPITDVFYKENSYTTTIKPVTYKLDGVVCTEIDPKLDNYYKKDNSYFTEQPIDLVPNQPYPNASFDNFKFVCDNIKFADDLNQLTGYKKPASRELKVTFFPDLNGDVVAIDYKHYTPSFKKGAKLLHKPIVWHVNNATNKATYKPNTWCIRCLWSTKPVETSNSFDVLKSEDAQGMDNLACEDLKPVSEEVVENPTIQKDVLECNVKTTEVVGDIILKPANNSLKITEEVGHTDLMAAYVDNSSLTIKKPNELSRVLGLKTLATHGLAAVNSVPWDTIANYAKPFLNKVVSTTTNIVTRCLNRVCTNYMPYFFTLLLQLCTFTRSTNSRIKASMPTTIAKNTVKSVGKFCLEASFNYLKSPNFSKLINIIIWFLLLSVCLGSLIYSTAALGVLMSNLGMPSYCTGYREGYLNSTNVTIATYCTGSIPCSVCLSGLDSLDTYPSLETIQITISSFKWDLTAFGLVAEWFLAYILFTRFFYVLGLAAIMQLFFSYFAVHFISNSWLMWLIINLVQMAPISAMVRMYIFFASFYYVWKSYVHVVDGCNSSTCMMCYKRNRATRVECTTIVNGVRRSFYVYANGGKGFCKLHNWNCVNCDTFCAGSTFISDEVARDLSLQFKRPINPTDQSSYIVDSVTVKNGSIHLYFDKAGQKTYERHSLSHFVNLDNLRANNTKGSLPINVIVFDGKSKCEESSAKSASVYYSQLMCQPILLLDQALVSDVGDSAEVAVKMFDAYVNTFSSTFNVPMEKLKTLVATAEAELAKNVSLDNVLSTFISAARQGFVDSDVETKDVVECLKLSHQSDIEVTGDSCNNYMLTYNKVENMTPRDLGACIDCSARHINAQVAKSHNIALIWNVKDFMSLSEQLRKQIRSAAKKNNLPFKLTCATTRQVVNVVTTKIALKGG

SEQ ID NO: 16044 - protein, 1946 aa, Artificial Sequence
  SARS-CoV-2__MT791956.1__non-structural protein 3 (NSP3)
MAPTKVTFGDDTVIEVQGYKSVNITFELDERIDKVLNEKCSAYTVELGTEVNEFACVVADAVIKTLQPVSELLTPLGIDLDEWSMATYYLFDESGEFKLASHMYCSFYPPDEDEEEGDCEEEEFEPSTQYEYGTEDDYQGKPLEFGATSAALQPEEEQEEDWLDDDSQQTVGQQDGSEDNQTTTIQTIVEVQPQLEMELTPVVQTIEVNSFSGYLKLTDNVYIKNADIVEEAKKVKPTVVVNAANVYLKHGGGVAGALNKATNNAMQVESDDYIATNGPLKVGGSCVLSGHNLAKHCLHVVGPNVNKGEDIQLLKSAYENFNQHEVLLAPLLSAGIFGADPIHSLRVCVDTVRTNVYLAVFDKNLYDKLVSSFLEMKSEKQVEQKIAEIPKEEVKPFITESKPSVEQRKQDDKKIKACVEEVTTTLEETKFLTENLLLYIDINGNLHPDSATLVSDIDITFLKKDAPYIVGDVVQEGVLTAVVIPTKKAGGTTEMLAKALRKVPTDNYITTYPGQGLNGYTVEEAKTVLKKCKSAFYILPSIISNEKQEILGTVSWNLREMLAHAEETRKLMPVCVETKAIVSTIQRKYKGIKIQEGVVDYGARFYFYTSKTTVASLINTLNDLNETLVTMPLGYVTHGLNLEEAARYMRSLKVPATVSVSSPDAVTAYNGYLTSSSKTPEEHFIETISLAGSYKDWSYSGQSTQLGIEFLKRGDKSVYYTSNPTTFHLDGEVITFDNLKTLLSLREVRTIKVFTTVDNINLHTQVVDMSMTYGQQFGPTYLDGADVTKIKPHNSHEGKTFYVLPNDDTLRVEAFEYYHTTDPSFLGRYMSALNHTKKWKYPQVNGLTSIKWADNNCYLATALLTLQQIELKFNPPALQDAYYRARAGEAANFCALILAYCNKTVGELGDVRETMSYLFQHANLDSCKRVLNVVCKTCGQQQTTLKGVEAVMYMGTLSYEQFKKGVQIPCTCGKQATKYLVQQESPFVMMSAPPAQYELKHGTFTCASEYTGNYQCGHYKHITSKETLYCIDGALLIKSSEYKGPITDVFYKENSYTTTIKPVTYKLDGVVCTEIDPKLDNYYKKDNSYFTEQPIDLVPNQPYPNASFDNFKFVCDNIKFADDLNQLTGYKKPASRELKVTFFPDLNGDVVAIDYKHYTPSFKKGAKLLHKPIVWHVNNATNKATYKPNTWCIRCLWSTKPVETSNSFDVLKSEDAQGMDNLACEDLKPVSEEVVENPTIQKDVLECNVKTTEVVGDIILKPANNSLKITEEVGHTDLMAAYVDNSSLTIKKPNELSRVLGLKTLATHGLAAVNSVPWDTIANYAKPFLNKVVSTTTNIVTRCLNRVCTNYMPYFFTLLLQLCTFTRSTNSRIKASMPTTIAKNTVKSVGKFCLEASFNYLKSPNFSKLINIIIWFLLLSVCLGSLIYSTAALGVLMSNLGMPSYCTGYREGYLNSTNVTIATYCTGSIPCSVCLSGLDSLDTYPSLETIQITISSFKWDLTAFGLVAEWFLAYILFTRFFYVLGLAAIMQLFFSYFAVHFISNSWLMWLIINLVQMAPISAMVRMYIFFASFYYVWKSYVHVVDGCNSSTCMMCYKRNRATRVECTTIVNGVRRSFYVYANGGKGFCKLHNWNCVNCDTFCAGSTFISDEVARDLSLQFKRPINPTDQSSYIVDSVTVKNGSIHLYFDKAGQKTYERHSLSHFVNLDNLRANNTKGSLPINVIVFDGKSKCEESSAKSASVYYSQLMCQPILLLDQALVSDVGDSAEVAVKMFDAYVNTFSSTFNVPMEKLKTLVATAEAELAKNVSLDNVLSTFISAARQGFVDSDVETKDVVECLKLSHQSDIEVTGDSCNNYMLTYNKVENMTPRDLGACIDCSARHINAQVAKSHNIALIWNVKDFMSLSEQLRKQIRSAAKKNNLPFKLTCATTRQVVNVVTTKIALKGG

SEQ ID NO: 16045 - protein, 1946 aa, Artificial Sequence
  SARS-CoV-2__MT791958.1__non-structural protein 3 (NSP3)
MAPTKVTFGDDTVIEVQGYKSVNITFELDERIDKVLNEKCSAYTVELGTEVNEFACVVADAVIKTLQPVSELLTPLGIDLDEWSMATYYLFDESGEFKLASHMYCSFYPPDEDEEEGDCEEEEFEPSTQYEYGTEDDYQGKPLEFGATSAALQPEEEQEEDWLDDDSQQTVGQQDGSEDNQTTTIQTIVEVQPQLEMELTPVVQTIEVNSFSGYLKLTDNVYIKNADIVEEAKKVKPTVVVNAANVYLKHGGGVAGALNKATNNAMQVESDDYIATNGPLKVGGSCVLSGHNLAKHCLHVVGPNVNKGEDIQLLKSAYENFNQHEVLLAPLLSAGIFGADPIHSLRVCVDTVRTNVYLAVFDKNLYDKLVSSFLEMKSEKQVEQKIAEIPKEEVKPFITESKPSVEQRKQDDKKIKACVEEVTTTLEETKFLTENLLLYIDINGNLHPDSATLVSDIDITFLKKDAPYIVGDVVQEGVLTAVVIPTKKAGGTTEMLAKALRKVPTDNYITTYPGQGLNGYTVEEAKTVLKKCKSAFYILPSIISNEKQEILGTVSWNLREMLAHAEETRKLMPVCVETKAIVSTIQRKYKGIKIQEGVVDYGARFYFYTSKTTVASLINTLNDLNETLVTMPLGYVTHGLNLEEAARYMRSLKVPATVSVSSPDAVTAYNGYLTSSSKTPEEHFIETISLAGSYKDWSYSGQSTQLGIEFLKRGDKSVYYTSNPTTFHLDGEVITFDNLKTLLSLREVRTIKVFTTVDNINLHTQVVDMSMTYGQQFGPTYLDGADVTKIKPHNSHEGKTFYVLPNDDTLRVEAFEYYHTTDPSFLGRYMSALNHTKKWKYPQVNGLTSIKWADNNCYLATALLTLQQIELKFNPPALQDAYYRARAGEAANFCALILAYCNKTVGELGDVRETMSYLFQHANLDSCKRVLNVVCKTCGQQQTTLKGVEAVMYMGTLSYEQFKKGVQIPCTCGKQATKYLVQQESPFVMMSAPPAQYELKHGTFTCASEYTGNYQCGHYKHITSKETLYCIDGALLTKSSEYKGPITDVFYKENSYTTTIKPVTYKLDGVVCTEIDPKLDNYYKKDNSYFTEQPIDLVPNQPYPNASFDNFKFVCDNIKFADDLNQLTGYKKPASRELKVTFFPDLNGDVVAIDYKHYTPSFKKGAKLLHKPIVWHVNNATNKATYKPNTWCIRCLWSTKPVETSNSFDVLKSEDAQGMDNLACEDLKPVSEEVVENPTIQKDVLECNVKTTEVVGDIILKPANNSLKITEEVGHTDLMAAYVDNSSLTIKKPNELSRVLGLKTLATHGLAAVNSVPWDTIANYAKPFLNKVVSTTTNIVTRCLNRVCTNYMPYFFTLLLQLCTFTRSTNSRIKASMPTTIAKNTVKSVGKFCLEASFNYLKSPNFSKLINIIIWFLLLSVCLGSLIYSTAALGVLMSNLGMPSYCTGYREGYLNSTNVTIATYCTGSIPCSVCLSGLDSLDTYPSLETIQITISSFKWDLTAFGLVAEWFLAYILFTRFFYVLGLAAIMQLFFSYFAVHFISNSWLMWLIINLVQMAPISAMVRMYIFFASFYYVWKSYVHVVDGCNSSTCMMCYKRNRATRVECTTIVNGVRRSFYVYANGGKGFCKLHNWNCVNCDTFCAGSTFISDEVARDLSLQFKRPINPTDQSSYIVDSVTVKNGSIHLYFDKAGQKTYERHSLSHFVNLDNLRANNTKGSLPINVIVFDGKSKCEESSAKSASVYYSQLMCQPILLLDQALVSDVGDSAEVAVKMFDAYVNTFSSTFNVSMEKLKTLVATAEAELAKNVSLDNVLSTFISAARQGFVDSDVETKDVVECLKLSHQSDIEVTGDSCNNYMLTYNKVENMTPRDLGACIDCSARHINAQVAKSHNIALIWNVKDFMSLSEQLRKQIRSAAKKNNLPFKLTCATTRQVVNVVTTKIALKGG

SEQ ID NO: 16046 - protein, 1946 aa, Artificial Sequence
  SARS-CoV-2__MT791962.1__non-structural protein 3 (NSP3)
MAPTKVTFGDDTVIEVQGYKSVNITFELDERIDKVLNEKCSAYTVELGTEVNEFACVVADAVIKTLQPVSELLTPLGIDLDEWSMATYYLFDESGEFKLASHMYCSFYPPDEDEEEGDCEEEEFEPSTQYEYGTEDDYQGKPLEFGATSAALQPEEEQEEDWLDDDSQQTVGQQDGSEDNQTTTIQTIVEVQPQLEMELTPVVQTIEVNSFSGYLKLTDNVYIKNADIVEEAKKVKPTVVVNAANVYLKHGGGVAGALNKATNNAMQVESDDYIATNGPLKVGGSCVLSGHNLAEHCLHVVGPNVNKGEDIQLLKSAYENFNQHEVLLAPLLSAGIFGADPIHSLRVCVDTVRTNVYLAVFDKNLYDKLVSSFLEMKSEKQVEQKIAEIPKEEVKPFITESKPSVEQRKQDDKKIKACVEEVTTTLEETKFLTENLLLYIDINGNLHPDSATLVSDIDITFLKKDAPYIVGDVVQEGVLTAVVIPTKKAGGTTEMLAKALRKVPTDNYITTYPGQGLNGYTVEEAKTVLKKCKSAFYILPSIISNEKQEILGTVSWNLREMLAHAEETRKLMPVCVETKAIVSTIQRKYKGIKIQEGVVDYGARFYFYTSKTTVASLINTLNDLNETLVTMPLGYVTHGLNLEEAARYMRSLKVPATVSVSSPDAVTAYNGYLTSSSKTPEEHFIETISLAGSYKDWSYSGQSTQLGIEFLKRGDKSVYYTSNPTTFHLDGEVITFDNLKTLLSLREVRTIKVFTTVDNINLHTQVVDMSMTYGQQFGPTYLDGADVTKIKPHNSHEGKTFYVLPNDDTLRVEAFEYYHTTDPSFLGRYMSALNHTKKWKYPQVNGLTSIKWADNNCYLATALLTLQQIELKFNPPALQDAYYRARAGEAANFCALILAYCNKTVGELGDVRETMSYLFQHANLDSCKRVLNVVCKTCGQQQTTLKGVEAVMYMGTLSYEQFKKGVQIPCTCGKQATKYLVQQESPFVMMSAPPAQYELKHGTFTCASEYTGNYQCGHYKHITSKETLYCIDGALLTKSSEYKGPITDVFYKENSYTTTIKPVTYKLDGVVCTEIDPKLDNYYKKDNSYFTEQPIDLVPNQPYPNASFDNFKFVCDNIKFADDLNQLTGYKKPASRELKVTFFPDLNGDVVAIDYKHYTPSFKKGAKLLHKPIVWHVNNATNKATYKPNTWCIRCLWSTKPVETSNSFDVLKSEDAQGMDNLACEDLKPVSEEVVENPTIQKDVLECNVKTTEVVGDIILKPANNSLKITEEVGHTDLMAAYVDNSSLTIKKPNELSRVLGLKTLATHGLAAVNSVPWDTIANYAKPFLNKVVSTTTNIVTRCLNRVCTNYMPYFFTLLLQLCTFTRSTNSRIKASMPTTIAKNTVKSVGKFCLEASFNYLKSPNFSKLINIIIWFLLLSVCLGSLIYSTAALGVLMSNLGMPSYCTGYREGYLNSTNVTIATYCTGSIPCSVCLSGLDSLDTYPSLETIQITISSFKWDLTAFGLVAEWFLAYILFTRFFYVLGLAAIMQLFFSYFAVHFISNSWLMWLIINLVQMAPISAMVRMYIFFASFYYVWKSYVHVVDGCNSSTCMMCYKRNRATRVECTTIVNGVRRSFYVYANGGKGFCKLHNWNCVNCDTFCAGSTFISDEVARDLSLQFKRPINPTDQSSYIVDSVTVKNGSIHLYFDKAGQKTYERHSLSHFVNLDNLRANNTKGSLPINVIVFDGKSKCEESSAKSASVYYSQLMCQPILLLDQALVSDVGDSAEVAVKMFDAYVNTFSSTFNVPMEKLKTLVATAEAELAKNVSLDNVLSTFISAARQGFVDSDVETKDVVECLKLSHQSDIEVTGDSCNNYMLTYNKVENMTPRDLGACIDCSARHINAQVAKSHNIALIWNVKDFMSLSEQLRKQIRSAAKKNNLPFKLTCATTRQVVNVVTTKIALKGG

SEQ ID NO: 16047 - protein, 1946 aa, Artificial Sequence
  SARS-CoV-2__MT786438.1__non-structural protein 3 (NSP3)
MAPTKVTFGDDTVIEVQGYKSVNITFELDERIDKVLNEKCSAYTVELGTEVNEFACVVADAVIKTLQPVSELLTPLGIDLDEWSMATYYLFDESGEFKLASHMYCSFYPPDEDEEEGDCEEEEFEPSTQYEYGTEDDYQGKPLEFGATSAALQPEEEQEEDWLDDDSQQTVGQQDGSEDNQTTTIQTIVEVQPQLEMELTPVVQTIEVNSFSGYLKLTDNVYIKNADIVEEAKKVKPTVVVNAANVYLKHGGGVAGALNKATNNAMQVESDDYIATNGPLKVGGSCVLSGHNLAKHCLHVVGPNVNKGEDIQLLKSAYENFNQHEVLLAPLLSAGIFGADPIHSLRVCVDTVRTNVYLAVFDKNLYDKLVSSFLEMKSEKQVEQKIAEIPKEEVKPFITESKPSVEQRKQDDKKIKACVEEVTTTLEETKFLTENLLLYIDINGNLHPDSATLVSDIDITFLKKDAPYIVGDVVQEGVLTAVVIPTKKAGGTTEMLAKALRKVPTDNYITTYPGQGLNGYTVEEAKTVLKKCKSAFYILPSIISNEKQEILGTVSWNLREMLAHAEETRKLMPVCVETKAIVSTIQRKYKGIKIQEGVVDYGARFYFYTSKTTVASLINTLNDLNETLVTMPLGYVTHGLNLEEAARYMRSLKVPATVSVSSPDAVTAYNGYLTSSSKTPEEHFIETISLAGSYKDWSYSGQSTQLGIEFLKRGDKSVYYTSNPTTFHLDGEVITFDNLKTLLSLREVRTIKVFTTVDNINLHTQVVDMSMTYGQQFGPTYLDGADVTKIKPHNSHEGKTFYVLPNDDTLRVEAFEYYHTTDPSFLGRYMSALNHTKKWKYPQVNGLTSIKWAENNCYLATALLTLQQIELKFNPPALQDAYYRARAGEAANFCALILAYCNKTVGELGDVRETMSYLFQHANLDSCKRVLNVVCKTCGQQQTTLKGVEAVMYMGTLSYEQFKKGVQIPCTCGKQATKYLVQQESPFVMMSAPPAQYELKHGTFTCASEYTGNYQCGHYKHITSKETLYCIDGALLTKSSEYKGPITDVFYKENSYTTTIKPVTYKLDGVVCTEIDPKLDNYYKKDNSYFTEQPIDLVPNQPYPNASFDNFKFVCDNIKFADDLNQLTGYKKPASRELKVTFFPDLNGDVVAIDYKHYTPSFKKGAKLLHKPIVWHVNNATNKATYKPNTWCIRCLWSTKPVETSNSFDVLKSEDAQGMDNLACEDLKPVSEEVVENPTIQKDVLECNVKTTEVVGDIILKPANNSLKITEEVGHTDLMAAYVDNSSLTIKKPNELSRVLGLKTLATHGLAAVNSVPWDTIANYAKPFLNKVVSTTTNIVTRCLNRVCTNYMPYFFTLLLQLCTFTRSTNSRIKASMPTTIAKNTVKSVGKFCLEASFNYLKSPNFSKLINIIIWFLLLSVCLGSLIYSTAALGVLMSNLGMPSYCTGYREGYLNSTNVTIATYCTGSIPCSVCLSGLDSLDTYPSLETIQITISSFKWDLTAFGLVAEWFLAYILFTRFFYVLGLAAIMQLFFSYFAVHFISNSWLMWLIINLVQMAPISAMVRMYIFFASFYYVWKSYVHVVDGCNSSTCMMCYKRNRATRVECTTIVNGVRRSFYVYANGGKGFCKLHNWNCVNCDTFCAGSTFISDEVARDLSLQFKRPINPTDQSSYIVDSVTVKNGSIHLYFDKAGQKTYERHSLSHFVNLDNLRANNTKGSLPINVIVFDGKSKCEESSAKSASVYYSQLMCQPILLLDQALVSDVGDSAEVAVKMFDAYVNTFSSTFNVPMEKLKTLVATAEAELAKNVSLDNVLSTFISAARQGFVDSDVETKDVVECLKLSHQSDIEVTGDSCNNYMLTYNKVENMTPRDLGACIDCSARHINAQVAKSHNIALIWNVKDFMSLSEQLRKQIRSAAKKNNLPFKLTCATTRQVVNVVTTKIALKGG

SEQ ID NO: 16048 - protein, 1946 aa, Artificial Sequence
  SARS-CoV-2__MT786444.1__non-structural protein 3 (NSP3)
MAPTKVTFGDDTVIEVQGYKSVNITFELDERIDKVLNEKCSAYTVELGTEVNEFACVVADAVIKTLQPVSELLTPLGIDLDEWSMATYYLFDESGEFKLASHMYCSFYPPDEDEEEGDCEEEEFEPSTQYEYGTEDDYQGKPLEFGATSAALQPEEEQEEDWLDDDSQQTVGQQDGSEDNQTTTIQTIVEVQPQLEMELTPVVQTIEVNSFSGYLKLTDNVYIKNADIVEEAKKVKPTVVVNAANVYLKHGGGVAGALNKATNNAMQVESDDYIATNGPLKVGGSCVLSGHNLAKHCLHVVGPNVNKGEDIQLLKSAYENFNQHEVLLAPLLSAGIFGADPIHSLRVCVDTVRTNVYLAVFDKNLYDKLVSSFLEMKSEKQVEQKIAEIPKEEVKPFITESKPSVEQRKQDDKKIKACVEEVTTTLEETKFLTENLLLYIDINGNLHPDSATLVSDIDITFLKKDAPYIVGDVVQEGVLTAVVIPTKKAGGTTEMLAKALRKVPTDNYITTYPGQGLNGYTVEEAKTVLKKCKSAFYILPSIISNEKQEILGTVSWNLREMLAHAEETRKLMPVCVETKAIVSTIQRKYKGIKIQEGVVDYGARFYFYTSKTTVASLINTLNDLNETLVTMPLGYVTHGLNLEEAARYMRSLKVPATVSVSSPDAVTAYNGYLTSSSKTPEEHFIETISLAGSYKDWSYSGQSTQLGIEFLKRGDKSVYYTSNPTTFHLDGEVITFDNLKTLLSLREVRTIKVFTTVDNINLHTQVVDMSMTYGQQFGPTYLDGADVTKIKPHNSHEGKTFYVLPNDDTLRVEAFEYYHTTDPSFLGRYMSALNHTKKWKYPQVNGLTSIKWAENNCYLATALLTLQQIELKFNPPALQDAYYRARAGEAANFCALILAYCNKTVGELGDVRETMSYLFQHANLDSCKRVLNVVCKTCGQQQTTLKGVEAVMYMGTLSYEQFKKGVQIPCTCGKQATKYLVQQESPFVMMSAPPAQYELKHGTFTCASEYTGNYQCGHYKHITSKETLYCIDGALLTKSSEYKGPITDVFYKENSYTTTIKPVTYKLDGVVCTEIDPKLDNYYKKDNSYFTEQPIDLVPNQPYPNASFDNFKFVCDNIKFADDLNQLTGYKKPASRELKVTFFPDLNGDVVAIDYKHYTPSFKKGAKLLHKPIVWHVNNATNKATYKPNTWCIRCLWSTKPVETSNSFDVLKSEDAQGMDNLACEDLKPVSEEVVENPTIQKDVLECNVKTTEVVGDIILKPANNSLKITEEVGHTDLMAAYVDNFSLTIKKPNELSRVLGLKTLATHGLAAVNSVPWDTIANYAKPFLNKVVSTTTNIVTRCLNRVCTNYMPYFFTLLLQLCTFTRSTNSRIKASMPTTIAKNTVKSVGKFCLEASFNYLKSPNFSKLINIIIWFLLLSVCLGSLIYSTAALGVLMSNLGMPSYCTGYREGYLNSTNVTIATYCTGSIPCSVCLSGLDSLDTYPSLETIQITISSFKWDLTAFGLVAEWFLAYILFTRFFYVLGLAAIMQLFFSYFAVHFISNSWLMWLIINLVQMAPISAMVRMYIFFASFYYVWKSYVHVVDGCNSSTCMMCYKRNRATRVECTTIVNGVRRSFYVYANGGKGFCKLHNWNCVNCDTFCAGSTFISDEVARDLSLQFKRPINPTDQSSYIVDSVTVKNGSIHLYFDKAGQKTYERHSLSHFVNLDNLRANNTKGSLPINVIVFDGKSKCEESSAKSASVYYSQLMCQPILLLDQALVSDVGDSAEVAVKMFDAYVNTFSSTFNVPMEKLKTLVATAEAELAKNVSLDNVLSTFISAARQGFVDSDVETKDVVECLKLSHQSDIEVTGDSCNNYMLTYNKVENMTPRDLGACIDCSARHINAQVAKSHNIALIWNVKDFMSLSEQLRKQIRSAAKKNNLPFKLTCATTRQVVNVVTTKIALKGG

SEQ ID NO: 16049 - protein, 1946 aa, Artificial Sequence
  SARS-CoV-2__MT786809.1__non-structural protein 3 (NSP3)
MAPTKVTFGDDTVIEVQGYKSVNITFELDERIDKVLNEKCSAYTVELGTEVNEFACVVADAVIKTLQPVSELLTPLGIDLDEWSMATYYLFDESGEFKLASHMYCSFYPPDEDEEEGDCEEEEFEPSTQYEYGTEDDYQGKPLEFGAISAALQPEEEQEEDWLDDDSQQTVGQQDGSEDNQTTTIQTIVEVQPQLEMELTPVVQTIEVNSFSGYLKLTDNVYIKNADIVEEAKKVKPTVVVNAANVYLKHGGGVAGALNKATNNAMQVESDDYIATNGPLKVGGSCVLSGHNLAKHCLHVVGPNVNKGEDIQLLKSAYENFNQHEVLLAPLLSAGIFGADPIHSLRVCVDTVRTNVYLAVFDKNLYDKLVSSFLEMKSEKQVEQKIAEIPKEEVKPFITESKPSVEQRKQDDKKIKACVEEVTTTLEETKFLTENLLLYIDINGNLHPDSATLVSDIDITFLKKDAPYIVGDVVQEGVLTAVVIPTKKAGGTTEMLAKALRKVPTDNYITTYPGQGLNGYTVEEAKTVLKKCKSAFYILPSIISNEKQEILGTVSWNLREMLAHAEETRKLMPVCVETKAIVSTIQRKYKGIKIQEGVVDYGARFYFYTSKTTVASLINTLNDLNETLVTMPLGYVTHGLNLEEAARYMRSLKVPATVSVSSPDAVTAYNGYLTSSSKTPEEHFIETISLAGSYKDWSYSGQSTQLGIEFLKRGDKSVYYTSNPTTFHLDGEVITFDNLKTLLSLREVRTIKVFTTVDNINLHTQVVDMSMTYGQQFGPTYLDGADVTKIKPHNSHEGKTFYVLPNDDTLRVEAFEYYHTTDPSFLGRYMSALNHTKKWKYPQVNGLTSIKWADNNCYLATALLTLQQIELKFNPPALQDAYYRARAGEAANFCALILAYCNKTVGELGDVRETMSYLFQHANLDSCKRVLNVVCKTCGQQQTTLKGVEAVMYMGTLSYEQFKKGVQIPCTCGKQATKYLVQQESPFVMMSAPPAQYELKHGTFTCASEYTGNYQCGHYKHITSKETLYCIDGALLTKSSEYKGPITDVFYKENSYTTTIKPVTYKLDGVVCTEIDPKLDNYYKKDNSYFTEQPIDLVPNQPYPNASFDNFKFVCDNIKFADDLNQLTGYKKPASRELKVTFFPDLNGDVVAIDYKHYTPSFKKGAKLLHKPIVWHVNNATNKATYKPNTWCIRCLWSTKPVETSNSFDVLKSEDAQGMDNLACEDLKPVSEEVVENPTIQKDVLECNVKTTEVVGDIILKPANNSLKITEEVGHTDLMAAYVDNSSLTIKKPNELSRVLGLKTLATHGLAAVNSVPWDTIANYAKPFLNKVVSTTTNIVTRCLNRVCTNYMPYFFTLLLQLCTFTRSTNSRIKASMPTTIAKNTVKSVGKFCLEASFNYLKSPNFSKLINIIIWFLLLSVCLGSLIYSTAALGVLMSNLGMPSYCTGYREGYLNSTNVTIATYCTGSIPCSVCLSGLDSLDTYPSLETIQITISSFKWDLTAFGLVAEWFLAYILFTRFFYVLGLAAIMQLFFSYFAVHFISNSWLMWLIINLVQMAPISAMVRMYIFFASFYYVWKSYVHVVDGCNSSTCMMCYKRNRATRVECTTIVNGVRRSFYVYANGGKGFCKLHNWNCVNCDTFCAGSTFISDEVARDLSLQFKRPINPTDQSSYIVDSVTVKNGSIHLYFDKAGQKTYERHSLSHFVNLDNLRANNTKGSLPINVIVFDGKSKCEESSAKSASVYYSQLMCQPILLLDQALVSDVGDSAEVAVKMFDAYVNTFSSTFNVPMEKLKTLVATAEAELAKNVSLDNVLSTFISAARQGFVDSDVETKDVVECLKLSHQSDIEVTGDSCNNYMLTYNKVENMTPRDLGACIDCSARHINAQVAKSHNIALIWNVKDFMSLSEQLRKQIRSAAKKNNLPFKLTCATTRQVVNVVTTKIALKGG

SEQ ID NO: 16050 - protein, 1946 aa, Artificial Sequence
  SARS-CoV-2__MT786845.1__non-structural protein 3 (NSP3)
MAPTKVTFGDDTVIEVQGYKSVNITFELDERIDKVLNEKCSAYTVELGTEVNEFACVVADAVIKTLQPVSELLTPLGIDLDEWSMATYYLFDESGEFKLASHMYCSFYPPDEDEEEGDCEEEEFEPSTQYEYGTEDDYQGKPLEFGATSAALQPEEEQEEDWLDDDSQQTVGQQDGSEDNQTTTIQTIVEVQPQLEMELTPVVQTIEVNSFSGYLKLTDNVYIKNADIVEEAKKVKPTVVVNAANVYLKHGGGVAGALNKATNNAMQVESDDYIATNGPLKVGGSCVLSGHNLAKHCLHVVGPNVNKGEDIQLLKSAYENFNQHEVLLAPLLSAGIFGADPIHSLRVCVDTVRTNVYLAVFDKNLYDKLVSSFLEMKSEKQVEQKIAEIPKEEVKPFITESKPSVEQRKQDDKKIKACVEEVTTTLEETKFLTENLLLYIDINGNLHPDSATLVSDIDITFLKKDAPYIVGDVVQEGVLTAVVIPTKKAGGTTEMLAKALRKVPTDNYITTYPGQGLNGYTVEEAKTVLKKCKSAFYILPSIISNEKQEILGTVSWNLREMLAHAEETRKLMPVCVETKAIVSTIQRKYKGIKIQEGVVDYGARFYFYTSKTTVASLINTLNDLNETLVTMPLGYVTHGLNLEEAARYMRSLKVPATVSVSSPDAVTAYNGYLTSSSKTPEEHFIETISLAGSYKDWSYSGQSTQLGIEFLKRGDKSVYYTSNPTTFHLDGEVITFDNLKTLLSLREVRTIKVFTTVDNINLHTQVVDMSMTYGQQFGPTYLDGADVTKIKPHNSHEGKTFYVLPNDDTLRVEAFEYYHTTDPSFLGRYMSALNHTKKWKYPQVNGLTSIKWADNNCYLATALLTLQQIELKFNPPALQDAYYRARAGEAANFCALILAYCNKTVGELGDVRETMSYLFQHANLDSCKRVLNVVCKTCGQQQTTLKGVEAVMYMGTLSYEQFKKGVQILCTCGKQATKYLVQQESPFVMMSAPPAQYELKHGTFTCASEYTGNYQCGHYKHITSKETLYCIDGALLTKSSEYKGPITDVFYKENSYTTTIKPVTYKLDGVVCTEIDPKLDNYYKKDNSYFTEQPIDLVPNQPYPNASFDNFKFVCDNIKFADDLNQLTGYKKPASRELKVTFFPDLNGDVVAIDYKHYTPSFKKGAKLLHKPIVWHVNNATNKATYKPNTWCIRCLWSTKPVETSNSFDVLKSEDAQGMDNLACEDLKPVSEEVVENPTIQKDVLECNVKTTEVVGDIILKPANNSLKITEEVGHTDLMAAYVDNSSLTIKKPNELSRVLGLKTLATHGLAAVNSVPWDTIANYAKPFLNKVVSTTTNIVTRCLNRVCTNYMPYFFTLLLQLCTFTRSTNSRIKASMPTTIAKNTVKSVGKFCLEASFNYLKSPNFSKLINIIIWFLLLSVCLGSLIYSTAALGVLMSNLGMPSYCTGYREGYLNSTNVTIATYCTGSIPCSVCLSGLDSLDTYPSLETIQITISSFKWDLTAFGLVAEWFLAYILFTRFFYVLGLAAIMQLFFSYFAVHFISNSWLMWLIINLVQMAPISAMVRMYIFFASFYYVWKSYVHVVDGCNSSTCMMCYKRNRATRVECTTIVNGVRRSFYVYANGGKGFCKLHNWNCVNCDTFCAGSTFISDEVARDLSLQFKRPINPTDQSSYIVDSVTVKNGSIHLYFDKAGQKTYERHSLSHFVNLDNLRANNTKGSLPINVIVFDGKSKCEESSAKSASVYYSQLMCQPILLLDQALVSDVGDSAEVAVKMFDAYVNTFSSTFNVPMEKLKTLVATAEAELAKNVSLDNVLSTFISAARQGFVDSDVETKDVVECLKLSHQSDIEVTGDSCNNYMLTYNKVENMTPRDLGACIDCSARHINAQVAKSHNIALIWNVKDFMSLSEQLRKQIRSAAKKNNLPFKLTCATTRQVVNVVTTKIALKGG

SEQ ID NO: 16051 - protein, 1946 aa, Artificial Sequence
  SARS-CoV-2__MT787503.1__non-structural protein 3 (NSP3)
MAPTKVTFGDDTVIEVQGYKSVNITFELDERIDKVLNEKCSAYTVELGTEVNEFACVVADAVIKTLQPVSELLTPLGIDLDEWSMATYYLFDESGEFKLASHMYCSFYPPDEDEEEGDCEEEEFEPSTQYEYGTEDDYQGKPLEFGATSAALQPEEEQEEDWLDDDSQQTVGQQDGSEDNQTTTIQTIVEVQPQLEMELTPVVQTIEVNSFSGYLKLTDNVYIKNADIVEEAKKVKPTVVVNAANVYLKHGGGVAGALNKATNNAMQVESDDYIATNGPLKVGGSCVLSGHNLAKHCLHVVGPNVNKGEDIQLLKSAYENFNQHEVLLAPLLSAGIFGADPIHSLRVCVDTVRTNVYLAVFDKNLYDKLVSSFLEMKSEKQVEQKIAEIPKEEVKPFITESKPSVEQRKQDDKKIKACVEEVTTTLEETKFLTENLLLYIDINGNLHPDSATLVSDIDITFLKKDAPYIVGDVVQEGVLTAVVIPTKKAGGTTEMLAKALRKVPTDNYITTYPGQGLNGYTVEEAKTVLKKCKSAFYILPSIISNEKQEILGTVSWNLREMLAHAEETRKLMPVCVETKAIVSTIQRKYKGIKIQEGVVDYGARFYFYTSKTTVASLINTLNDLNETLVTMPLGYVTHGLNLEEAARYMRSLKVPATVSVSSPDAVTAYNGYLTSSSKTPEEHFIETISLAGSYKDWSYSGQSTQLGIEFLKRGDKSVYYTSNPTTFHLDGEVITFDNLKTLLSLREVRTIKVFTTVDNINLHTQVMDMSMTYGQQFGPTYLDGADVTKIKPHNSHEGKTFYVLPNDDTLRVEAFEYYHTTDPSFLGRYMSALNHTKKWKYPQVNGLTSIKWADNNCYLATALLTLQQIELKFNPPALQDAYYRARAGEAANFCALILAYCNKTVGELGDVRETMSYLFQHANLDSCKRVLNVVCKTCGQQQTTLKGVEAVMYMGTLSYEQFKKGVQIPCTCGKQATKYLVQQESPFVMMSAPPAQYELKHGTFTCASEYTGNYQCGHYKHITSKETLYCIDGALLTKSSEYKGPITDVFYKENSYTTTIKPVTYKLDGVVCTEIDPKLDNYYKKDNSYFTEQPIDLVPNQPYPNASFDNFKFVCDNIKFADDLNQLTGYKKPASRELKVTFFPDLNGDVVAIDYKHYTPSFKKGAKLLHKPIVWHVNNATNKATYKPNTWCIRCLWSTKPVETSNSFDVLKSEDAQGMDNLACEDLKPVSEEVVENPTIQKDVLECNVKTTEVVGDIILKPANNSLKITEEVGHTDLMAAYVDNSSLTIKKPNELSRVLGLKTLATHGLAAVNSVPWDTIANYAKPFLNKVVSTTTNIVTRCLNRVCTNYMPYFFTLLLQLCTFTRSTNSRIKASMPTTIAKNTVKSVGKFCLEASFNYLKSPNFSKLINIIIWFLLLSVCLGSLIYSTAALGVLMSNLGMPSYCTGYREGYLNSTNVTIATYCTGSIPCSVCLSGLDSLDTYPSLETIQITISSFKWDLTAFGLVAEWFLAYILFTRFFYVLGLAAIMQLFFSYFAVHFISNSWLMWLIINLVQMAPISAMVRMYIFFASFYYVWKSYVHVVDGCNSSTCMMCYKRNRATRVECTTIVNGVRRSFYVYANGGKGFCKLHNWNCVNCDTFCAGSTFISDEVARDLSLQFKRPINPTDQSSYIVDSVTVKNGSIHLYFDKAGQKTYERHSLSHFVNLDNLRANNTKGSLPINVIVFDGKSKCEESSAKSASVYYSQLMCQPILLLDQALVSDVGDSAEVAVKMFDAYVNTFSSTFNVPMEKLKTLVATAEAELAKNVSLDNVLSTFISAARQGFVDSDVETKDVVECLKLSHQSDIEVTGDSCNNYMLTYNKVENMTPRDLGACIDCSARHINAQVAKSHNIALIWNVKDFMSLSEQLRKQIRSAAKKNNLPFKLTCATTRQVVNVVTTKIALKGG

SEQ ID NO: 16052 - protein, 1946 aa, Artificial Sequence
  SARS-CoV-2__MT781415.1__non-structural protein 3 (NSP3)
MAPTKVTFGDDTVIEVQGYKSVNITFELDERIDKVLNEKCSAYTVELGTEVNEFACVVADAVIKTLQPVSELLTPLGIDLDEWSMATYYLFDESGEFKLASHMYCSFYPPDEDEEEGDCEEEEFEPSTQYEYGTEDDYQGKPLEFGATSAALQPEEEQEEDWLDDDSQQTVGQQDGSEDNQTTTIQTIVEVQPQLEMELTPVVQTIEVNSFSGYLKLTDNVYIKNADIVEEAKKVKPTVVVNAANVYLKHGGGVAGALNKATNNAMQVESDDYIATNGPLKVGGSCVLSGHNLAKHCLHVVGPNVNKGEDIQLLKSAYENFNQHEVLLAPLLSAGIFGADPIHSLRVCVDTVRTNVYLAVFDKNLYDKLVSSFLEMKSEKQVEQKIAEIPKEEVKPFITESKPSVEQRKQDDKKIKACVEEVTTTLEETKFLTENLLLYIDINGNLHPDSATLVSDIDITFLKKDAPYIVGDVVQEGVLTAVVIPTKKAGGTTEMLAKALRKVPTDNYITTYPGQGLNGYTVEEAKTVLKKCKSAFYILPSIISNEKQEILGTVSWNFREMLAHAEETRKLMPVCVETKAIVSTIQRKYKGIKIQEGVVDYGARFYFYTSKTTVASLINTLNDLNETLVTMPLGYVTHGLNLEEAARYMRSLKVPATVSVSSPDAVTAYNGYLTSSSKTPEEHFIETISLAGSYKDWSYSGQSTQLGIEFLKRGDKSVYYTSNPTTFHLDGEVITFDNLKTLLSLREVRTIKVFTTVDNINLHTQVVDMSMTYGQQFGPTYLDGADVTKIKPHNSHEGKTFYVLPNDDTLRVEAFEYYHTTDPSFLGRYMSALNHTKKWKYPQVNGLTSIKWADNNCYLATALLTLQQIELKFNPPALQDAYYRARAGEAANFCALILAYCNKTVGELGDVRETMSYLFQHANLDSCKRVLNVVCKTCGQQQTTLKGVEAVMYMGTLSYEQFKKGVQIPCTCGKQATKYLVQQESPFVMMSAPPAQYELKHGTFTCASEYTGNYQCGHYKHITSKETLYCIDGALLTKSSEYKGPITDVFYKENSYTTTIKPVTYKLDGVVCTEIDPKLDNYYKKDNSYFTEQPIDLVPNQPYPNASFDNFKFVCDNIKFADDLNQLTGYKKPASRELKVTFFPDLNGDVVAIDYKHYTPSFKKGAKLLHKPIVWHVNNATNKATYKPNTWCIRCLWSTKPVETSNSFDVLKSEDAQGMDNLACEDLKPVSEEVVENPTIQKDVLECNVKTTEVVGDIILKPANNSLKITEEVGHTDLMAAYVDNSSLTIKKPNELSRVLGLKTLATHGLAAVNSVPWDTIANYAKPFLNKVVSTTTNIVTRCLNRVCTNYMPYFFTLLLQLCTFTRSTNSRIKASMPTTIAKNTVKSVGKFCLEASFNYLKSPNFSKLINIIIWFLLLSVCLGSLIYSTAALGVLMSNLGMPSYCTGYREGYLNSTNVTIATYCTGSIPCSVCLSGLDSLDTYPSLETIQITISSFKWDLTAFGLVAEWFLAYILFTRFFYVLGLAAIMQLFFSYFAVHFISNSWLMWLIINLVQMAPISAMVRMYIFFASFYYVWKSYVHVVDGCNSSTCMMCYKRNRATRVECTTIVNGVRRSFYVYANGGKGFCKLHNWNCVNCDTFCAGSTFISDEVARDLSLQFKRPINPTDQSSYIVDSVTVKNGSIHLYFDKAGQKTYERHSLSHFVNLDNLRANNTKGSLPINVIVFDGKSKCEESSAKSASVYYSQLMCQPILLLDQALVSDVGDSAEVAVKMFDAYVNTFSSTFNVPMEKLKTLVATAEAELAKNVSLDNVLSTFISAARQGFVDSDVETKDVVECLKLSHQSDIEVTGDSCNNYMLTYNKVENMTPRDLGACIDCSARHINAQVAKSHNIALIWNVKDFMSLSEQLRKQIRSAAKKNNLPFKLTCATTRQVVNVVTTKIALKGG

SEQ ID NO: 16053 - protein, 1946 aa, Artificial Sequence
  SARS-CoV-2__MT782381.1__non-structural protein 3 (NSP3)
MAPTKVTFGDDTVIEVQGYKSVNITFELDERIDKVLNEKCSAYTVELGTEVNEFACVVADAVIKTLQPVSELLTSLGIDLDEWSMATYYLFDESGEFKLASHMYCSFYPPDEDEEEGDCEEEEFEPSTQYEYGTEDDYQGKPLEFGATSAALQPEEEQEEDWLDDDSQQTVGQQDGSEDNQTTTIQTIVEVQPQLEMELTPVVQTIEVNSFSGYLKLTDNVYIKNADIVEEAKKVKPTVVVNAANVYLKHGGGVAGALNKATNNAMQVESDDYIATNGPLKVGGSCVLSGHNLAKHCLHVVGPNVNKGEDIQLLKSAYENFNQHEVLLAPLLSAGIFGADPIHSLRVCVDTVRTNVYLAVFDKNLYDKLVSSFLEMKSEKQVEQKIAEIPKEEVKPFITESKPSVEQRKQDDKKIKACVEEVTTTLEETKFLTENLLLYIDINGNLHPDSATLVSDIDITFLKKDAPYIVGDVVQEGVLTAVVIPTKKAGGTTEMLAKALRKVPTDNYITTYPGQGLNGYTVEEAKTVLKKCKSAFYILPSIISNEKQEILGTVSWNLREMLAHAEETRKLMPVCVETKAIVSTIQRKYKGIKIQEGVVDYGARFYFYTSKTTVASLINTLNDLNETLVTMPLGYVTHGLNLEEAARYMRSLKVPATVSVSSPDAVTAYNGYLTSSSKTPEEHFIETISLAGSYKDWSYSGQSTQLGIEFLKRGDKSVYYTSNPTTFHLDGEVITFDNLKTLLSLREVRTIKVFTTVDNINLHTQVVDMSMTYGQQFGPTYLDGADVTKIKPHNSHEGKTFYVLPNDDTLRVEAFEYYHTTDPSFLGRYMSALNHTKKWKYPQVNGLTSIKWADNNCYLATALLTLQQIELKFNPPALQDAYYRARAGEAANFCALILAYCNKTVGELGDVRETMSYLFQHANLDSCKRVLNVVCKTCGQQQTTLKGVEAVMYMGTLSYEQFKKGVQIPCTCGKQATKYLVQQESPFVMMSAPPAQYELKHGTFTCASEYTGNYQCGHYKHITSKETLYCIDGALLTKSSEYKGPITDVFYKENSYTTTIKPVTYKLDGVVCTEIDPKLDNYYKKDNSYFTEQPIDLVPNQPYPNASFDNFKFVCDNIKFADDLNQLTGYKKPASRELKVTFFPDLNGDVVAIDYKHYTPSFKKGAKLLHKPIVWHVNNATNKATYKPNTWCIRCLWSTKPVETSNSFDVLKSEDAQGMDNLACEDLKPVSEEVVENPTIQKDVLECNVKTTEVVGDIILKPANNSLKITEEVGHTDLMAAYVDNSSLTIKKPNELSRVLGLKTLATHGLAAVNSVPWDTIANYAKPFLNKVVSTTTNIVTRCLNRVCTNYMPYFFTLLLQLCTFTRSTNSRIKASMPTTIAKNTVKSVGKFCLEASFNYLKSPNFSKLINIIIWFLLLSVCLGSLIYSTAALGVLMSNLGMPSYCTGYREGYLNSTNVTIATYCTGSIPCSVCLSGLDSLDTYPSLETIQITISSFKWDLTAFGLVAEWFLAYILFTRFFYVLGLAAIMQLFFSYFAVHFISNSWLMWLIINLVQMAPISAMVRMYIFFASFYYVWKSYVHVVDGCNSSTCMMCYKRNRATRVECTTIVNGVRRSFYVYANGGKGFCKLHNWNCVNCDTFCAGSTFISDEVARDLSLQFKRPINPTDQSSYIVDSVTVKNGSIHLYFDKAGQKTYERHSLSHFVNLDNLRANNTKGSLPINVIVFDGKSKCEESSAKSASVYYSQLMCQPILLLDQALVSDVGDSAEVAVKMFDAYVNTFSSTFNVPMEKLKTLVATAEAELAKNVSLDNVLSTFISAARQGFVDSDVETKDVVECLKLSHQSDIEVTGDSCNNYMLTYNKVENMTPRDLGACIDCSARHINAQVAKSHNIALIWNVKDFMSLSEQLRKQIRSAAKKNNLPFKLTCATTRQVVNVVTTKIALKGG

SEQ ID NO: 16054 - protein, 1946 aa, Artificial Sequence
  SARS-CoV-2__MT786334.1__non-structural protein 3 (NSP3)
MAPTKVTFGDDTVIEVQGYKSVNITFELDERIDKVLNEKCSAYTVELGTEVNEFACVVADAVIKTLQPVSELLTPLGIDLDEWSMATYYLFDESGEFKLASHMYCSFYPPDEDEEEGDCEEEEFEPSTQYEYGTEDDYQGKPLEFGATSAALQPEEEQEEDWLDDDSQQTVGQQDGSEDNQTTTIQTIVEVQPQLEMELTPVVQTIEVNSFSGYLKLTDNVYIKNADIVEEAKKVKPTVVVNAANVYLKHGGGVAGALNKATNNAMQVESDDYIATNGPLKVGGSCVLSGHNLAKHCLHVVGPNVNKGEDIQLLKSAYENFNQHEVLLAPLLSAGIFGADPIHSLRVCVDTVRTNVYLAVFDKNLYDKLVSSFLEMKSEKQVEQKIAEIPKEEVKPFITESKPSVEQRKQDDKKIKACVEEVTTTLEETKFLTENLLLYIDINGNLHPDSATLVSDIDITFLKKDAPYIVGDVVQEGVLTAVVIPTKKAGGTTEMLAKALRKVPTDNYITTYPGQGLNGYTVEEAKTVLKKCKSAFYILPSIISNEKQEILGTVSWNLREMLAHAEETRKLMPVCVETKAIVSTIQRKYKGIKIQEGVVDYGARFYFYTSKTTVASLINTLNDLNETLVTMPLGYVTHGLNLEEAARYMRSLKVPATVSVSSPDAVTAYNGYLTSSSKTPEEHFIETISLAGSYKDWSYSGQSTQLGIEFLKRGDKSVYYTSNPTTFHLDGEVITFDNLKTLLSLREVRTIKVFTTVDNINLHTQVVDMSMTYGQQFGPTYLDGADVTKIKPHNSHEGKTFYVLPNDDTLRVEAFEYYHTTDPSFLGRYMSALNHTKKWKYPQVNGLTSIKWADNNCYLATALLTLQQIELKFNPPALQDAYYRARAGEAANFCALILAYCNKTVGELGDVRETMSYLFQHANLDSCKRVLNVVCKTCGQQQTTLKGVEAVMYMGTLSYEQFKKGVQIPCTCGKQATKYLVQQESPFVMMSAPPAQYELKHGTFTCASEYTGNYQCGHYKHITSKETLYCIDGALLTKSSEYKGPITDVFYKENSYTTTIKPVTYKLDGVVCTEIDPKLDNYYKKDNSYFTEQPIDLVPNQPYPNASFDNFKFVCDNIKFADDLNQLTGYKKPASRELKVTFFPDLNGDVVAIDYKHYTPSFKKGAKLLHKPIVWHVNNATNKATYKPNTWCIRCLWSTKSVETSNSFDVLKSEDAQGMDNLACEDLKPVSEEVVENPTIQKDVLECNVKTTEVVGDIILKPANNSLKITEEVGHTDLMAAYVDNSSLTIKKPNELSRVLGLKTLATHGLAAVNSVPWDTIANYAKPFLNKVVSTTTNIVTRCLNRVCTNYMPYFFTLLLQLCTFTRSTNSRIKASMPTTIAKNTVKSVGKFCLEASFNYLKSPNFSKLINIIIWFLLLSVCLGSLIYSTAALGVLMSNLGMPSYCTGYREGYLNSTNVTIATYCTGSIPCSVCLSGLDSLDTYPSLETIQITISSFKWDLTAFGLVAEWFLAYILFTRFFYVLGLAAIMQLFFSYFAVHFISNSWLMWLIINLVQMAPISAMVRMYIFFASFYYVWKSYVHVVDGCNSSTCMMCYKRNRATRVECTTIVNGVRRSFYVYANGGKGFCKLHNWNCVNCDTFCAGSTFISDEVARDLSLQFKRPINPTDQSSYIVDSVTVKNGSIHLYFDKAGQKTYERHSLSHFVNLDNLRANNTKGSLPINVIVFDGKSKCEESSAKSASVYYSQLMCQPILLLDQALVSDVGDSAEVAVKMFDAYVNTFSSTFNVPMEKLKTLVATAEAELAKNVSLDNVLSTFISAARQGFVDSDVETKDVVECLKLSHQSDIEVTGDSCNNYMLTYNKVENMTPRDLGACIDCSARHINAQVAKSHNIALIWNVKDFMSLSEQLRKQIRSAAKKNNLPFKLTCATTRQVVNVVTTKIALKGG

SEQ ID NO: 16055 - protein, 1946 aa, Artificial Sequence
  SARS-CoV-2__MT775826.1__non-structural protein 3 (NSP3)
MAPTKVTFGDDTVIEVQGYKSVNITFELDERIDKVLNEKCSAYTVELGTEVNEFACVVADAVIKTLQPVSELLTPLGIDLDEWSMATYYLFDESGEFKLASHMYCSFYPPDEDEEEGDCEEEEFEPSTQYEYGTEDDYQGKPLEFGATSAALQPEEEQEEDWLDDDSQQTVGQQDGSEDNQTTTIQTIVEVQPQLEMELTPVVQTIEVNSFSGYLKLTDNVYIKNADIVEEAKKVKPTVVVNAANVYLKHGGGVAGALNKATNNAMQVESDDYIATNGPLKVGGSCVLSGYNLAKHCLHVVGPNVNKGEDIQLLKSAYENFNQHEVLLAPLLSAGIFGADPIHSLRVCVDTVRTNVYLAVFDKNLYDKLVSSFLEMKSEKQVEQKIAEIPKEEVKPFITESKPSVEQRKQDDKKIKACVEEVTTTLEETKFLTENLLLYIDINGNLHPDSATLVSDIDITFLKKDAPYIVGDVVQEGVLTAVVIPTKKAGGTTEMLAKALRKVPTDNYITTYPGQGLNGYTVEEAKTVLKKCKSAFYILPSIISNEKQEILGTVSWNLREMLAHAEETRKLMPVCVETKAIVSTIQRKYKGIKIQEGVVDYGARFYFYTSKTTVASLINTLNDLNETLVTMPLGYVTHGLNLEEAARYMRSLKVPATVSVSSPDAVTAYNGYLTSSSKTPEEHFIETISLAGSYKDWSYSGQSTQLGIEFLKRGDKSVYYTSNPTTFHLDGEVITFDNLKTLLSLREVRTIKVFTTVDNINLHTQVVDMSMTYGQQFGPTYLDGADVTKIKPHNSHEGKTFYVLPNDDTLRVEAFEYYHTTDPSFLGRYMSALNHTKKWKYPQVNGLTSIKWADNNCYLATALLTLQQIELKFNPPALQDAYYRARAGEAANFCALILAYCNKTVGELGDVRETMSYLFQHANLDSCKRVLNVVCKTCGQQQTTLKGVEAVMYMGTLSYEQFKKGVQIPCTCGKQATKYLVQQESPFVMMSAPPAQYELKHGTFTCASEYTGNYQCGHYKHITSKETLYCIDGALLTKSSEYKGPITDVFYKENSYTTTIKPVTYKLDGVVCTEIDPKLDNYYKKDNSYFTEQPIDLVPNQPYPNASFDNFKFVCDNIKFADDLNQLTGYKKPASRELKVTFFPDLNGDVVAIDYKHYTPSFKKGAKLLHKPIVWHVNNATNKATYKPNTWCIRCLWSTKPVETSNSFDVLKSEDAQGMDNLACEDLKPVSEEVVENPTIQKDVLECNVKTTEVVGDIILKPANNSLKITEEVGHTDLMAAYVDNSSLTIKKPNELSRVLGLKTLATHGLAAVNSVPWDTIANYAKPFLNKVVSTTTNIVTRCLNRVCTNYMPYFFTLLLQLCTFTRSTNSRIKASMPTTIAKNTVKSVGKFCLEASFNYLKSPNFSKLINIIIWFLLLSVCLGSLIYSTAALGVLMSNLGMPSYCTGYREGYLNSTNVTIATYCTGSIPCSVCLSGLDSLDTYPSLETIQITISSFKWDLTAFGLVAEWFLAYILFTRFFYVLGLAAIMQLFFSYFAVHFISNSWLMWLIINLVQMAPISAMVRMYIFFASFYYVWKSYVHVVDGCNSSTCMMCYKRNRATRVECTTIVNGVRRSFYVYANGGKGFCKLHNWNCVNCDTFCAGSTFISDEVARDLSLQFKRPINPTDQSSYIVDSVTVKNGSIHLYFDKAGQKTYERHSLSHFVNLDNLRANNTKGSLPINVIVFDGKSKCEESSAKSASVYYSQLMCQPILLLDQALVSDVGDSAEVAVKMFDAYVNTFSSTFNVPMEKLKTLVATAEAELAKNVSLDNVLSTFISAARQGFVDSDVETKDVVECLKLSHQSDIEVTGDSCNNYMLTYNKVENMTPRDLGACIDCSARHINAQVAKSHNIALIWNVKDFMSLSEQLRKQIRSAAKKNNLPFKLTCATTRQVVNVVTTKIALKGG

SEQ ID NO: 16056 - protein, 1946 aa, Artificial Sequence
  SARS-CoV-2__MT775832.1__non-structural protein 3 (NSP3)
MAPTKVTFGDDTVIEVQGYKSVNITFELDERIDKVLNEKCSAYTVELGTEVNEFACVVADAVIKTLQPVSELLTPLGIDLDEWSMATYYLFDESGEFKLASHMYCSFYPPDEDEEEGDCEEEEFEPSTQYEYGTEDDYQGKPLEFGATSAALQPEEEQEEDWLDDDSQQTVGQQDGSEDNQTTTIQTIVEVQPQLEMELTPVVQTIEVNSFSGYLKLTDNVYIKNADIVEEAKKVKPTVVVNAANVYLKHGGGVAGALNKATNNAMQVESDDYIATNGPLKVGGSCVLSGHNLAKHCLHVVGPNVNKGEDIQLLKSAYENFNQHEVLLAPLLSAGIFGADPIHSLRVCVDTVRTNVYLAVFDKNLYDKLVSSFLEMKSEKQVEQKIAEIPKEEVKPFITESKPSVEQRKQDDKKIKACVEEVTTTLEETKFLTENLLLYIDINGNLHPDSATLVSDIDITFLKKDAPYIVGDVVQEGVLTAVVIPTKKAGGTTEMLAKALRKVPTDNYITTYPGQGLNGYTVEEAKTVLKKCKSAFYILPSIISNEKQEILGTVSWNLREMLAHAEETRKLMPVCVETKAIVSTIQRKYKGIKIQEGVVDYGARFYFYTSKTTVASLINTLNDLNETLVTMPLGYVTHGLNLEEAARYMRSLKVPATVSVSSPDAVTAYNGYLTSSSKTPEEHFIETISLAGSYKDWSYSGQSTQLGIEFLKRGDKSVYYTSNPTTFHLDGEVITFDNLKTLLSLREVRTIKVFTTVDNINLHTQVVDMSMTYGQQFGPTYLDGADVTKIKPHNSHEGKTFYVLPNDDTLRVEAFEYYHTTDPSFLGRYMSALNHTKKWKYPQVNGLTSIKWADNNCYLATALLTLQQIELKFNPPALQDAYYRARAGEAANFCALILAYCNKTVGELGDVRETMSYLFQHANLDSCKRVLNVVCKTCGQQQTTLKGVEAVMYMGTLSYEQFKKGVQIPCTCGKQATKYLVQQESPFVMMSAPPAQYELKHGTFTCASEYTGNYQCGHYKHITSKETLYCIDGALLTKSSEYKGPITDVFYKENSYTTTIKPVTYKLDGVVCTEIDPKLDNYYKKDNSYFTEQPIDLVPNQPYPNASFDNFKFVCDNIKFADDLNQLTGYKKPASRELKVTFFPDLNGDVVAIDYKHYTPSFKKGAKLLHKPIVWHVNNATNKATYKPNTWCIRCLWSTKPVETSNSFDVLKSEDVQGMDNLACEDLKPVSEEVVENPTIQKDVLECNVKTTEVVGDIILKPANNSLKITEEVGHTDLMAAYVDNSSLTIKKPNELSRVLGLKTLATHGLAAVNSVPWDTIANYAKPFLNKVVSTTTNIVTRCLNRVCTNYMPYFFTLLLQLCTFTRSTNSRIKASMPTTIAKNTVKSVGKFCLEASFNYLKSPNFSKLINIIIWFLLLSVCLGSLIYSTAALGVLMSNLGMPSYCTGYREGYLNSTNVTIATYCTGSIPCSVCLSGLDSLDTYPSLETIQITISSFKWDLTAFGLVAEWFLAYILFTRFFYVLGLAAIMQLFFSYFAVHFISNSWLMWLIINLVQMAPISAMVRMYIFFASFYYVWKSYVHVVDGCNSSTCMMCYKRNRATRVECTTIVNGVRRSFYVYANGGKGFCKLHNWNCVNCDTFCAGSTFISDEVARDLSLQFKRPINPTDQSSYIVDSVTVKNGSIHLYFDKAGQKTYERHSLSHFVNLDNLRANNTKGSLPINVIVFDGKSKCEESSAKSASVYYSQLMCQPILLLDQALVSDVGDSAEVAVKMFDAYVNTFSSTFNVPMEKLKTLVATAEAELAKNVSLDNVLSTFISAARQGFVDSDVETKDVVECLKLSHQSDIEVTGDSCNNYMLTYNKVENMTPRDLGACIDCSARHINAQVAKSHNIALIWNVKDFMSLSEQLRKQIRSAAKKNNLPFKLTCATTRQVVNVVTTKIALKGG

SEQ ID NO: 16057 - protein, 1946 aa, Artificial Sequence
  SARS-CoV-2__MT776407.1__non-structural protein 3 (NSP3)
MAPTKVTFGDDTVIEVQGYKSVNITFELDERIDKVLNEKCSAYTVELGTEVNEFACVVADAVIKTLQPVSELLTPLGIDLDEWSMATYYLFDESGEFKLASHMYCSFYPPDEDEEEGDCEEEEFEPSTQYEYGTEDDYQGKPLEFGATSAALQLEEEQEEDWLDDDSQQTVGQQDGSEDNQTTTIQTIVEVQPQLEMELTPVVQTIEVNSFSGYLKLTDNVYIKNADIVEEAKKVKPTVVVNAANVYLKHGGGVAGALNKATNNAMQVESDDYIATNGPLKVGGSCVLSGHNLAKHCLHVVGPNVNKGEDIQLLKSAYENFNQHEVLLAPLLSAGIFGADPIHSLRVCVDTVRTNVYLAVFDKNLYDKLVSSFLEMKSEKQVEQKIAEIPKEEVKPFITESKPSVEQRKQDDKKIKACVEEVTTTLEETKFLTENLLLYIDINGNLHPDSATLVSDIDITFLKKDAPYIVGDVVQEGVLTAVVIPTKKAGGTTEMLAKALRKVPTDNYITTYPGQGLNGYTVEEAKTVLKKCKSAFYILPSIISNEKQEILGTVSWNLREMLAHAEETRKLMPVCVETKAIVSTIQRKYKGIKIQEGVVDYGARFYFYTSKTTVASLINTLNDLNETLVTMPLGYVTHGLNLEEAARYMRSLKVPATVSVSSPDAVTAYNGYLTSSSKTPEEHFIETISLAGSYKDWSYSGQSTQLGIEFLKRGDKSVYYTSNPTTFHLDGEVITFDNLKTLLSLREVRTIKVFTTVDNINLHTQVVDMSMTYGQQFGPTYLDGADVTKIKPHNSHEGKTFYVLPNDDTLRVEAFEYYHTTDPSFLGRYMSALNHTKKWKYPQVNGLTSIKWADNNCYLATALLTLQQIELKFNPPALQDAYYRARAGEAANFCALILAYCNKTVGELGDVRETMSYLFQHANLDSCKRVLNVVCKTCGQQQTTLKGVEAVMYMGTLSYEQFKKGVQIPCTCGKQATKYLVQQESPFVMMSAPPAQYELKHGTFTCASEYTGNYQCGHYKHITSKETLYCIDGALLTKSSEYKGPITDVFYKENSYTTTIKPVTYKLDGVVCTEIDPKLDNYYKKDNSYFTEQPIDLVPNQPYPNASFDNFKFVCDNIKFADDLNQLTGYKKPASRELKVTFFPDLNGDVVAIDYKHYTPSFKKGAKLLHKPIVWHVNNATNKATYKPNTWCIRCLWSTKPVETSNSFDVLKSEDAQGMDNLACEDLKPVSEEVVENPTIQKDVLECNVKTTEVVGDIILKPANNSLKITEEVGHTDLMAAYVDNSSLIIKKPNELSRVLGLKTLATHGLAAVNSVPWDTIANYAKPFLNKVVSTTTNIVTRCLNRVCTNYMPYFFTLLLQLCTFTRSTNSRIKASMPTTIAKNTVKSVGKFCLEASFNYLKSPNFSKLINIIIWFLLLSVCLGSLIYSTAALGVLMSNLGMPSYCTGYREGYLNSTNVTIATYCTGSIPCSVCLSGLDSLDTYPSLETIQITISSFKWDLTAFGLVAEWFLAYILFTRFFYVLGLAAIMQLFFSYFAVHFISNSWLMWLIINLVQMAPISAMVRMYIFFASFYYVWKSYVHVVDGCNSSTCMMCYKRNRATRVECTTIVNGVRRSFYVYANGGKGFCKLHNWNCVNCDTFCAGSTFISDEVARDLSLQFKRPINPTDQSSYIVDSVTVKNGSIHLYFDKAGQKTYERHSLSHFVNLDNLRANNTKGSLPINVIVFDGKSKCEESSAKSASVYYSQLMCQPILLLDQALVSDVGDSAEVAVKMFDAYVNTFSSTFNVPMEKLKTLVATAEAELAKNVSLDNVLSTFISAARQGFVDSDVETKDVVECLKLSHQSDIEVTGDSCNNYMLTYNKVENMTPRDLGACIDCSARHINAQVAKSHNIALIWNVKDFMSLSEQLRKQIRSAAKKNNLPFKLTCATTRQVVNVVTTKIALKGG

SEQ ID NO: 16058 - protein, 1946 aa, Artificial Sequence
  SARS-CoV-2__MT772271.1__non-structural protein 3 (NSP3)
MAPTKVTFGDDTVIEVQGYKSVNITFELDERIDKVLNEKCSAYTVELGTEVNEFACVVADAVIKTLQPVSELLTPLGIDLDEWSMATYYLFDESGEFKLASHMYCSFYPPDEDEEEGDCEEEEFEPSTQYEYGTEDDYQGKPLEFGATSAALQPEEEQEEDWLDDDSQQTVGQQDGSEDNQTTTIQTIVEVQPQLEMELTPVVQTIEVNSFSGYLKLTDNVYIKNADIVEEAKKVKPTVVVNAANVYLKHGGGVAGALNKATNNAMQVESDDYIATNGPLKVGGSCVLSGHNLAKHCLHVVGPNVNKGEDIQLLKSAYENFNQHEVLLAPLLSAGIFGADPIHSLRVCVDTVRTNVYLAVFDKNLYDKLVSSFLEMKSEKQVEQKIAEIPKEEVKPFITESKPSVEQRKQDDKKIKACVEEVTTTLEETKFLTENLLLYIDINGNLHPDSATLVSDIDITFLKKDAPYIVGDVVQEGVLTAVVIPTKKAGGTTEMLAKALRKVPTDNYITTYPGQGLNGYTVEEAKTVLKKCKSAFYILPSIISNEKQEILGTVSWNLREMLAHAEETRKLMPVCVETKAIVSTIQRKYKGIKIQEGVVDYGARFYFYTSKTTVASLINTLNDLNETLVTMPLGYVTHGLNLEEAARYMRSLKVPATVSVSSPDAVTAYNGYLTSSSKTPEEHFIETISLAGSYKDWSYSGQSTQLGIEFLKRGDKSVYYTSNPTTFHLDGEVITFDNLKTLLSLREVRTIKVFTTVDNINLHTQVVDMSMTYGQQFGPTYLDGADVTKIKPHNSHEGKTFYVLPNDDTLRVEAFEYYHTTDPSFLGRYMSALNHTKKWKYPQVNGLTSIKWADNNCYLATALLTLQQIELKFNPPALQDAYYRARAGEAANFCALILAYCNKTVGELGDVRETMSYLFQHANLDSCKRVLNVVCKTCGQQQTTLKGVEAVMYMGTLSYEQFKKGVQIPCTCGKQATKYLVQQESPFVMMSAPPAQYELKHGTFTCASEYTGNYQCGHYKHITSKETLYCIDGALLTKSSEYKGPITDVFYKENSYTTTIKPVTYKLDGVVCTEIDPKLDNYYKKDNSYFTEQPIDLVPNQPYPNASFDNFKFVCDNIKFADDLNQLTGYKKPASRELKVTFFPDLNGDVVAIDYKHYTPSFKKGAKLLHKPIVWHVNNATNKATYKPNTWCIRCLWSTKPVETSNSFDVLKSEDAQGMDNLACEDLKPVSEEVVENPTIQKDVLECNVKTTEVVGDIILKPANNSLKITEEVGHTDLMAAYVDNSSLTIKKPNELSRVLGLKTLATHGLAAVNSVPWDTIANYAKPFLNKVVSTTTNIVTRCLNRVCTNYMPYFFTLLLQLCTFTRSTNSRIKASMPTTIAKNTVKSVGKFCLEASFNYLKSPNFSKLINIIIWFLLLSVCLGSLIYSTAALGVLMSNLGMPSYCTGYREGYLNSTNVTIATYCTGSIPCSVCLSGLDSLDTYPSLETIQITISSFKWDLTAFGLVAEWFLAYILFTRFFYVLGLAAIMQLFFSYFAVHFISNSWLMWLIINLVQMAPISAMVRMYIFFASFYYVWKSYVHVVDGCNSSTCMMCYKRNRATRVECTTIVNGVRRSFYVYANGGKGFCKLHNWNCVNCDTFCAGSTFISDEVARDLSLQFKRPINPTDQSSYIVDSVTVKNGSIHLYFDKAGQKTYERHSLSRFVNLDNLRANNTKGSLPINVIVFDGKSKCEESSAKSASVYYSQLMCQPILLLDQALVSDVGDSAEVAVKMFDAYVNTFSSTFNVPMEKLKTLVATAEAELAKNVSLDNVLSTFISAARQGFVDSDVETKDVVECLKLSHQSDIEVTGDSCNNYMLTYNKVENMTPRDLGACIDCSARHINAQVAKSHNIALIWNVKDFMSLSEQLRKQIRSAAKKNNLPFKLTCATTRQVVNVVTTKIALKGG

SEQ ID NO: 16059 - protein, 1946 aa, Artificial Sequence
  SARS-CoV-2__MT772417.1__non-structural protein 3 (NSP3)
MAPTKVTFGDDTVIEVQGYKSVNITFELDERIDKVLNEKCSAYTVELGTEVNEFACVVADAVIKTLQPVSELLTPLGIDLDEWSMATYYLFDESGEFKLASHMYCSFYPPDEDEEEGDCEEEEFEPSTQYEYGTEDDYQGKPLEFGATSAALQPEEEQEEDWLDDDSQQTVGQQDGSEDNQTTTIQTIVEVQPQLEMELTPVVQTIEVNSFSGYLKLTDNVYIKNADIVEEAKKVKPTVVVNAANVYLKHGGGVAGALNKATNNAMQVESDDYIATNGPLKVGGSCVLSGHNLAKHCLHVVGPNVNKGEDIQLLKSAYENFNQHEVLLAPLLSAGIFGADPIHSLRVCVDTVRTNVYLAVFDKNLYDKLVSSFLEMKSEKQVEQNIAEIPKEEVKPFITESKPSVEQRKQDDKKIKACVEEVTTTLEETKFLTENLLLYIDINGNLHPDSATLVSDIDITFLKKDAPYIVGDVVQEGVLTAVVIPTKKAGGTTEMLAKALRKVPTDNYITTYPGQGLNGYTVEEAKTVLKKCKSAFYILPSIISNEKQEILGTVSWNLREMLAHAEETRKLMPVCVETKAIVSTIQRKYKGIKIQEGVVDYGARFYFYTSKTTVASLINTLNDLNETLVTMPLGYVTHGLNLEEAARYMRSLKVPATVSVSSPDAVTAYNGYLTSSSKTPEEHFIETISLAGSYKDWSYSGQSTQLGIEFLKRGDKSVYYTSNPTTFHLDGEVITFDNLKTLLSLREVRTIKVFTTVDNINLHTQVVDMSMTYGQQFGPTYLDGADVTKIKPHNSHEGKTFYVLPNDDTLRVEAFEYYHTTDPSFLGRYMSALNHTKKWKYPQVNGLTSIKWADNNCYLATALLTLQQIELKFNPPALQDAYYRARAGEAANFCALILAYCNKTVGELGDVRETMSYLFQHANLDSCKRVLNVVCKTCGQQQTTLRGVEAVMYMGTLSYEQFKKGVQIPCTCGKQATKYLVQQESPFVMMSAPPAQYELKHGTFTCASEYTGNYQCGHYKHITSKETLYCIDGALLTKSSEYKGPITDVFYKENSYTTTIKPVTYKLDGVVCTEIDPKLDNYYKKDNSYFTEQPIDLVPNQPYPNASFDNFKFVCDNIKFADDLNQLTGYKKPASRELKVTFFPDLNGDVVAIDYKHYTPSFKKGAKLLHKPIVWHVNNATNKATYKPNTWCIRCLWSTKPVETSNSFDVLKSEDAQGMDNLACEDLKPVSEEVVENPTIQKDVLECNVKTTEVVGDIILKPANNSLKITEEVGHTDLMAAYVDNSSLTIKKPNELSRVLGLKTLATHGLAAVNSVPWDTIANYAKPFLNKVVSTTTNIVTRCLNRVCTNYMPYFFTLLLQLCTFTRSTNSRIKASMPTTIAKNTVKSVGKFCLEASFNYLKSPNFSKLINIIIWFLLLSVCLGSLIYSTAALGVLMSNLGMPSYCTGYREGYLNSTNVTIATYCTGSIPCSVCLSGLDSLDTYPSLETIQITISSFKWDLTAFGLVAEWFLAYILFTRFFYVLGLAAIMQLFFSYFAVHFISNSWLMWLIINLVQMAPISAMVRMYIFFASFYYVWKSYVHVVDGCNSSTCMMCYKRNRATRVECTTIVNGVRRSFYVYANGGKGFCKLHNWNCVNCDTFCAGSTFISDEVARDLSLQFKRPINPTDQSSYIVDSVTVKNGSIHLYFDKAGQKTYERHSLSYFVNLDNLRANNTKGSLPINVIVFDGKSKCEESSAKSASVYYSQLMCQPILLLDQALVSDVGDSAEVAVKMFDAYVNTFSSTFNVPMEKLKTLVATAEAELAKNVSLDNVLSTFISAARQGFVDSDVETKDVVECLKLSHQSDIEVTGDSCNNYMLTYNKVENMTPRDLGACIDCSARHINAQVAKSHNIALIWNVKDFMSLSEQLRKQIRSAAKKNNLPFKLTCATTRQVVNVVTTKIALKGG

SEQ ID NO: 16060 - protein, 1946 aa, Artificial Sequence
  SARS-CoV-2__MT772475.1__non-structural protein 3 (NSP3)
MAPTKVTFGDDTVIEVQGYKSVNITFELDERIDKVLNEKCSAYTVELGTEVNEFACVVADAVIKTLQPVSELLTPLGIDLDEWSMATYYLFDESGEFKLASHMYCSFYPPDEDEEEGDCEEEEFEPSTQYEYGTEDDYQGKPLEFGATSAALQPEEEQEEDWLDDDSQQTVGQQDGSEDNQTTTIQTIVEVQPQLEMELTPVVQTIEVNSFSGYLKLTDNVYIKNADIVEEAKKVKPTVVVNAANVYLKHGGGVAGALNKATNNAMQVESDDYIATNGPLKVGGSCVLSGHNLAKHCLHVVGPNVNKGEDIQLLKSAYENFNQHEVLLAPLLSAGIFGADPIHSLRVCVDTVRTNVYLAVFDKNLYDKLVSSFLEMKSEKQVEQNIAEIPKEEVKPFITESKPSVEQRKQDDKKIKACVEEVTTTLEETKFLTENLLLYIDINGNLHPDSATLVSDIDITFLKKDAPYIVGDVVQEGVLTAVVIPTKKAGGTTEMLAKALRKVSTDNYITTYPGQGLNGYTVEEAKTVLKKCKSAFYILPSIISNEKQEILGTVSWNLREMLAHAEETRKLMPVCVETKAIVSTIQRKYKGIKIQEGVVDYGARFYFYTSKTTVASLINTLNDLNETLVTMPLGYVTHGLNLEEAARYMRSLKVPATVSVSSPDAVTAYNGYLTSSSKTPEEHFIETISLAGSYKDWSYSGQSTQLGIEFLKRGDKSVYYTSNPTTFHLDGEVITFDNLKTLLSLREVRTIKVFTTVDNINLHTQVVDMSMTYGQQFGPTYLDGADVTKIKPHNSHEGKTFYVLPNDDTLRVEAFEYYHTTDPSFLGRYMSALNHTKKWKYPQVNGLTSIKWADNNCYLATALLTLQQIELKFNPPALQDAYYRARAGEAANFCALILAYCNKTVGELGDVRETMSYLFQHANLDSCKRVLNVVCKTCGQQQTTLKGVEAVMYMGTLSYEQFKKGVQIPCTCGKQATKYLVQQESSFVMMSAPPAQYELKHGTFTCASEYTGNYQCGHYKHITSKETLYCIDGALLTKSSEYKGPITDVFYKENSYTTTIKPVTYKLDGVVCTEIDPKLDNYYKKDNSYFTEQPIDLVPNQPYPNASFDNFKFVCDNIKFADDLNQLTGYKKPASRELKVTFFPDLNGDVVAIDYKHYTPSFKKGAKLLHKPIVWHVNNATNKATYKPNTWCIRCLWSTKPVETSNSFDVLKSEDAQGMDNLACEDLKPVSEEVVENPTIQKDVLECNVTTTEVVGDIILKPANNSLKITEEVGHTDLMAAYVDNSSLTIKKPNELSRVLGLKTLATHGLAAVNSVPWDTIANYAKPFLNKVVSTTTNIVTRCLNRVCTNYMPYFFTLLLQLCTFTRSTNSRIKASMPTTIAKNTVKSVGKFCLEASFNYLKSPNFSKLINIIIWFLLLSVCLGSLIYSTAALGVLMSNLGMPSYCTGYREGYLNSTNVTIATYCTGSIPCSVCLSGLDSLDTYPSLETIQITISSFKWDLTAFGLVAEWFLAYILFTRFFYVLGLAAIMQLFFSYFAVHFISNSWLMWLIINLVQMAPISAMVRMYIFFASFYYVWKSYVHVVDGCNSSTCMMCYKRNRATRVECTTIVNGVRRSFYVYANGGKGFCKLHNWNCVNCDTFCAGSTFISDEVARDLSLQFKRPINPTDQSSYIVDSVTVKNGSIHLYFDKAGQKTYERHSLSHFVNFDNLRANNTKGSLPINVIVFDGKSKCEESSAKSASVYYSQLMCQPILLLDQALVSDVGDSAEVAVKMFDAYVNTFSSTFNVPMEKLKTLVATAEAELAKNVSLDNVLSTFISAARQGFVDSDVETKDVVECLKLSHQSDIEVTGDSCNNYMLTYNKVENMTPRDLGACIDCSARHINAQVAKSHNIALIWNVKDFMSLSEQLRKQIRSAAKKNNLPFKLTCATTRQVVNVVTTKIALKGG

SEQ ID NO: 16061 - protein, 1946 aa, Artificial Sequence
  SARS-CoV-2__MT772564.1__non-structural protein 3 (NSP3)
MAPTKVTFGDDTVIEVQGYKSVNITFELDERIDKVLNEKCSAYTVELGTEVNEFACVVADAVIKTLQPVSELLTPLGIDLDEWSMATYYLFDESGEFKLASHMYCSFYPPDEDEEEGDCEEEEFEPSTQYEYGTEDDYQGKPLEFGATSAALQPEEEQEEDWLDDDSQQTVGQQDGSEDNQTTTIQTIVEVQPQLEMELTPVVQTIEVNSFSGYLKLTDNVYIKNADIVEEAKKVKPTVVVNAANVYLKHGGGVAGALNKATNNAMQVESDDYIATNGPLKVGGSCVLSGHNLAKHCLHVVGPNVNKGEDIQLLKSAYENFNQHEVLLAPLLSAGIFGADPIHSLRVCVDTVRTNVYLAVFDKNLYDKLVSSFLEMKSEKQVEQKIVEIPKEEVKPFITESKPSVEQRKQDDKKIKACVEEVTTTLEETKFLTENLLLYIDINGNLHPDSATLVSDIDITFLKKDAPYIVGDVVQEGVLTAVVIPTKKAGGTTEMLAKALRKVPTDNYITTYPGQGLNGYTVEEAKTVLKKCKSAFYILPSIISNEKQEILGTVSWNLREMLAHAEETRKLMPVCVETKAIVSTIQRKYKGIKIQEGVVDYGARFYFYTSKTTVASLINTLNDLNETLVTMPLGYVTHGLNLEEAARYMRSLKVPATVSVSSPDAVTAYNGYLTSSSKTPEEHFIETISLAGSYKDWSYSGQSTQLGIEFLKRGDKSVYYTSNPTTFHLDGEVITFDNLKTLLSLREVRTIKVFTTVDNINLHTQVVDMSMTYGQQFGPTYLDGADVTKIKPHNSHEGKTFYVLPNDDTLRVEAFEYYHTTDPSFLGRYMSALNHTKKWKYPQVNGLTSIKWADNNCYLATALLTLQQIELKFNPPALQDAYYRARAGEAANFCALILAYCNKTVGELGDVRETMSYLFQHANLDSCKRVLNVVCKTCGQQQTTLKGVEAVMYMGTLSYEQFKKGVQIPCTCGKQATKYLVQQESPFVMMSAPPAQYELKHGTFTCASEYTGNYQCGHYKHITSKETLYCIDGALLTKSSEYKGPITDVFYKENSYTTTIKPVTYKLDGVVCTEIDPKLDNYYKKDNSYFTEQPIDLVPNQPYPNASFDNFKFVCDNIKFADDLNQLTGYKKPASRELKVTFFPDLNGDVVAIDYKHYTPSFKKGAKLLHKPIVWHVNNATNKATYKPNTWCIRCLWSTKPVETSNSFDVLKSEDAQGMDNLACEDLKPVSEEVVENPTIQKDVLECNVKTTEVVGDIILKPANNSLKITEEVGHTDLMAAYVDNSSLTIKKPNELSRVLGLKTLATHGLAAVNSVPWDTIANYAKPFLNKVVSTTTNIVTRCLNRVCTNYMPYFFTLLLQLCTFTRSTNSRIKASMPTTIAKNTVKSVGKFCLEASFNYLKSPNFSKLINIIIWFLLLSVCLGSLIYSTAALGVLMSNLGMPSYCTGYREGYLNSTNVTIATYCTGSIPCSVCLSGLDSLDTYPSLETIQITISSFKWDLTAFGLVAEWFLAYILFTRFFYVLGLAAIMQLFFSYFAVHFISNSWLMWLIINLVQMAPISAMVRMYIFFASFYYVWKSYVHVVDGCNSSTCMMCYKRNRATRVECTTIVNGVRRSFYVYANGGKGFCKLHNWNCVNCDTFCAGSTFISDEVARDLSLQFKRPINPTDQSSYIVDSVTVKNGSIHLYFDKAGQKTYERHSLSHFVNLDNLRANNTKGSLPINVIVFDGKSKCEESSAKSASVYYSQLMCQPILLLDQALVSDVGDSAEVAVKMFDAYVNTFSSTFNVPMEKLKTLVATAEAELAKNVSLDNVLSTFISAARQGFVDSDVETKDVVECLKLSHQSDIEVTGDSCNNYMLTYNKVENMTPRDLGACIDCSARHINAQVAKSHNIALIWNVKDFMSLSEQLRKQIRSAAKKNNLPFKLTCATTRQVVNVVTTKIALKGG

SEQ ID NO: 16062 - protein, 1946 aa, Artificial Sequence
  SARS-CoV-2__MT772565.1__non-structural protein 3 (NSP3)
MAPTKVTFGDDTVIEVQGYKSVNITFELDERIDKVLNEKCSAYTVELGTEVNEFACVVADAVIKTLQPVSELLTPLGIDLDEWSMATYYLFDESGEFKLASHMYCSFYPPDEDEEEGDCEEEEFEPSTQYEYGTEDDYQGKPLEFGATSAALQPEEEQEEDWLDDDSQQTVGQQDGSEDNQTTTIQTIVEVQPQLEMELTPVVQTIEVNSFSGYLKLTDNVYIKNADIVEEAKKVKPTVVVNAANVYLKHGGGVAGALNKATNNAMQVESDDYIATNGPLKVGGSCVLSGHNLAKHCLHVVGPNVNKGEDIQFLKSAYENFNQHEVLLAPLLSAGIFGADPIHSLRVCVDTVRTNVYLAVFDKNLYDKLVSSFLEMKSEKQVEQKIAEIPKEEVKPFITESKPSVEQRKQDDKKIKACVEEVTTTLEETKFLTENLLLYIDINGNLHPDSATLVSDIDITFLKKDAPYIVGDVVQEGVLTAVVIPTKKAGGTTEMLAKALRKVPTDNYITTYPGQGLNGYTVEEAKTVLKKCKSAFYILPSIISNEKQEILGTVSWNLREMLAHAEETRKLMPVCVETKAIVSTIQRKYKGIKIQEGVVDYGARFYFYTSKTTVASLINTLNDLNETLVTMPLGYVTHGLNLEEAARYMRSLKVPATVSVSSPDAVTAYNGYLTSSSKTPEEHFIETISLAGSYKDWSYSGQSTQLGIEFLKRGDKSVYYTSNPTTFHLDGEVITFDNLKTLLSLREVRTIKVFTTVDNINLHTQVVDMSMTYGQQFGPTYLDGADVTKIKPHNSHEGKTFYVLPNDDTLRVEAFEYYHTTDPSFLGRYMSALNHTKKWKYPQVNGLTSIKWADNNCYLATALLTLQQIELKFNPPALQDAYYRARAGEAANFCALILAYCNKTVGELGDVRETMSYLFQHANLDSCKRVLNVVCKTCGQQQTTLKGVEAVMYMGTLSYEQFKKGVQIPCTCGKQATKYLVQQESPFVMMSAPPAQYELKHGTFTCASEYTGNYQCGHYKHITSKETLYCIDGALLTKSSEYKGPITDVFYKENSYTTTIKPVTYKLDGVVCTEIDPKLDNYYKKDNSYFTEQPIDLVPNQPYPNASFDNFKFVCDNIKFADDLNQLTGYKKPASRELKVTFFPDLNGDVVAIDYKHYTPSFKKGAKLLHKPIVWHVNNATNKATYKPNTWCIRCLWSTKPVETSNSFDVLKSEDAQGMDNLACEDLKPVSEEVVENPTIQKDVLECNVKTTEVVGDIILKPANNSLKITEEVGHTDLMAAYVDNSSLTIKKPNELSRVLGLKTLATHGLAAVNSVPWDTIANYAKPFLNKVVSTTTNIVTRCLNRVCTNYMPYFFTLLLQLCTFTRSTNSRIKASMPTTIAKNTVKSVGKFCLEASFNYLKSPNFSKLINIIIWFLLLSVCLGSLIYSTAALGVLMSNLGMPSYCTGYREGYLNSTNVTIATYCTGSIPCSVCLSGLDSLDTYPSLETIQITISSFKWDLTAFGLVAEWFLAYILFTRFFYVLGLAAIMQLFFSYFAVHFISNSWLMWLIINLVQMAPISAMVRMYIFFASFYYVWKSYVHVVDGCNSSTCMMCYKRNRATRVECTTIVNGVRRSFYVYANGGKGFCKLHNWNCVNCDTFCAGSTFISDEVARDLSLQFKRPINSTDQSSYIVDSVTVKNGSIHLYFDKAGQKTYERHSLSHFVNLDNLRANNTKGSLPINVIVFDGKSKCEESSAKSASVYYSQLMCQPILLLDQALVSDVGDSAEVAVKMFDAYVNTFSSTFNVPMEKLKTLVATAEAELAKNVSLDNVLSTFISAARQGFVDSDVETKDVVECLKLSHQSDIEVTGDSCNNYMLTYNKVENMTPRDLGACIDCSARHINAQVAKSHNIALIWNVKDFMSLSEQLRKQIRSAAKKNNLPFKLTCATTRQVVNVVTTKIALKGG

SEQ ID NO: 16063 - protein, 1946 aa, Artificial Sequence
  SARS-CoV-2__MT772569.1__non-structural protein 3 (NSP3)
MAPTKVTFGDDTVIEVQGYKSVNITFELDERIDKVLNEKCSAYTVELGTEVNEFACVVADAVIKTLQPVSELLTPLGIDLDEWSMATYYLFDESGEFKLASHMYCSFYPPDEDEEEGDCEEEEFEPLTQYEYGTEDDYQGKPLEFGATSAALQPEEEQEEDWLDDDSQQTVGQQDGSEDNQTTTIQTIVEVQPQLEMELTPVVQTIEVNSFSGYLKLTDNVYIKNADIVEEAKKVKPTVVVNAANVYLKHGGGVAGALNKATNNAMQVESDDYIATNGPLKVGGSCVLSGHNLAKHCLHVVGPNVNKGEDIQLLKSAYENFNQHEVLLAPLLSAGIFGADPIHSLRVCVDTVRTNVYLAVFDKNLYDKLVSSFLEMKSEKQVEQKIAEIPKEEVKPFITESKPSVEQRKQDDKKIKACVEEVTTTLEETKFLTENLLLYIDINGNLHPDSATLVSDIDITFLKKDAPYIVGDVVQEGVLTAVVIPTKKAGGTTEMLAKALRKVPTDNYITTYPGQGLNGYTVEEAKTVLKKCKSAFYILPSIISNEKQEILGTVSWNLREMLAHAEETRKLMPVCVETKAIVSTIQRKYKGIKIQEGVVDYGARFYFYTSKTTVASLINTLNDLNETLVTMPLGYVTHGLNLEEAARYMRSLKVPATVSVSSPDAVTAYNGYLTSSSKTPEEHFIETISLAGSYKDWSYSGQSTQLGIEFLKRGDKSVYYTSNPTTFHLDGEVITFDNLKTLLSLREVRTIKVFTTVDNINLHTQVVDMSMTYGQQFGPTYLDGADVTKIKPHNSHEGKTFYVLPNDDTLRVEAFEYYHTTDPSFLGRYMSALNHTKKWKYPQVNGLTSIKWADNNCYLATALLTLQQIELKFNPPALQDAYYRARAGEAANFCALILAYCNKTVGELGDVRETMSYLFQHANLDSCKRVLNVVCKTCGQQQTTLKGVEAVMYMGTLSYEQFKKGVQIPCTCGKQATKYLVQQESPFVMMSAPPAQYELKHGTFTCASEYTGNYQCGHYKHITSKETLYCIDGALLTKSSEYKGPITDVFYKENSYTTTIKPVTYKLDGVVCTEIDPKLDNYYKKDNSYFTEQPIDLVPNQPYPNASFDNFKFVCDNIKFADDLNQLTGYKKPASRELKVTFFPDLNGDVVAIDYKHYTPSFKKGAKLLHKPIVWHVNNATNKATYKPNTWCIRCLWSTKPVETSNSFDVLKSEDAQGMDNLACEDLKPVSEEVVENPTIQKDVLECNVKTTEVVGDIILKPANNSLKITEEVGHTDLMAAYVDNSSLTIKKPNELSRVLGLKTLATHGLAAVNSVPWDTIANYAKPFLNKVVSTTTNIVTRCLNRVCTNYMPYFFTLLLQLCTFTRSTNSRIKASMPTTIAKNTVKSVGKFCLEASFNYLKSPNFSKLINIIIWFLLLSVCLGSLIYSTAALGVLMSNLGMPSYCTGYREGYLNSTNVTIATYCTGSIPCSVCLSGLDSLDTYPSLETIQITISSFKWDLTAFGLVAEWFLAYILFTRFFYVLGLAAIMQLFFSYFAVHFISNSWLMWLIINLVQMAPISAMVRMYIFFASFYYVWKSYVHVVDGCNSSTCMMCYKRNRATRVECTTIVNGVRRSFYVYANGGKGFCKLHNWNCVNCDTFCAGSTFISDEVARDLSLQFKRPINPTDQSSYIVDSVTVKNGSIHLYFDKAGQKTYERHSLSHFVNLDNLRANNTKGSLPINVIVFDGKSKCEESSAKSASVYYSQLMCQPILLLDQALVSDVGDSAEVAVKMFDAYVNTFSSTFNVPMEKLKTLVATAEAELAKNVSLDNVLSTFISAARQGFVDSDVETKDVVECLKLSHQSDIEVTGDSCNNYMLTYNKVENMTPRDLGACIDCSARHINAQVAKSHNIALIWNVKDFMSLSEQLRKQIRSAAKKNNLPFKLTCATTRQVVNVVTTKIALKGG

SEQ ID NO: 16064 - protein, 1946 aa, Artificial Sequence
  SARS-CoV-2__MT758193.1__non-structural protein 3 (NSP3)
MAPTKVTFGDDTVIEVQGYKSVNITFELDERIDKVLNEKCSAYTVELGTEVNEFACVVADAVIKTLQPVSELLTPLGIDLDEWSMATYYLFDESGEFKLASHMYCSFYPPDEDEEEGDCEEEEFEPSTQYEYGTEDDYQGKPLEFGATSAALQPEEEQEEDWLDDDSQQTVGQQDGSEDNQTTTIQTIVEVQPQLEMELTPVVQTIEVNSFSGYLKLTDNVYIKNADIVEEAKKVKPTVVVNAANVYLKHGGGVAGALNKATNNAMQVESDDYIATNGPLKVGGSCVLSGHNLAKHCLHVVGPNVNKGEDIQLLKSAYENFNQHEVLLAPLLSAGIFGADPIHSLRVCVDTVRTNVYLAVFDKNLYDKLVSSFLEMKSEKQVEQKIAEIPKEEVKPFITESKPSVEQRKQDDKKIKACVEEVTTTLEETKFLTENLLLYIDINGNLHPDSATLVSDIDITFLKKDAPYIVGDVVQEGVLTAVVIPTKKAGGTTEMLAKALRKVPTDNYITTYPGQGLNGYTVEEAKTVLKKCKSAFYILPSIISNEKQEILGTVSWNLREMLAHAEETRKLMPVCVETKAIVSTIQRKYKGIKIQEGVVDYGARFYFYTSKTTVASLINTLNDLNETLVTMPLGYVTHGLNLEEAARYMRSLKVPATVSVSSPDAVTAYNGYLTSSSKTPEEHFIETISLAGSYKDWSYSGQSTQLGIEFLKRGDKSVYYTSNPTTFHLDGEVITFDNLKTLLSLREVRTIKVFTTVDNINLHTQVVDMSMTYGQQFGPTYLDGADVTKIKPHNSHEGKTFYVLPNDDTLRVEAFEYYHTTDPSFLGRYMSALNHTKKWKYPQVNGLTSIKWADNNCYLATALLTLQQIELKFNPPALQDAYYRARAGEAANFCALILAYCNKTVGELGDVRETMSYLFQHANLDSCKRVLNVVCKTCGQQQTTLKGVEAVMYMGTLSYEQFKKGVQIPCTCGKQATKYLVQQESPFVMMSAPPAQYELKHGTFTCASEYTGNYQCGHYKHITSKETLYCIDGALLTKSSEYKGPITDVFYKENSYTTTIKPVTYKLDGVVCTEIDPKLDNYYKKDNSYFTEQPIDLVPNQPYPNASFDNFKFVCDNIKFADDLNQLTGYKKPASRELKVTFFPDLNGDVVAIDYKHYTPSFKKGAKLLHKPIVWHVNNATNKATYKPNTWCIRCLWSTKPVETSNSFDVLKSEDAQGMDNLACEDLKPVSEEVVENPTIQKDVLECNVKTTEVVGDIILKPANNSLKITEEVGHTDLMAAYVDNSSLTIKKPNELSRVLGLKTLATHGLAAVNSVPWDTIANYAKPFLNKVVSTTTNIVTRCLNRVCTNYMPYFFTLLLQLCTFTRSTNSRIKASMPTTIAKNTVKSVGKFCLEASFNYLKSPNFSKLINIIIWFLLLSVCLGSLIYSTAALGVLMSNLGMPSYCTGYREGYLNSTNVTIATYCTGSIPCSVCLSGLDSLDTYPSLETIQITISSFKWDLTAFGLVAEWFLAYILFTRFFYVLGLAAIMQLFFSYFAVHFISNSWLMWLIINLVQMAPISAMVRMYIFFASFYYVWKSYVHVVDGCNSSTCMMCYKRNRATRVECTTIVNGVRRSFYVYANGGKGFCKLHNWNCVNCDTFCAGSTFISDEVARDLSLQFKRPINPTDQSSYIVDSVTVKNGSIHLYFDKAGQKTYERHSLSHFVNLDNLRANNTKGSLPINVIVFDGKSKCEESSAKSASVYYSQLMCQPILLLDQALVSDVGDSAEVAVKMFDAYVNTFSSTFNVPMEKLKTLVATAEAELAKNVSLDNVLSTFISAARQGFVDSDVETKDVVECLKLSHQSDIEVTGDSCNNYMLTYNKVENMTPRDLGACIDCSARHINAQVAKSHNIALIWNVKDFMSLSEQLRKQIRSDAKKNNLPFKLTCATTRQVVNVVTTKIALKGG

SEQ ID NO: 16065 - protein, 1946 aa, Artificial Sequence
  SARS-CoV-2__MT758215.1__non-structural protein 3 (NSP3)
MAPTKVTFGDDTVIEVQGYKSVNITFELDERIDKVLNEKCSAYTVELGTEVNEFACVVADAVIKTLQPVSELLTPLGIDLDEWSMATYYLFDESGEFKLASHMYCSFYPPDEDEEEGDCEEEEFEPSTQYEYGTEDDYQGKPLEFGATSAALQPEEEQEEDWLDDDSQQTVGQQDGSEDNQTTTIQTIVEVQPQLEMELTPVVQTIEVNSFSGYLKLTDNVYIKNADIVEEAKKVKPTVVVNAANVYLKHGGGVAGALNKATNNAMQVESDDYIATNGPLKVGGSCVLSGHNLAKHCLHVVGPNVNKGEDIQLLKSAYENFNQHEVLLAPLLSAGIFGADPIHSLRVCVDTVRTNVYLAVFDKNLYDKLVSSFLEMKSEKQVEQKIAEIPKEEVKPFITESKPSVEQRKQDDKKIKACVEEVTTTLEETKFLTENLLLYIDINGNLHPDSATLVSDIDITFLKKDAPYIVGDVVQEGVLTAVVIPTKKAGGTTEMLAKALRKVPTDNYITTYPGQGLNGYTVEEAKTVLKKCKSAFYILPSIISNEKQEILGTVSWNLREMLAHAEETRKLMPVCVETKAIVSTIQRKYKGIKIQEGVVDYGARFYFYTSKTTVASLINTLNDLNETLVTMPLGYVTHGLNLEEAARYMRSLKVPATVSVSSPDAVTAYNGYLTSSSKTPEEHFIETISLAGSYKDWSYSGQSTQLGIEFLKRGDKSVYYTSNPTTFHLDGEVITFDNLKTLLSLREVRTIKVFTTVDNINLHTQVVDMSMTYGQQFGPTYLDGADVTKIKPHNSHEGKTFYVLPNDDTLRVEAFEYYHTTDPSFLGRYMSALNHTKKWKYPQVNGLTSIKWADNNCYLATALLTLQQIELKFNPPALQDAYYRARAGEAANFCALILAYCNKTVGELGDVRETMSYLFQHANLDSCKRVLNVVCKTCGQQQTTLKGVEAVMYMGTLSYEQFKKGVQIPCTCGKQATKYLVQQESPFVMMSAPPAQYELKHGTFTCASEYTGNYQCGHYKHITSKETLYCIDGALLTKSSEYKGPITDVFYKENSYTTTIKPVTYKLDGVVCTEIDPKLDNYYKKDNSYFTEQPIDLVPNQPYPNASFDNFKFVCDNIKFADDLNQLTGYKKPASRELKVTFFPDLNGDVVAIDYKHYTPSFKKGAKLLHKPIVWHVNNATNKATYKPNTWCIRCLWSTKPVETSNSFDVLKSEDAQGMDNLACEDLKPVSEEVVENPTIQKDVLECNVKTTEVVGDIILKPANNSLKITEEVGHTDLMAAYVDNSSLTIKKPNELSRVLGLKTLATHGLAAVNSVPWDTIANYAKPFLNKVVSTTTNIVTRCLNRVCTNYMPYFFTLLLQLCTFTRSTNSRIKASMPTTIAKNTVKSVGKFCLEASFNYLKSPNFSKLINIIIWFLLLSVCLGSLIYSTAALGVLMSNLGMPSYCTGYREGYLNSTNVTIATYCTGSIPCSVCLSGLDSLDTYPSLETIQITISSFKWDLTAFGLVAEWFLAYILFTRFFYVLGLAAIMQLFFSYFAVYFISNSWLMWLIINLVQMAPISAMVRMYIFFASFYYVWKSYVHVVDGCNSSTCMMCYKRNRATRVECTTIVNGVRRSFYVYANGGKGFCKLHNWNCVNCDTFCAGSTFISDEVARDLSLQFKRPINPTDQSSYIVDSVTVKNGSIHLYFDKAGQKTYERHSLSHFVNLDNLRANNTKGSLPINVIVFDGKSKCEESSAKSASVYYSQLMCQPILLLDQALVSDVGDSAEVAVKMFDAYVNTFSSTFNVPMEKLKTLVATAEAELAKNVSLDNVLSTFISAARQGFVDSDVETKDVVECLKLSHQSDIEVTGDSCNNYMLTYNKVENMTPRDLGACIDCSARHINAQVAKSHNIALIWNVKDFMSLSEQLRKQIRSAAKKNNLPFKLTCATTRQVVNVVTTKIALKGG

SEQ ID NO: 16066 - protein, 1946 aa, Artificial Sequence
  SARS-CoV-2__MT758240.1__non-structural protein 3 (NSP3)
MAPTKVTFGDDTVIEVQGYKSVNITFELDERIDKVLNEKCSAYTVELGTEVNEFACVVADAVIKTLQPVSELLTPLGIDLDEWSMATYYLFDESGEFKLASHMYCSFYPPDEDEEEGDCEEEEFEPSTQYEYGTEDDYQGKPLEFGATSAALQPEEEQEEDWLDDDSQQTVGQQDGSEDNQTTTIQTIVEVQPQLEMELTPVVQTIEVNSFSGYLKLTDNVYIKNADIVEEAKKVKPTVVVNAANVYLKHGGGVAGALNKATNNAMQVESDDYIATNGPLKVGGSCVLSGHNLAKHCLHVVGPNVNKGEDIQLLKSAYENFNQHEVLLAPLLSAGIFGADSIHSLRVCVDTVRTNVYLAVFDKNLYDKLVSSFLEMKSEKQVEQKIAEIPKEEVKPFITESKPSVEQRKQDDKKIKACVEEVTTTLEETKFLTENLLLYIDINGNLHPDSATLVSDIDITFLKKDAPYIVGDVVQEGVLTAVVIPTKKAGGTTEMLAKALRKVPTDNYITTYPGQGLNGYTVEEAKTVLKKCKSAFYILPSIISNEKQEILGTVSWNLREMLAHAEETRKLMPVCVETKAIVSTIQRKYKGIKIQEGVVDYGARFYFYTSKTTVASLINTLNDLNETLVTMPLGYVTHGLNLEEAARYMRSLKVPATVSVSSPDAVTAYNGYLTSSSKTPEEHFIETISLAGSYKDWSYSGQSTQLGIEFLKRGDKIVYYTSNPTTFHLDGEVITFDNLKTLLSLREVRTIKVFTTVDNINLHTQVVDMSMTYGQQFGPTYLDGADVTKIKPHNSHEGKTFYVLPNDDTLRVEAFEYYHTTDPSFLGRYMSALNHTKKWKYPQVNGLTSIKWADNNCYLATALLTLQQIELKFNPPALQDAYYRARAGEAANFCALILAYCNKTVGELGDVRETMSYLFQHANLDSCKRVLNVVCKTCGQQQTTLKGVEAVMYMGTLSYEQFKKGVQIPCTCGKQATKYLVQQESPFVMMSAPPAQYELKHGTFTCASEYTGNYQCGHYKHITSKETLYCIDGALLTKSSEYKGPITDVFYKENSYTTTIKPVTYKLDGVVCTEIDPKLDNYYKKDNSYFTEQPIDLVPNQPYPNASFDNFKFVCDNIKFADDLNQLTGYKKPASRELKVTFFPDLNGDVVAIDYKHYTPSFKKGAKLLHKPIVWHVNNATNKATYKPNTWCIRCLWSTKPVETSNSFDVLKSEDAQGMDNLACEDLKPVSEEVVENPTIQKDVLECNVKTTEVVGDIILKPANNSLKITEEVGHTDLMAAYVDNSSLTIKKPNELSRVLGLKTLATHGLAAVNSVPWDTIANYAKPFLNKVVSTTTNIVTRCLNRVCTNYMPYFFTLLLQLCTFTRSTNSRIKASMPTTIAKNTVKSVGKFCLEASFNYLKSPNFSKLINIIIWFLLLSVCLGSLIYSTAALGVLMSNLGMPSYCTGYREGYLNSTNVTIATYCTGSIPCSVCLSGLDSLDTYPSLETIQITISSFKWDLTAFGLVAEWFLAYILFTRFFYVLGLAAIMQLFFSYFAVHFISNSWLMWLIINLVQMAPISAMVRMYIFFASFYYVWKSYVHVVDGCNSSTCMMCYKRNRATRVECTTIVNGVRRSFYVYANGGKGFCKLHNWNCVNCDTFCAGSTFISDEVARDLSLQFKRPINPTDQSSYIVDSVTVKNGSIHLYFDKAGQKTYERHSLSHFVNLDNLRANNTKGSLPINVIVFDGKSKCEESSAKSASVYYSQLMCQPILLLDQALVSDVGDSAEVAVKMFDVYVNTFSSTFNVPMEKLKTLVATAEAELAKNVSLDNVLSTFISAARQGFVDSDVETKDVVECLKLSHQSDIEVTGDSCNNYMLTYNKVENMTPRDLGACIDCSARHINAQVAKSHNIALIWNVKDFMSLSEQLRKQIRSAAKKNNLPFKLTCATTRQVVNVVTTKIALKGG

SEQ ID NO: 16067 - protein, 1946 aa, Artificial Sequence
  SARS-CoV-2__MT758436.1__non-structural protein 3 (NSP3)
MAPTKVTFGDDTVIEVQGYKSVNITFELDERIDKVLNEKCSAYTVELGTEVNEFACVVADAVIKTLQPVSELLTPLGIDLDEWSMATYYLFDESGEFKLASHMYCSFYPPDEDEEEGDCEEEEFEPSTQYEYGTEDDYQGKPLEFGATSAALQPEEEQEEDWLDDDSQQTVGQQDGSEDNQTTTIQTIVEVQPQLEMELTPVVQTIEVNSFSGYLKLTDNVYIKNADIVEEAKKVKPTVVVNAANVYLKHGGGVAGALNKATNNAMQVESDDYIATNGPLKVGGSCVLSGHNLAKHCLHVVGPNVNKGEDIQLLKSAYENFNQHEVLLAPLLSAGIFGADPIHSLRVCVDTVRTNVYLAVFDKNLYDKLVSSFLEMKSEKQVEQKIAEIPKEEVKPFITESKPSVEQRKQDDKKIKACVEEVTTTLEETKFLTENLLLYIDINGNLHPDSATLVSDIDITFLKKDAPYIVGDVVQEGVLTAVVIPTKKAGGTTEMLAKALRKVPTDNYITTYPGQGLNGYTVEEAKTVLKKCKSAFYILPSIISNEKQEILGTVSWNLREMLAHAEETRKLMPVCVETKAIVSTIQRKYKGIKIQEGVVDYGARFYFYTSKTTVASLINTLNDLNETLVTMPLGYVTHGLNLEEAARYMRSLKVPATVSVSSPDAVTAYNGYLTSSSKTPEEHFIETISLAGSYKDWSYSGQSTQLGIEFLKRGDKSVYYTSNPTTFHLDGEVITFDNLKTLLSLREVRTIKVFTAVDNINLHTQVVDMSMTYGQQFGPTYLDGADVTKIKPHNSHEGKTFYVLPNDDTLRVEAFEYYHTTDPSFLGRYMSALNHTKKWKYPQVNGLTSIKWADNNCYLATALLTLQQIELKFNPPALQDAYYRARAGEAANFCALILAYCNKTVGELGDVRETMSYLFQHANLDSCKRVLNVVCKTCGQQQTTLKGVEAVMYMGTLSYEQFKKGVQIPCTCGKQATKYLVQQESPFVMMSAPPAQYELKHGTFTCASEYTGNYQCGHYKHITSKETLYCIDGALLTKSSEYKGPITDVFYKENSYTTTIKPVTYKLDGVVCTEIDPKLDNYYKKDNSYFTEQPIDLVPNQPYPNASFDNFKFVCDNIKFADDLNQLTGYKKPASRELKVTFFPDLNGDVVAIDYKHYTPSFKKGAKLLHKPIVWHVNNATNKATYKPNTWCIRCLWSTKPVETSNSFDVLKSEDAQGMDNLACEDLKPVSEEVVENPTIQKDVLECNVKTTEVVGDIILKPANNSLKITEEVGHTDLMAAYVDNSSLTIKKPNELSRVLGLKTLATHGLAAVNSVPWDTIANYAKPFLNKVVSTTTNIVTRCLNRVCTNYMPYFFTLLLQLCTFTRSTNSRIKASMPTTIAKNTVKSVGKFCLEASFNYLKSPNFSKLINIIIWFLLLSVCLGSLIYSTAALGVLMSNLGMPSYCTGYREGYLNSTNVTIATYCTGSIPCSVCLSGLDSLDTYPSLETIQITISSFKWDLTAFGLVAEWFLAYILFTRFFYVLGLAAIMQLFFSYFAVHFISNSWLMWLIINLVQMAPISAMVRMYIFFASFYYVWKSYVHVVDGCNSSTCMMCYKRNRATRVECTTIVNGVRRSFYVYANGGKGFCKLHNWNCVNCDTFCAGSTFISDEVARDLSLQFKRPINPTDQSSYIVDSVTVKNGSIHLYFDKAGQKTYERHSLSHFVNLDNLRANNTKGSLPINVIVFDGKSKCEESSAKSASVYYSQLMCQPILLLDQALVSDVGDSAEVAVKMFDAYVNTFSSTFNVPMEKLKTLVATAEAELAKNVSLDNVLSTFISAARQGFVDSDVETKDVVECLKLSHQSDIEVTGDSCNNYMLTYNKVENMTPRDLGACIDCSARHINAQVAKSHNIALIWNVKDFMSLSEQLRKQIRSAAKKNNLPFKLTCATTRQVVNVVTTKIALKGG

SEQ ID NO: 16068 - protein, 1946 aa, Artificial Sequence
  SARS-CoV-2__MT758439.1__non-structural protein 3 (NSP3)
MAPTKVTFGDDTVIEVQGYKSVNITFELDERIDKVLNEKCSAYTVELGTEVNEFACVVADAVIKTLQPVSELLTPLGIDLDEWSMATYYLFDESGEFKLASHMYCSFYPPDEDEEEGDCEEEDFEPSTQYEYGTEDDYQGKPLEFGATSAALQPEEEQEEDWLDDDSQQTVGQQDGSEDNQTTTIQTIVEVQPQLEMELTPVVQTIEVNSFSGYLKLTDNVYIKNADIVEEAKKVKPTVVVNAANVYLKHGGGVAGALNKATNNAMQVESDDYIATNGPLKVGGSCVLSGHNLAKHCLHVVGPNVNKGEDIQLLKSAYENFNQHEVLLAPLLSAGIFGADPIHSLRVCVDTVRTNVYLAVFDKNLYDKLVSSFLEMKSEKQVEQKIAEIPKEEVKPFITESKPSVEQRKQDDKKIKACVEEVTTTLEETKFLTENLLLYIDINGNLHPDSATLVSDIDITFLKKDAPYIVGDVVQEGVLTAVVIPTKKAGGTTEMLAKALRKVPTDNYITTYPGQGLNGYTVEEAKTVLKKCKSAFYILPSIISNEKQEILGTVSWNLREMLAHAEETRKLMPVCVETKAIVSTIQRKYKGIKIQEGVVDYGARFYFYTSKTTVASLINTLNDLNETLVTMPLGYVTHGLNLEEAARYMRSLKVPATVSVSSPDAVTAYNGYLTSSSKTPEEHFIETISLAGSYKDWSYSGQSTQLGIEFLKRGDKSVYYTSNPTTFHLDGEVITFDNLKTLLSLREVRTIKVFTTVDNINLHTQVVDMSMTYGQQFGPTYLDGADVTKIKPHNSHEGKTFYVLPNDDTLRVEAFEYYHTTDPSFLGRYMSALNHTKKWKYPQVNGLTSIKWADNNCYLATALLTLQQIELKFNPPALQDAYYRARAGEAANFCALILAYCNKTVGELGDVRETMSYLFQHANLDSCKRVLNVVCKTCGQQQTTLKGVEAVMYMGTLSYEQFKKGVQIPCTCGKQATKYLVQQESPFVMMSAPPAQYELKHGTFTCASEYTGNYQCGHYKHITSKETLYCIDGALLTKSSEYKGPITDVFYKENSYTTTIKPVTYKLDGVVCTEIDPKLDNYYKKDNSYFTEQPIDLVPNQPYPNASFDNFKFVCDNIKFADDLNQLTGYKKPASRELKVTFFPDLNGDVVAIDYKHYTPSFKKGAKLLHKPIVWHVNNATNKATYKPNTWCIRCLWSTKPVETSNSFDVLKSEDAQGMDNLACEDLKPVSEEVVENPTIQKDVLECNVKTTEVVGDIILKPANNSLKITEEVGHTDLMAAYVDNSSLTIKKPNELSRVLGLKTLATHGLAAVNSVPWDTIANYAKPFLNKVVSTTTNIVTRCLNRVCTNYMPYFFTLLLQLCTFTRSTNSRIKASMPTTIAKNTVKSVGKFCLEASFNYLKSPNFSKLINIIIWFLLLSVCLGSLIYSTAALGVLMSNLGMPSYCTGYREGYLNSTNVTIATYCTGSIPCSVCLSGLDSLDTYPSLETIQITISSFKWDLTAFGLVAEWFLAYILFTRFFYVLGLAAIMQLFFSYFAVHFISNSWLMWLIINLVQMAPISAMVRMYIFFASFYYVWKSYVHVVDGCNSSTCMMCYKRNRATRVECTTIVNGVRRSFYVYANGGKGFCKLHNWNCVNCDTFCAGSTFISDEVARDLSLQFKRPINPTDQSSYIVDSVTVKNGSIHLYFDKAGQKTYERHSLSHFVNLDNLRANNTKGSLPINVIVFDGKSKCEESSAKSASVYYSQLMCQPILLLDQALVSDVGDSAEVAVKMFDAYVNTFSSTFNVPMEKLKTLVATAEAELAKNVSLDNVLSTFISAARQGFVDSDVETKDVVECLKLSHQSDIEVTGDSCNNYMLTYNKVENMTPRDLGACIDCSARHINAQVAKSHNIALIWNVKDFMSLSEQLRKQIRSAAKKNNLPFKLTCATTRQVVNVVTTKIALKGG

SEQ ID NO: 16069 - protein, 1946 aa, Artificial Sequence
  SARS-CoV-2__MT762396.1__non-structural protein 3 (NSP3)
MAPTKVTFGDDTVIEVQGYKSVNITFELDERIDKVLNEKCSAYTVELGTEVNEFACVVADAVIKILQPVSELLTPLGIDLDEWSMATYYLFDESGEFKLASHMYCSFYPPDEDEEEGDCEEEEFEPSTQYEYGTEDDYQGKPLEFGATSAALQPEEEQEEDWLDDDSQQTVGQQDGSEDNQTTTIQTIVEVQPQLEMELTPVVQTIEVNSFSGYLKLTDNVYIKNADIVEEAKKVKPTVVVNAANVYLKHGGGVAGALNKATNNAMQVESDDYIATNGPLKVGGSCVLSGHNLAKHCLHVVGPNVNKGEDIQLLKSAYENFNQHEVLLAPLLSAGIFGADPIHSLRVCVDTVRTNVYLAVFDKNLYDKLVSSFLEMKSEKQVEQKIAEIPKEEVKPFITESKPSVEQRKQDDKKIKACVEEVTTTLEETKFLTENLLLYIDINGNLHPDSATLVSDIDITFLKKDAPYIVGDVVQEGVLTAVVIPTKKAGGTTEMLAKALRKVPTDNYITTYPGQGLNGYTVEEAKTVLKKCKSAFYILPSIISNEKQEILGTVSWNLREMLAHAEETRKLMPVCVETKAIVSTIQRKYKGIKIQEGVVDYGARFYFYTSKTTVASLINTLNDLNETLVTMPLGYVTHGLNLEEAARYMRSLKVPATVSVSSPDAVTAYNGYLTSSSKTPEEHFIETISLAGSYKDWSYSGQSTQLGIEFLKRGDKSVYYTSNPTTFHLDGEVITFDNLKTLLSLREVRTIKVFTTVDNINLHTQVVDMSMTYGQQFGPTYLDGADVTKIKPHNSHEGKTFYVLPNDDTLRVEAFEYYHTTDPSFLGRYMSALNHTKKWKYPQVNGLTSIKWADNNCYLATALLTLQQIELKFNPPALQDAYYRARAGEAANFCALILAYCNKTVGELGDVRETMSYLFQHANLDSCKRVLNVVCKTCGQQQTTLKGVEAVMYMGTLSYEQFKKGVQIPCTCGKQATKYLVQQESPFVMMSAPPAQYELKHGTFTCASEYTGNYQCGHYKHITSKETLYCIDGALLTKSSEYKGPITDVFYKENSYTTTIKPVTYKLDGVVCTEIDPKLDNYYKKDNSYFTEQPIDLVPNQPYPNASFDNFKFVCDNIKFADDLNQLTGYKKPASRELKVTFFPDLNGDVVAIDYKHYTPSFKKGAKLLHKPIVWHVNNATNKATYKPNTWCIRCLWSTKPVETSNSFDVLKSEDAQGMDNLACEDLKPVSEEVVENPTIQKDVLECNVKTTEVVGDIILKPANNSLKITEEVGHTDLMAAYVDNSSLTIKKPNELSRVLGLKTLATHGLAAVNSVPWDTIANYAKPFLNKVVSTTTNIVTRCLNRVCTNYMPYFFTLLLQLCTFTRSTNSRIKASMPTTIAKNTVKSVGKFCLEASFNYLKSPNFSKLINIIIWFLLLSVCLGSLIYSTAALGVLMSNLGMPSYCTGYREGYLNSTNVTIATYCTGSIPCSVCLSGLDSLDTYPSLETIQITISSFKWDLTAFGLVAEWFLAYILFTRFFYVLGLAAIMQLFFSYFAVHFISNSWLMWLIINLVQMAPISAMVRMYIFFASFYYVWKSYVHVVDGCNSSTCMMCYKRNRATRVECTTIVNGVRRSFYVYANGGKGFCKLHNWNCVNCDTFCAGSTFISDEVARDLSLQFKRPINPTDQSSYIVDSVTVKNGSIHLYFDKAGQKTYERHSLSHFVNLDNLRANNTKGSLPINVIVFDGKSKCEESSAKSASVYYSQLMCQPILLLDQALVSDVGDSAEVAVKMFDAYVNTFSSTFNVPMEKLKTLVATAEAELAKNVSLDNVLSTFISAARQGFVDSDVETKDVVECLKLSHQSDIEVTGDSCNNYMLTYNKVENMTPRDLGACIDCSARHINAQVAKSHNIALIWNVKDFMSLSEQLRKQIRSAAKKNNLPFKLTCATTRQVVNVVTTKIALKGG

SEQ ID NO: 16070 - protein, 1946 aa, Artificial Sequence
  SARS-CoV-2__MT762397.1__non-structural protein 3 (NSP3)
MAPTKVTFGDDTVIEVQGYKSVNITFELDERIDKVLNEKCSAYTVELGTEVNEFACVVADAVIKTLQPVSELLTPLGIDLDEWSMATYYLFDESGEFKLASHMYCSFYPPDEDEEEGDCEEEEFEPSTQYEYGTEDDYQGKPLEFGATSAALQPEEEQEEDWLDDDSQQTVGQQDGSEDNQTTTIQTIVEVQPQLEMELTPVVQTIEVNSFSGYLKLTDNVYIKNADIVEEAKKVKPTVVVNAANVYLKHGGGVAGALNKATNNAMQVESDDYIATNGPLKVGGSCVLSGHNLAKHCLHVVGPNVNKGEDIQLLKSAYENFNQHEVLLAPLLSAGIFGADPIHSLRVCVDTVRTNVYLAVFDKNLYDKLVSSFLEMKSEKQVEQKIAEIPKEEVKPFITESKPSVEQRKQDDKKIKACVEEVTTTLEETKFLTENLLLYIDINGNLHPDSATLVSDIDITFLKKDAPYIVGDVVQEGVLTAVVIPTKKAGGTTEMLAKALRKVPTDNYITTYPGQGLNGYTVEEAKTVLKKCKSAFYILPSIISNEKQEILGTVSWNLREMLAHAEETRKLMPVCVETKAIVSTIQRKYKGIKIQEGVVDYGARFYFYTSKTTVASLINTLNDLNETLVTMPLGYVTHGLNLEEAARYMRSLKVPATVSVSSPDAVTAYNGYLTSSSKTPEEHFIETISLAGSYKDWSYSGQSTQLGIEFLKRGDKSVYYTSNPTTFHLDGEVITFDNLKTLLSLREVRTIKVFTTVDNINLHTQVVDMSMTYGQQFGPTYLDGADVTKIKPHNSHEGKTFYVLPNDDTLRVEAFEYYHTTDPSFLGRYMSALNHTKKWKYPQVNGLTSIKWADNNCYLATALLTLQQIELKFNPPALQDAYYRARAGEAANFCALILAYCNKTVGELGDVRETMSYLFQHANLDSCKRVLNVVCKTCGQQQTTLKGVEAVMYMGTLSYEQFKKGVQIPCTCGKQATKYLVQQESPFVMMSAPPAQYELKHGTFTCASEYTGNYQCGHYKHITSKETLYCIDGALLTKSSEYKGPITDVFYKENSYTTTIKPVTYKLDGVVCTEIDPKLDNYYKKDNSYFTEQPIDLVPNQPYPNASFDNFKFVCDNIKFADDLNQLTGYRKPASRELKVTFFPDLNGDVVAIDYKHYTPSFKKGAKLLHKPIVWHVNNATNKATYKPNTWCIRCLWSTKPVETSNSFDVLKSEDAQGMDNLACEDLKPVSEEVVENPTIQKDVLECNVKTTEVVGDIILKPANNSLKITEEVGHTDLMAAYVDNSSLTIKKPNELSRVLGLKTLATHGLAAVNSVPWDTIANYAKPFLNKVVSTTTNIVTRCLNRVCTNYMPYFFTLLLQLCTFTRSTNSRIKASMPTTIAKNTVKSVGKFCLEASFNYLKSPNFSKLINIIIWFLLLSVCLGSLIYSTAALGVLMSNLGMPSYCTGYREGYLNSTNVTIATYCTGSIPCSVCLSGLDSLDTYPSLETIQITISSFKWDLTAFGLVAEWFLAYILFTRFFYVLGLAAIMQLFFSYFAVHFISNSWLMWLIINLVQMAPISAMVRMYIFFASFYYVWKSYVHVVDGCNSSTCMMCYKRNRATRVECTTIVNGVRRSFYVYANGGKGFCKLHNWNCVNCDTFCAGSTFISDEVARDLSLQFKRPINPTDQSSYIVDSVTVKNGSIHLYFDKAGQKTYERHSLSHFVNLDNLRANNTKGSLPINVIVFDGKSKCEESSAKSASVYYSQLMCQPILLLDQALVSDVGDSAEVAVKMFDAYVNTFSSTFNVPMEKLKTLVATAEAELAKNVSLDNVLSTFISAARQGFVDSDVETKDVVECLKLSHQSDIEVTGDSCNNYMLTYNKVENMTPRDLGACIDCSARHINAQVAKSHNIALIWNVKDFMSLSEQLRKQIRSAAKKNNLPFKLTCATTRQVVNVVTTKIALKGG

SEQ ID NO: 16071 - protein, 1946 aa, Artificial Sequence
  SARS-CoV-2__MT762398.1__non-structural protein 3 (NSP3)
MAPTKVTFGDDTVIEVQGYKSVNITFELDERIDKVLNEKCSAYTVELGTEVNEFACVVADAVIKTLQPVSELLTLLGIDLDEWSMATYYLFDESGEFKLASHMYCSFYPPDEDEEEGDCEEEEFEPSTQYEYGTEDDYQGKPLEFGATSAALQPEEEQEEDWLDDDSQQTVGQQDGSEDNQTTTIQTIVEVQPQLEMELTPVVQTIEVNSFSGYLKLTDNVYIKNADIVEEAKKVKPTVVVNAANVYLKHGGGVAGALNKATNNAMQVESDDYIATNGPLKVGGSCVLSGHNLAKHCLHVVGPNVNKGEDIQLLKSAYENFNQHEVLLAPLLSAGIFGADPIHSLRVCVDTVRTNVYLAVFDKNLYDKLVSSFLEMKSEKQVEQKIAEIPKEEVKPFITESKPSVEQRKQDDKKIKACVEEVTTTLEETKFLTENLLLYIDINGNLHPDSATLVSDIDITFLKKDAPYIVGDVVQEGVLTAVVIPTKKAGGTTEMLAKALRKVPTDNYITTYPGQGLNGYTVEEAKTVLKKCKSAFYILPSIISNEKQEILGTVSWNLREMLAHAEETRKLMPVCVETKAIVSTIQRKYKGIKIQEGVVDYGARFYFYTSKTTVASLINTLNDLNETLVTMPLGYVTHGLNLEEAARYMRSLKVPATVSVSSPDAVTAYNGYLTSSSKTPEEHFIETISLAGSYKDWSYSGQSTQLGIEFLKRGDKSVYYTSNPTTFHLDGEVITFDNLKTLLSLREVRTIKVFTTVDNINLHTQVVDMSMTYGQQFGPTYLDGADVTKIKPHNSHEGKTFYVLPNDDTLRVEAFEYYHTTDPSFLGRYMSALNHTKKWKYPQVNGLTSIKWADNNCYLATALLTLQQIELKFNPPALQDAYYRARAGEAANFCALILAYCNKTVGELGDVRETMSYLFQHANLDSCKRVLNVVCKTCGQQQTTLKGVEAVMYMGTLSYEQFKKGVQIPCTCGKQATKYLVQQESPFVMMSAPPAQYELKHGTFTCASEYTGNYQCGHYKHITSKETLYCIDGALLTKSSEYKGPITDVFYKENSYTTTIKPVTYKLDGVVCTEIDPKLDNYYKKDNSYFTEQPIDLVPNQPYPNASFDNFKFVCDNIKFADDLNQLTGYKKPASRELKVTFFPDLNGDVVAIDYKHYTPSFKKGAKLLHKPIVWHVNNATNKATYKPNTWCIRCLWSTKPVETSNSFDVLKSEDAQGMDNLACEDLKPVSEEVVENPTIQKDVLECNVKTTEVVGDIILKPANNSLKITEEVGHTDLMAAYVDNSSLTIKKPNELSRVLGLKTLATHGLAAVNSVPWDTIANYAKPFLNKVVSTTTNIVTRCLNRVCTNYMPYFFTLLLQLCTFTRSTNSRIKASMPTTIAKNTVKSVGKFCLEASFNYLKSPNFSKLINIIIWFLLLSVCLGSLIYSTAALGVLMSNLGMPSYCTGYREGYLNSTNVTIATYCTGSIPCSVCLSGLDSLDTYPSLETIQITISSFKWDLTAFGLVAEWFLAYILFTRFFYVLGLAAIMQLFFSYFAVHFISNSWLMWLIINLVQMAPISAMVRMYIFFASFYYVWKSYVHVVDGCNSSTCMMCYKRNRATRVECTTIVNGVRRSFYVYANGGKGFCKLHNWNCVNCDTFCAGSTFISDEVARDLSLQFKRPINPTDQSSYIVDSVTVKNGSIHLYFDKAGQKTYERHSLSHFVNLDNLRANNTKGSLPINVIVFDGKSKCEESSAKSASVYYSQLMCQPILLLDQALVSDVGDSAEVAVKMFDAYVNTFSSTFNVPMEKLKTLVATAEAELAKNVSLDNVLSTFISAARQGFVDSDVETKDVVECLKLSHQSDIEVTGDSCNNYMLTYNKVENMTPRDLGACIDCSARHINAQVAKSHNIALIWNVKDFMSLSEQLRKQIRSAAKKNNLPFKLTCATTRQVVNVVTTKIALKGG

SEQ ID NO: 16072 - protein, 1946 aa, Artificial Sequence
  SARS-CoV-2__MT764179.1__non-structural protein 3 (NSP3)
MAPTKVTFGDDTVIEVQGYKSVNITFELDERIDKVLNEKCSAYTVELGTEVNEFACVVADAVIKTLQPVSELLTPLGIDLDEWSMATYYLFDESGEFKLASHMYCSFYPPDEDEEEGDCEEEEFEPSTQYEYGTEDDYQGKPLEFGATSAALQLEEEQEEDWLDDDSQQTVGQQDGSEDNQTTTIQTIVEVQPQLEMELTPVVQTIEVNSFSGYLKLTDNVYIKNADIVEEAKKVKPTVVVNAANVYLKHGGGVAGALNKATNNAMQVESDDYIATNGPLKVGGSCVLSGHNLAKHCLHVVGPNVNKGEDIQLLKSAYENFNQHEVLLAPLLSAGIFGADPIHSLRVCVDTVRTNVYLAVFDKNLYDKLVSSFLEMKSEKQVEQKIAEIPKEEVKPFITESKPSVEQRKQDDKKIKACVEEVTTTLEETKFLTENLLLYIDINGNLHPDSATLVSDIDITFLKKDAPYIVGDVVQEGVLTAVVIPTKKAGGTTEMLAKALRKVPTDNYITTYPGQGLNGYTVEEAKTVLKKCKSAFYILPSIISNEKQEILGTVSWNLREMLAHAEETRKLMPVCVETKAIVSTIQRKYKGIKIQEGVVDYGARFYFYTSKTTVASLINTLNDLNETLVTMPLGYVTHGLNLEEAARYMRSLKVPATVSVSSPDAVTAYNGYLTSSSKTPEEHFIETISLAGSYKDWSYSGQSTQLGIEFLKRGDKSVYYTSNPTTFHLDGEVITFDNLKTLLSLREVRTIKVFTTVDNINLHTQVVDMSMTYGQQFGPTYLDGSDVTKIKPHNSHEGKTFYVLPNDDTLRVEAFEYYHTTDPSFLGRYMSALNHTKKWKYPQVNGLTSIKWADNNCYLATALLTLQQIELKFNPPALQDAYYRARAGEAANFCALILAYCNKTVGELGDVRETMSYLFQHANLDSCKRVLNVVCKTCGQQQTTLKGVEAVMYMGTLSYEQFKKGVQIPCTCGKQATKYLVQQESPFVMMSAPPAQYELKHGTFTCASEYTGNYQCGHYKHITSKETLYCIDGALLTKSSEYKGPITDVFYKENSYTTTIKPVTYKLDGVVCTEIDPKLDNYYKKDNSYFTEQPIDLVPNQPYPNASFDNFKFVCDNIKFADDLNQLTGYKKPASRELKVTFFPDLNGDVVAIDYKHYTPSFKKGAKLLHKPIVWHVNNATNKATYKPNTWCIRCLWSTKPVETSNSFDVLKSEDAQGMDNLACEDLKPVSEEVVENPTIQKDVLECNVKTTEVVGDIILKPANNSLKITEEVGHTDLMAAYVDNSSLTIKKPNELSRVLGLKTLATHGLAAVNSVPWDTIANYAKPFLNKVVSTTTNIVTRCLNRVCTNYMPYFFTLLLQLCTFTRSTNSRIKASMPTTIAKNTVKSVGKFCLEASFNYLKSPNFSKLINIIIWFLLLSVCLGSLIYSTAALGVLMSNLGMPSYCTGYREGYLNSTNVTIATYCTGSIPCSVCLSGLDSLDTYPSLETIQITISSFKWDLTAFGLVAEWFLAYILFTRFFYVLGLAAIMQLFFSYFAVHFISNSWLMWLIINLVQMAPISAMVRMYIFFASFYYVWKSYVHVVDGCNSSTCMMCYKRNRATRVECTTIVNGVRRSFYVYANGGKGFCKLHNWNCVNCDTFCAGSTFISDEVARDLSLQFKRPINPTDQSSYIVDSVTVKNGSIHLYFDKAGQKTYERHSLSHFVNLDNLRANNTKGSLPINVIVFDGKSKCEESSAKSASVYYSQLMCQPILLLDQALVSDVGDSAEVAVKMFDAYVNTFSSTFNVPMEKLKTLVATAEAELAKNVSLDNVLSTFISAARQGFVDSDVETKDVVECLKLSHQSDIEVTGDSCNNYMLTYNKVENMTPRDLGACIDCSARHINAQVAKSHNIALIWNVKDFMSLSEQLRKQIRSAAKKNNLPFKLTCATTRQVVNVVTTKIALKGG

SEQ ID NO: 16073 - protein, 1946 aa, Artificial Sequence
  SARS-CoV-2__MT755602.1__non-structural protein 3 (NSP3)
MAPTKVTFGDDTVIEVQGYKSVNITFELDERIDKVLNEKCSAYTVELGTEVNEFACVVADAVIKTLQPVSELLTPLGIDLDEWSMATYYLFDESGEFKLASHMYCSFYPPDEDEEEGDCEEEEFEPSTQYEYGTEDDYQGKPLEFGATSAALQPEEEQEEDWLDDDSQQTVGQQDGSEDNQTTTIQTIVEVQPQLEMELTPVVQTIEVNSFSGYLKLTDNVYIKNADIVEEAKKVKPTVVVNAANVYLKHGGGVAGALNKATNNAMQVESDDYIATNGPLKVGGSCVLSGHNLAKHCLHVVGPNVNKGEDIQLLKSAYENFNQHEVLLAPLLSAGIFGADPIHSLRVCVDTVRTNVYLAVFDKNLYDKLVSSFLEMKSEKQVEQKIAEIPKEEVKPFITESKPSVEQRKQDDKKIKACVEEVTTTLEETKFLTENLLLYIDINGNLHPDSATLVSDIDITFLKKDAPYIVGDVVQEGVLTAVVIPTKKAGGTTEMLAKALRKVPTDNYITTYPGQGLNGYTVEEAKTVLKKCKSAFYILPSIISNEKQEILGTVSWNLREMLAHAEETRKLMPVCVETKAIVSTIQRKYKGIKIQEGVVDYGARFYFYTSKTTVASLINTLNDLNETLVTMPLGYVTHGLNLEEAARYMRSLKVPATVSVSSPDAVTAYNGYLTSSSKTPEEHFIETISLAGSYKDWSYSGQSTQLGIEFLKRGDKSVYYTSNPTTFHLDGEVITFDNLKTLLSLREVRTIKVFTTVDNINLHTQVVDMSMTYGQQFGPTYLDGADVTKIKPHNSHEGKTFYVLPNDDTLRVEAFEYYHTTDPSFLGRYMSALNHTKKWKYPQVNGLTSIKWADNNCYLATALLTLQQIELKFNPPALQDAYYRARAGEAANFCALILAYCNKTVGELGDVRETMSYLFQHANLDSCKRVLNVVCKTCGQQQTTLKGVEAVMYMGTLSYEQFKKGVQIPCTCGKQATKYLVQQESPFVMMSAPPAQYELKHGTFTCASEYTGNYQCGHYKHITSKETLYCIDGALLTKSSEYKGPITDVFYKENSYTTTIKPVTYKLDGVVCTEIDPKLDNYYKKDNSYFTEQPIDLVPNQPYPNASFDNFKFVCDNIKFADDLNQLTGYKKPASRELKVTFFPDLNGDVVAIDYKHYTPSFKKGAKLLHKPIVWHVNNATNKATYKPNTWCIRCLWSTKPVETSNSFDVLKSEDAQGMDNLACEDLKPVSEEVVENPTIQKNVLECNVKTTEVVGDIILKPANNSLKITEEVGHTDLMAAYVDNSSLTIKKPNELSRVLGLKTLATHGLAAVNSVPWDTIANYAKPFLNKVVSTTTNIVTRCLNRVCTNYMPYFFTLLLQLCTFTRSTNSRIKASMPTTIAKNTVKSVGKFCLEASFNYLKSPNFSKLINIIIWFLLLSVCLGSLIYSTAALGVLMSNLGMPSYCTGYREGYLNSTNVTIATYCTGSIPCSVCLSGLDSLDTYPSLETIQITISSFKWDLTAFGLVAEWFLAYILFTRFFYVLGLAAIMQLFFSYFAVHFISNSWLMWLIINLVQMAPISAMVRMYIFFASFYYVWKSYVHVVDGCNSSTCMMCYKRNRATRVECTTIVNGVRRSFYVYANGGKGFCKLHNWNCVNCDTFCAGSTFISDEVARDLSLQFKRPINPTDQSSYIVDSVTVKNGSIHLYFDKAGQKTYERHSLSHFVNLDNLRANNTKGSLPINVIVFDGKSKCEESSAKSASVYYSQLMCQPILLLDQALVSDVGDSAEVAVKMFDAYVNTFSSTFNVPMEKLKTLVATAEAELAKNVSLDNVLSTFISAARQGFVDSDVETKDVVECLKLSHQSDIEVTGDSCNNYMLTYNKVENMTPRDLGACIDCSARHINAQVAKSHNIALIWNVKDFMSLSEQLRKQIRSAAKKNNLPFKLTCATTRQVVNVVTTKIALKGG

SEQ ID NO: 16074 - protein, 1946 aa, Artificial Sequence
  SARS-CoV-2__MT755830.1__non-structural protein 3 (NSP3)
MAPTKVTFGDDTVIEVQGYKSVNITFELDERIDKVLNEKCSAYTVELGTEVDEFACVVADAVIKTLQPVSELLTPLGIDLDEWSMATYYLFDESGEFKLASHMYCSFYPPDEDEEEGDCEEEEFEPSTQYEYGTEDDYQGKPLEFGATSAALQPEEEQEEDWLDDDSQQTVGQQDGSEDNQTTTIQTIVEVQPQLEMELTPVVQTIEVNSFSGYLKLTDNVYIKNADIVEEAKKVKPTVVVNAANVYLKHGGGVAGALNKATNNAMQVESDDYIATNGPLKVGGSCVLSGHNLAKHCLHVVGPNVNKGEDIQLLKSAYENFNQHEVLLAPLLSAGIFGADPIHSLRVCVDTVRTNVYLAVFDKNLYDKLVSSFLEMKSEKQVEQKIAEIPKEEVKPFITESKPSVEQRKQDDKKIKACVEEVTTTLEETKFLTENLLLYIDINGNLHPDSATLVSDIDITFLKKDAPYIVGDVVQEGVLTAVVIPTKKAGGTTEMLAKALRKVPTDNYITTYPGQGLNGYTVEEAKTVLKKCKSAFYILPSIISNEKQEILGTVSWNLREMLAHAEETRKLMPVCVETKAIVSTIQRKYKGIKIQEGVVDYGARFYFYTSKTTVASLINTLNDLNETLVTMPLGYVTHGLNLEEAARYMRSLKVPATVSVSSPDAVTAYNGYLTSSSKTPEEHFIETISLAGSYKDWSYSGQSTQLGIEFLKRGDKSVYYTSNPTTFHLDGEVITFDNLKTLLSLREVRTIKVFTTVDNINLHTQVVDMSMTYGQQFGPTYLDGADVTKIKPHNSHEGKTFYVLPNDDTLRVEAFEYYHTTDPSFLGRYMSALNHTKKWKYPQVNGLTSIKWADNNCYLATALLTLQQIELKFNPPALQDAYYRARAGEAANFCALILAYCNKTVGELGDVRETMSYLFQHANLDSCKRVLNVVCKTCGQQQTTLKGVEAVMYMGTLSYEQFKKGVQIPCTCGKQATKYLVQQESPFVMMSAPPAQYELKHGTFTCASEYTGNYQCGHYKHITSKETLYCIDGALLTKSSEYKGPITDVFYKENSYTTTIKPVTYKLDGVVCTEIDPKLDNYYKKDNSYFTEQPIDLVPNQPYPNASFDNFKFVCDNIKFADDLNQLTGYKKPASRELKVTFFPDLNGDVVAIDYKHYTPSFKKGAKLLHKPIVWHVNNATNKATYKPNTWCIRCLWSTKPVETSNSFDVLKSEDAQGMDNLACEDLKPVSEEVVENPTIQKDVLECNVKTTEVVGDIILKPANNSLKITEEVGHTDLMAAYVDNSSLTIKKPNELSRVLGLKTLATHGLAAVNSVPWDTIANYAKPFLNKVVSTTTNIVTRCLNRVCTNYMPYFFTLLLQLCTFTRSTNSRIKASMPTTIAKNTVKSVGKFCLEASFNYLKSPNFSKLINIIIWFLLLSVCLGSLIYSTAALGVLMSNLGMPSYCTGYREGYLNSTNVTIATYCTGSIPCSVCLSGLDSLDTYPSLETIQITISSFKWDLTAFGLVAEWFLAYILFTRFFYVLGLAAIMQLFFSYFAVHFISNSWLMWLIINLVQMAPISAMVRMYIFFASFYYVWKSYVHVVDGCNSSTCMMCYKRNRATRVECTTIVNGVRRSFYVYANGGKGFCKLHNWNCVNCDTFCAGSTFISDEVARDLSLQFKRPINPTDQSSYIVDSVTVKNGSIHLYFDKAGQKTYERHSLSHFVNLDNLRANNTKGSLPINVIVFDGKSKCEESSAKSASVYYSQLMCQPILLLDQALVSDVGDSAEVAVKMFDAYVNTFSSTFNVPMEKLKTLVATAEAELAKNVSLDNVLSTFISAARQGFVDSDVETKDVVECLKLSHQSDIEVTGDSCNNYMLTYNKVENMTPRDLGACIDCSARHINAQVAKSHNIALIWNVKDFMSLSEQLRKQIRSAAKKNNLPFKLTCATTRQVVNVVTTKIALKGG

SEQ ID NO: 16075 - protein, 1946 aa, Artificial Sequence
  SARS-CoV-2__MT755834.1__non-structural protein 3 (NSP3)
MAPTKVTFGDDTVIEVQGYKSVNITFELDERIDKVLNEKCSAYTVELGTEVNEFACVVADAVIKTLQPVSELLTPLGIDLDEWSMATYYLFDESGEFKLASHMYCSFYPPDEDEEEGDCEEEEFEPSTQYEYGTEDDYQGKPLEFGATSAALQPEEEQEEDWLDDDSQQTVGQQDGSEDNQTTTIQTIVEVQPQLEMELTPVVQTIEVNSFSGYLKLTDNVYIKNADIVEEAKKVKPTVVVNAANVYLKHGGGVAGALNKATNNAMQVESDDYIATNGPLKVGGSCVLSGHNLAKHCLHVVGPNVNKGEDIQLLKSAYENFNQHEVLLAPLLSAGIFGADPIHSLRVCVDTVRTNVYLAVFDKNLYDKLVSSFLEMKSEKQVEQKIAEIPKEEVKPFITESKPSVEQRKQDDKKIKACVEEVTTTLEETKFLTENLLLYIDINGNLHPDSATLVSDIDITFLKKDAPYIVGDVVQEGVLTAVVIPTKKAGGTTEMLAKALRKVPTDNYITTYPGQGLNGYTVEEAKTVLKKCKSAFYILPSIISNEKQEILGTVSWNLREMLAHAEETRKLMPVCVETKAIVSTIQRKYKGIKIQVGVVDYGARFYFYTSKTTVASLINTLNDLNETLVTMPLGYVTHGLNLEEAARYMRSLKVPATVSVSSPDAVTAYNGYLTSSSKTPEEHFIETISLAGSYKDWSYSGQSTQLGIEFLKRGDKSVYYTSNPTTFHLDGEVITFDNLKTLLSLREVRTIKVFTTVDNINLHTQVVDMSMTYGQQFGPTYLDGADVTKIKPHNSHEGKTFYVLPNDDTLRVEAFEYYHTTDPSFLGRYMSALNHTKKWKYPQVNGLTSIKWADNNCYLATALLTLQQIELKFNPPALQDAYYRARAGEAANFCALILAYCNKTVGELGDVRETMSYLFQHANLDSCKRVLNVVCKTCGQQQTTLKGVEAVMYMGTLSYEQFKKGVQIPCTCGKQATKYLVQQESPFVMMSAPPAQYELKHGTFTCASEYTGNYQCGHYKHITSKETLYCIDGALLTKSSEYKGPITDVFYKENSYTTTIKPVTYKLDGVVCTEIDPKLDNYYKKDNSYFTEQPIDLVPNQPYPNASFDNFKFVCDNIKFADDLNQLTGYKKPASRELKVTFFPDLNGDVVAIDYKHYTPSFKKGAKLLHKPIVWHVNNATNKATYKPNTWCIRCLWSTKPVETSNSFDVLKSEDAQGMDNLACEDLKPVSEEVVENPTIQKDVLECNVKTTEVVGDIILKPANNSLKITEEVGHTDLMAAYVDNSSLTIKKPNELSRVLGLKTLATHGLAAVNSVPWDTIANYAKPFLNKVVSTTTNIVTRCLNRVCTNYMPYFFTLLLQLCTFTRSTNSRIKASMPTTIAKNTVKSVGKFCLEASFNYLKSPNFSKLINIIIWFLLLSVCLGSLIYSTAALGVLMSNLGMPSYCTGYREGYLNSTNVTIATYCTGSIPCSVCLSGLDSLDTYPSLETIQITISSFKWDLTAFGLVAEWFLAYILFTRFFYVLGLAAIMQLFFSYFAVHFISNSWLMWLIINLVQMAPISAMVRMYIFFASFYYVWKSYVHVVDGCNSSTCMMCYKRNRATRVECTTIVNGVRRSFYVYANGGKGFCKLHNWNCVNCDTFCAGSTFISDEVARDLSLQFKRPINPTDQSSYIVDSVTVKNGSIHLYFDKAGQKTYERHSLSHFVNLDNLRANNTKGSLPINVIVFDGKSKCEESSAKSASVYYSQLMCQPILLLDQALVSDVGDSAEVAVKMFDAYVNTFSSTFNVPMEKLKTLVATAEAELAKNVSLDNVLSTFISAARQGFVDSDVETKDVVECLKLSHQSDIEVTGDSCNNYMLTYNKVENMTPRDLGACIDCSARHINAQVAKSHNIALIWNVKDFMSLSEQLRKQIRSAAKKNNLPFKLTCATTRQVVNVVTTKIALKGG

SEQ ID NO: 16076 - protein, 1946 aa, Artificial Sequence
  SARS-CoV-2__MT755883.1__non-structural protein 3 (NSP3)
MAPTKVTFGDDTVIEVQGYKSVNITFELDERIDKVLNEKCSAYTVELGTEVNEFACVVADAVIKTLQPVSELLTPLGIDLDEWSMATYYLFDESGEFKLASHMYCSFYPPDEDEEEGDCEEEEFEPSTQYEYGTEDDYQGKPLEFGATSAALQPEEEQEEDWLDDDSQQTVGQQDGSEDNQTTTIQTIVEVQPQLEMELTPVVQTIEVNSFSGYLKLTDNVYIKNADIVEEAKKVKPTVVVNAANVYLKHGGGVAGALNKATNNAMQVESDDYIATNGPLKVGGSCVLSGHNLAKHCLHVVGPNVNKGEDIQLLKSAYENFNQHEVLLAPLLSAGIFGADPIHSLRVCVDTVRTNVYLAVFDKNLYDKLVSSFLEMKSEKQVEQKIAEIPKEEVKPFITESKPSVEQRKQDDKKIKACVEEVTTTLEETKFLTENLLLYIDINGNLHPDSATLVSDIDITFLKKDAPYIVGDVVQEGVLTAVVIPTKKAGGTTEMLAKALRKVPTDNYITTYPGQGLNGYTVEEAKTVLKKCKSAFYILPSIISNEKQEILGTVSWNLREMLAHAEETRKLMPVCVETKAIVSTIQRKYKGIKIQEGVVDYGARFYFYTSKTTVASLINTLNDLNETLVTMPLGYVTHGLNLEEAARYMRSLKVPATVSVSSPDAVTAYNGYLTSSSKTPEEHFIETISLAGSYKDWSYSGQSTQLGIEFLKRGDKSVYYTSNPTTFHLDGEVITFDNLKTLLSLREVRTIKVFTTVDNINLHTQVVDMSMTYGQQFGPTYLDGADVTKIKPHNSHEGKTFYVLPNDDTLRVEAFEYYHTTDPSFLGRYMSALNHTKKWKYPQVNGLTSIKWADNNCYLATALLTLQQIELKFNPPALQDAYYRARAGEAANFCALILAYCNKTVGELGDVRETMSYLFQHANLDSCKRVLNVVCKTCGQQQTTLKGVEAVMYMGTLSYEQFKKGVQIPCTCGKQATKYLVQQESPFVMMSAPPAQYELKHGTFTCASEYTGNYQCGHYKHITSKETLYCIDGALLTKSSEYKGPITDVFYKENSYTTTIKPVTYKLDGVVCTEIDPKLDNYYKKDNSYFTEQPIDLVPNQPYPNASFDNFKFVCDNIKFADDLNQLTGYKKPASRELKVTFFPDLNGDVVAIDYKHYTPSFKKGAKLLHKPIVWHVNNATNKATYKPNTWCIRCLWSTKPVETSNSFDVLKSEDAQGMDNLACEDLKPVSEEVVENPTIQKDVLECNVKTTEVVGDIILKPANNSLKITEEVGHTDLMAAYVDNSSLTIKKPNELSRVLGLKTLATHGLAAVNSVPWDTIANYAKPFLNKVVSTTTNIVTRCLNRVCTNYMPYFFTLLLQLCTFTRSTNSRIKASMPTTIAKNTVKSVGKFCLEASFNYLKSPNFSKLINIIIWFLLLSVCLGSLIYSTAALGVLMSNLGMPSYCTGYREGYLNSTNVTIATYCTGSIPCSVCLSGLDSLDTYPSLETIQITISSFKWDLTAFGLVAEWFLAYILFTRFFYVLGLAAIMQLFFSYFAVHFISNSWLMWLIINLVQMAPISAMVRMYIFFASFYYVWKSYVHVVDGCNSSTCMMCYKRNRATRVECTTIVNGVRRSFYVYANGGKGFCKLHNWNCVNCDTFCAGSTFISDEVARDLSLQFKRPINPTDQSSYIVDSVTVKNGSIHLYFDKAGQKTYERHSLSHFVNLDNLRANNTKGSLPINVIVFDGKSKCEESSAKSASVYYSQLMCQPILLLDQALVSDVGDSAEVAVRMFDAYVNTFSSTFNVPMEKLKTLVATAEAELAKNVSLDNVLSTFISAARQGFVDSDVETKDVVECLKLSHQSDIEVTGDSCNNYMLTYNKVENMTPRDLGACIDCSARHINAQVAKSHNIALIWNVKDFMSLSEQLRKQIRSAAKKNNLPFKLTCATTRQVVNVVTTKIALKGG

SEQ ID NO: 16077 - protein, 1946 aa, Artificial Sequence
  SARS-CoV-2__MT755884.1__non-structural protein 3 (NSP3)
MAPTKVTFGDDTVIEVQGYKSVNITFELDERIDKVLNEKCSAYTVELGTEVNEFACVVADAVIKTLQPVSELLTPLGIDLDEWSMATYYLFDESGEFKLASHMYCSFYPPDEDEEEGDCEEEEFEPSTQYEYGTEDDYQGKPLEFGATSAALQPEEEQEEDWLDDDSQQTVGQQDGSEDNQTTTIQTIVEVQPQLEMELTPVVQTIEVNSFSGYLKLTDNVYIKNADIVEEAKKVKPTVVVNAANVYLKHGGGVAGALNKATNNAMQVESDDYIATNGPLKVGGSCVLSGHNLAKHCLHVVGPNVNKGEDIQLLKSAYENFNQHEVLLAPLLSAGIFGADPIHSLRVCVDTVRTNVYLAVFDKNLYDKLVSSFLEMKSEKQVEQKIAEIPKEEVKPFITESKPSVEQRKQDDKKIKACVEEVTTTLEETKFLTENLLLYIDINGNLHPDSATLVSDIDITFLKKDAPYIVGDVVQEGVLTAVVIPTKKAGGTTEMLAKALRKVPTDNYITTYPGQGLNGYTVEEAKTVLKKCKSAFYILPSIISNEKQEILGTVSWNLREMLAHAEETRKLMPVCVETKAIVSTIQRKYKGIKIQEGVVDYGARFYFYTSKTTVASLINTLNDLNETLVTMPLGYVTHGLNLEEAARYMRSLKVPATVSVSSPDAVTAYNGYLTSSSKTPEEHFIETISLAGSYKDWSYSGQSTQLGIEFLKRGDKSVYYTSNPTTFHLDGEVITFDNLKTLLSLREVRTIKVFTTVDNINLHTQVVDMSMTYGQQFGPTYLDGADVTKIKPHNSHEGKTFYVLPNDDTLRVEAFEYYHTTDPSFLGRYMSALNHTKKWKYPQVNGLTSIKWAGNNCYLATALLTLQQIELKFNPPALQDAYYRARAGEAANFCALILAYCNKTVGELGDVRETMSYLFQHANLDSCKRVLNVVCKTCGQQQTTLKGVEAVMYMGTLSYEQFKKGVQIPCTCGKQATKYLVQQESPFVMMSAPPAQYELKHGTFTCASEYTGNYQCGHYKHITSKETLYCIDGALLTKSSEYKGPITDVFYKENSYTTTIKPVTYKLDGVVCTEIDPKLDNYYKKDNSYFTEQPIDLVPNQPYPNASFDNFKFVCDNIKFADDLNQLTGYKKPASRELKVTFFPDLNGDVVAIDYKHYTPSFKKGAKLLHKPIVWHVNNATNKATYKPNTWCIRCLWSTKPVETSNSFDVLKSEDAQGMDNLACEDLKPVSEEVVENPTIQKDVLECNVKTTEVVGDIILKPANNSLKITEEVGHTDLMAAYVDNSSLTIKKPNELSRVLGLKTLATHGLAAVNSVPWDTIANYAKPFLNKVVSTTTNIVTRCLNRVCTNYMPYFFTLLLQLCTFTRSTNSRIKASMPTTIAKNTVKSVGKFCLEASFNYLKSPNFSKLINIIIWFLLLSVCLGSLIYSTAALGVLMSNLGMPSYCTGYREGYLNSTNVTIATYCTGSIPCSVCLSGLDSLDTYPSLETIQITISSFKWDLTAFGLVAEWFLAYILFTRFFYVLGLAAIMQLFFSYFAVHFISNSWLMWLIINLVQMAPISAMVRMYIFFASFYYVWKSYVHVVDGCNSSTCMMCYKRNRATRVECTTIVNGVRRSFYVYANGGKGFCKLHNWNCVNCDTFCAGSTFISDEVARDLSLQFKRPINPTDQSSYIVDSVTVKNGSIHLYFDKAGQKTYERHSLSHFVNLDNLRANNTKGSLPINVIVFDGKSKCEESSAKSASVYYSQLMCQPILLLDQALVSDVGDSAEVAVKMFDAYVNTFSSTFNVPMEKLKTLVATAEAELAKNVSLDNVLSTFISAARQGFVDSDVETKDVVECLKLSHQSDIEVTGDSCNNYMLTYNKVENMTPRDLGACIDCSARHINAQVAKSHNIALIWNVKDFMSLSEQLRKQIRSAAKKNNLPFKLTCATTRQVVNVVTTKIALKGG

SEQ ID NO: 16078 - protein, 1946 aa, Artificial Sequence
  SARS-CoV-2__MT755885.1__non-structural protein 3 (NSP3)
MAPTKVTFGDDTVIEVQGYKSVNITFELDERIDKVLNEKCSAYTVELGTEVNEFACVVADAVIKTLQPVSELLTPLGIDLDEWSMATYYLFDESGEFKLASHMYCSFYPPDEDEEEGDCEEEEFEPSTQYEYGTEDDYQGKPLEFGATSAALQPEEEQEEDWLDDDSQQTVGQQDGSEDNQTTTIQTIVEVQPQLEMELTPVVQTIEVNSFSGYLKLTDNVYIKNADIVEEAKKVKPTVVVNAANVYLKHGGGVAGALNKATNNAMQVESDDYIATNGPLKVGGSCVLSGHNLAKHCLHVVGPNVNKGEDIQLLKSAYENFNQHEVLLAPLLSAGIFGADPIHSLRVCVDTVRTNVYLAVFDKNLYDKLVSSFLEMKSEKQVEQKIAEIPKEEVKPFITESKPSVEQRKQDDKKIKACVEEVTTTLEETKFLTENLLLYIDINGNLHPDSATLVSDIDITFLKKDAPYIVGDVVQEGVLTAVVIPTKKAGGTTEMLAKALRKVPTDNYITTYPGQGLNGYTVEEAKTVLKKCKSAFYILPSIISNEKQEILGTVSWNLREMLAHAEETRKLMPVCVETKAIVSTIQRKYKGIKIQEGVVDYGARFYFYTSKTTVASLINTLNDLNETLVTMPLGYVTHGLNLEEAARYMRSLKVPATVSVSSPDAVTAYNGYLTSSSKTPEEHFIETISLAGSYKDWSYSGQSTQLGIEFLKRGDKSVYYTSNPTTFHLDGEVITFDNLKTLLSLREVRTIKVFTTVDNINLHTQVVDMSMTYGQQFGPTYLDGADVTKIKPHNSHEGKTFYVLPNDDTLRVEAFEYYHTTDPSFLGRYMSALNHTKKWKYPQVNGLTSIKWADNNCYLATALLTLQQIELKFNPPALQDAYYRARAGEAANFCALILAYCNKTVGELGDVRETMSYLFQHANLDSCKRVLNVVCKTCGQQQTTLKGVEAVMYMGTLSYEQFKKGVQIPCTCGKQATKYLVQQESPFVMMSAPPAQYELKHGTFTCASEYTGNYQCGHYKHITSKETLYCIDGALLTKSSEYKGPITDVFYKENSYTTTIKPVTYKLDGVVCTEIDPKLDNYYKKDNSYFTEQPIDLVPNQPYPNASFDNFKFVCDNIKFADDLNQLTGYKKPASRELKVTFFPDLNGDVVAIDYKHYTPSFKKGAKLLHKPIVWHVNNATNKATYKPNTWCIRCLWSTKPVETSNSFDVLKSEDAQGMDNLACEDLKPVSEEVVENPTIQKDVLECNVKTTEVVGDIILKPANNSLKITEEVGHTDLMAAYVDNSSLTIKKPNELSRVLGLKTLATHGLAAVNSVPWDTIANYAKPFLNKVVSTTTNIVTRCLNRVCTNYMPYFFTLLLQLCTFTRSTNSRIKASMPTTIAKNTVKSVGKFCLEASFNYLKSPNFSKLINIIIWFLLLSVCLGSLIYSTAALGVLMSNLGMPSYCTGYRKGYLNSTNVTIATYCTGSIPCSVCLSGLDSLDTYPSLETIQITISSFKWDLTAFGLVAEWFLAYILFTRFFYVLGLAAIMQLFFSYFAVHFISNSWLMWLIINLVQMAPISAMVRMYIFFASFYYVWKSYVHVVDGCNSSTCMMCYKRNRATRVECTTIVNGVRRSFYVYANGGKGFCKLHNWNCVNCDTFCAGSTFISDEVARDLSLQFKRPINPTDQSSYIVDSVTVKNGSIHLYFDKAGQKTYERHSLSHFVNLDNLRANNTKGSLPINVIVFDGKSKCEESSAKSASVYYSQLMCQPILLLDQALVSDVGDSAEVAVKMFDAYVNTFSSTFNVPMEKLKTLVATAEAELAKNVSLDNVLSTFISAARQGFVDSDVETKDVVECLKLSHQSDIEVTGDSCNNYMLTYNKVENMTPRDLGACIDCSARHINAQVAKSHNIALIWNVKDFMSLSEQLRKQIRSAAKKNNLPFKLTCATTRQVVNVVTTKIALKGG

SEQ ID NO: 16079 - protein, 1946 aa, Artificial Sequence
  SARS-CoV-2__MT755889.1__non-structural protein 3 (NSP3)
MAPTKVTFGDDTVIEVQGYKSVNITFELDERIDKVLNEKCSAYTVELGTEVNEFACVVADAVIKTLQPVSELLTPLGIDLDEWSMATYYLFDESGEFKLASHMYCSFYPPDEDEEEGDCEEEEFEPSTQYEYGTEDDYQGKPLEFGATSAALQPEEEQEEDWLDDDSQQTVGQQDGSEDNQTTTIQTIVEVQPQLEMELTPVVQTIEVNSFSGYLKLTDNVYIKNADIVEEAKKVKPTVVVNAANVYLKHGGGVAGALNKATNNAMQVESDDYIATNGPLKVGGSCVLSGHNLAKHCLHVVGPNVNKGEDIQLLKSAYENFNQHEVLLAPLLSAGIFGADPIHSLRVCVDTVRTNVYLAVFDKNLYDKLVSSFLEMKSEKQVEQKIAEIPKEEVKPFITESKPSVEQRKQDDKKIKACVEEVTTTLEETKFLTENLLLYIDINGNLHPDSATLVSDIDITFLKKDAPYIVGDVVQEGVLTAVVIPTKKAGGTTEMLAKALRKVPTDNYITTYPGQGLNGYTVEEAKTVLKKCKSAFYILPSIISNEKQEILGTVSWNLREMLAHAEETRKLMPVCVETKAIVSTIQRKYKGIKIQEGVVDYGARFYFYTSKTTVASLINTLNDLNETLVTMPLGYVTHGLNLEEAARYMRSLKVPATVSVSSPDAVTAYNGYLTSSSKTPEEHFIETISLAGSYKDWSYSGQSTQLGIEFLKRGDKSVYYTSNPTTFHLDGEVITFDNLKTLLSLREVRTIKVFTTVDNINLHTQVVDMSMTYGQQFGPTYLDGADVTKIKPHNSHEGKTFYVLPNDDTLRVEAFEYYHTTDPSFLGRYMSALNHTKKWKYPQVNGLTSIKWADNNCYLATALLTLQQIELKFNPPALQDAYYRARAGEAANFCALILAYCNKTVGELGDVRETMSYLFQHANLDSCKRVLNVVCKTCGQQQTTLKGVEAVMYMGTLSYEQFKKGVQIPCTCGKQATKYLVQQESPFVMMSAPPAQYELKHGTFTCASEYTGNYQCGHYKHITSKETLYCIDGALLTKSSEYKGPITDVFYKENSYTTTIKPVTYKLDGVVCTEIDPKLDNYYKKDNSYFTEQPIDLVPNQPYPNASFDNFKFVCDNIKFADDLNQLTGYKKPASRELKVTFFPDLNGDVVAIDYKHYTPSFKKGAKLLHKPIVWHVNNATNKATYKPNTWCIRCLWSTKPVETSNSFDVLKSEDAQGMDNLACEDLKPVSEEVVENPTIQKDVLECNVKTTEVVGDIILKPANNSLKITEEVGHTDLMAAYVDNSSLTIKKPNELSRVLGLKTLATHGLAAVNSVPWDTIANYAKPFLNKVVSTTTNIVTRCLNRVCTNYMPYFFTLLLQLCTFTRSTNSRIKASMPTTIAKNTVKSVGKFCLEASFNYLKSPNFSKLINIIIWFLLLSVCLGSLIYSTAALGVLMSNLGMPSYCTGYREGYLNSTNVTIATYCTGSIPCSVCLSGLDSLDTYPSLETIQITISSFKWDLTAFGLVAEWFLAYILFTRFFYVLGLAAIMQLFFSYFAVHFISNSWLMWLIINLVQTAPISAMVRMYIFFASFYYVWKSYVHVVDGCNSSACMMCYKRNRATRVECTTIVNGVRRSFYVYANGGKGFCKLHNWNCVNCDTFCAGSTFISDEVARDLSLQFKRPINPTDQSSYIVDSVTVKNGSIHLYFDKAGQKTYERHSLSHFVNLDNLRANNTKGSLPINVIVFDGKSKCEESSAKSASVYYSQLMCQPILLLDQALVSDVGDSAEVAVKMFDAYVNTFSSTFNVPMEKLKTLVATAEAELAKNVSLDNVLSTFISAARQGFVDSDVETKDVVECLKLSHQSDIEVTGDSCNNYMLTYNKVENMTPRDLGACIDCSARHINAQVAKSHNIALIWNVKDFMSLSEQLRKQIRSAAKKNNLPFKLTCATTRQVVNVVTTKIALKGG

SEQ ID NO: 16080 - protein, 1946 aa, Artificial Sequence
  SARS-CoV-2__MT755897.1__non-structural protein 3 (NSP3)
MAPTKVTFGDDTVIEVQGYKSVNITFELDERIDKVLNEKCSAYTVELGTEVNEFACVVADAVIKTLQPVSELLTPLGIDLDEWSMATYYLFDESGEFKLASHMYCSFYPPDEDEEEGDCEEEEFEPSTQYEYGTEDDYQGKPLEFGATSAALQPEEEQEEDWLDDDSQQTVGQQDGSEDNQTTTIQTIVEVQPQLEMELTPVVQTIEVNSFSGYLKLTDNVYIKNADIVEEAKKVKPTVVVNAANVYLKHGGGIAGALNKATNNAMQVESDDYIATNGPLKVGGSCVLSGHNLAKHCLHVVGPNVNKGEDIQLLKSAYENFNQHEVLLAPLLSAGIFGADPIHSLRVCVDTVRTNVYLAVFDKNLYDKLVSSFLEMKSEKQVEQKIAEIPKEEVKPFITESKPSVEQRKQDDKKIKACVEEVTTTLEETKFLTENLLLYIDINGNLHPDSATLVSDIDITFLKKDAPYIVGDVVQEGVLTAVVIPTKKAGGTTEMLAKALRKVPTDNYITTYPGQGLNGYTVEEAKTVLKKCKSAFYILPSIISNEKQEILGTVSWNLREMLAHAEETRKLMPVCVETKAIVSTIQRKYKGIKIQEGVVDYGARFYFYTSKTTVASLINTLNDLNETLVTMPLGYVTHGLNLEEAARYMRSLKVPATVSVSSPDAVTAYNGYLTSSSKTPEEHFIETISLAGSYKDWSYSGQSTQLGIEFLKRGDKSVYYTSNPTTFHLDGEVITFDNLKTLLSLREVRTIKVFTTVDNINLHTQVVDMSMTYGQQFGPTYLDGADVTKIKPHNSHEGKTFYVLPNDDTLRVEAFEYYHTTDPSFLGRYMSALNHTKKWKYPQVNGLTSIKWADNNCYLATALLTLQQIELKFNPPALQDAYYRARAGEAANFCALILAYCNKTVGELGDVRETMSYLFQHANLDSCKRVLNVVCKTCGQQQTTLKGVEAVMYMGTLSYEQFKKGVQIPCTCGKQATKYLVQQESPFVMMSAPPAQYELKHGTFTCASEYTGNYQCGHYKHITSKETLYCIDGALLTKSSEYKGPITDVFYKENSYTTTIKPVTYKLDGVVCTEIDPKLDNYYKKDNSYFTEQPIDLVPNQPYPNASFDNFKFVCDNIKFADDLNQLTGYKKPASRELKVTFFPDLNGDVVAIDYKHYTPSFKKGAKLLHKPIVWHVNNATNKATYKPNTWCIRCLWSTKPVETSNSFDVLKSEDAQGMDNLACEDLKPVSEEVVENPTIQKDVLECNVKTTEVVGDIILKPANNSLKITEEVGHTDLMAAYVDNSSLTIKKPNELSRVLGLKTLATHGLAAVNSVPWDTIANYAKPFLNKVVSTTTNIVTRCLNRVCTNYMPYFFTLLLQLCTFTRSTNSRIKASMPTTIAKNTVKSVGKFCLEASFNYLKSPNFSKLINIIIWFLLLSVCLGSLIYSTAALGVLMSNLGMPSYCTGYREGYLNSTNVTIATYCTGSIPCSVCLSGLDSLDTYPSLETIQITISSFKWDLTAFGLVAEWFLAYILFTRFFYVLGLAAIMQLFFSYFAVHFISNSWLMWLIINLVQMAPISAMVRMYIFFASFYYVWKSYVHVVDGCNSSTCMMCYKRNRATRVECTTIVNGVRRSFYVYANGGKGFCKLHNWNCVNCDTFCAGSTFISDEVARDLSLQFKRPINPTDQSSYIVDSVTVKNGSIHLYFDKAGQKTYERHSLSHFVNLDNLRANNTKGSLPINVIVFDGKSKCEESSAKSASVYYSQLMCQPILLLDQALVSDVGDSAEVAVKMFDAYVNTFSSTFNVPMEKLKTLVATAEAELAKNVSLDNVLSTFISAARQGFVDSDVETKDVVECLKLSHQSDIEVTGDSCNNYMLTYNKVENMTPRDLGACIDCSARHINAQVAKSHNIALIWNVKDFMSLSEQLRKQIRSAAKKNNLPFKLTCATTRQVVNVVTTKIALKGG

SEQ ID NO: 16081 - protein, 1946 aa, Artificial Sequence
  SARS-CoV-2__MT755898.1__non-structural protein 3 (NSP3)
MAPTKVTFGDDTVIEVQGYKSVNITFELDERIDKVLNEKCSAYTVELGTEVNEFACVVADAVIKTLQPVSELLTPLGIDLDEWSMATYYLFDESGEFKLASHMYCSFYPPDEDEEEGDCEEEEFEPSTQYEYGTEDDYQGKPLEFGATSAALQPEEEQEEDWLDDDSQQTVGQQDGSEDNQTTTIQTIVEVQPQLEMELTPVVQTIEVNSFSGYLKLTDNVYIKNADIVEEAKKVKPTVVVNAANVYLKHGGGVAGALNKATNNAMQVESDDYIATNGPLKVGGSCVLSGHNLAKHCLHVVGPNVNKGEDIQLLKSAYENFNQHEVLLAPLLSAGIFGADPIHSLRVCVDTVRTNVYLAVFDKNLYDKLVSSFLEMKSEKQVEQKIAEIPKEEVKPFITESKPSVEQRKQDDKKIKACVEEVTTTLEETKFLTENLLLYIDINGNLHPDSATLVSDIDITFLKKDAPYIVGDVVQEGVLTAVVIPTKKAGGTTEMLAKALRKVPTDNYITTYPGQGLNGYTVEEAKTVLKKCKSAFYILPSIISNEKQEILGTVSWNLREMLAHAEETRKLMPVCVETKAIVSTIQRKYKGIKIQEGVVDYGARFYFYTSKTTVASLINTLNDLNETLVTMPLGYVTHGLNLEEAARYMRSLKVPATVSVSSPDAVTAYNGYLTSSSKTPEEHFIETISLAGSYKDWSYSGQSTQLGIEFLKRGDKSVYYTSNPTTFHLDGEVITFDNLKTLLSLREVRTIKVFTTVDNINLHTQVVDMSMTYGQQFGPTYLDGADVTKIKPHNSHEGKTFYVLPNDDTLRVEAFEYYHTTDPSFLGRYMSALNHTKKWKYPQVNGLTSIKWADNNCYLATALLTLQQIELKFNPPALQDAYYRARAGEAANFCALILAYCNKTVGELGDVRETMSYLFQHANLDSCKRVLNVVCKTCGQQQTTLKGVEAVMYMGTLSYEQFKKGVQIPCTCGKQATKYLVQQESPFVMMSAPPVQYELKHGTFTCASEYTGNYQCGHYKHITSKETLYCIDGALLTKSSEYKGPITDVFYKENSYTTTIKPVTYKLDGVVCTEIDPKLDNYYKKDNSYFTEQPIDLVPNQPYPNASFDNFKFVCDNIKFADDLNQLTGYKKPASRELKVTFFPDLNGDVVAIDYKHYTPSFKKGAKLLHKPIVWHVNNATNKATYKPNTWCIRCLWSTKPVETSNSFDVLKSEDAQGMDNLACEDLKPVSEEVVENPTIQKDVLECNVKTTEVVGDIILKPANNSLKITEEVGHTDLMAAYVDNSSLTIKKPNELSRVLGLKTLATHGLAAVNSVPWDTIANYAKPFLNKVVSTTTNIVTRCLNRVCTNYMPYFFTLLLQLCTFTRSTNSRIKASMPTTIAKNTVKSVGKFCLEASFNYLKSPNFSKLINIIIWFLLLSVCLGSLIYSTAALGVLMSNLGMPSYCTGYREGYLNSTNVTIATYCTGSIPCSVCLSGLDSLDTYPSLETIQITISSFKWDLTAFGLVAEWFLAYILFTRFFYVLGLAAIMQLFFSYFAVHFISNSWLMWLIINLVQMAPISAMVRMYIFFASFYYVWKSYVHVVDGCNSSTCMMCYKRNRATRVECTTIVNGVRRSFYVYANGGKGFCKLHNWNCVNCDTFCAGSTFISDEVARDLSLQFKRPINPTDQSSYIVDSVTVKNGSIHLYFDKAGQKTYERHSLSHFVNLDNLRANNTKGSLPINVIVFDGKSKCEESSAKSASVYYSQLMCQPILLLDQALVSDVGDSAEVAVKMFDAYVNTFSSTFNVPMEKLKTLVATAEAELAKNVSLDNVLSTFISAARQGFVDSDVETKDVVECLKLSHQSDIEVTGDSCNNYMLTYNKVENMTPRDLGACIDCSARHINAQVAKSHNIALIWNVKDFMSLSEQLRKQIRSAAKKNNLPFKLTCATTRQVVNVVTTKIALKGG

SEQ ID NO: 16082 - protein, 1946 aa, Artificial Sequence
  SARS-CoV-2__MT755916.1__non-structural protein 3 (NSP3)
MAPTKVTFGDDTVIEVQGYKSVNITFELDERIDKVLNEKCSAYTVELGTEVNEFACVVADAVIKTLQPVSELLTPLGIDLDEWSMATYYLFDESGEFKLASHMYCSFYPPDEDEEEGDCEEEEFEPSTQYEYGTEDDYQGKPLEFGATSAALQPEEEQEEDWLDDDSQQTVGQQDGSEDNQTTTIQTIVEVQPQLEMELTPVVQTIEVNSFSGYLKLTDNVYIKNADIVEEAKKVKPTVVVNAANVYLKHGGGVAGALNKATNNAMQVESDDYIATNGPLKVGGSCVLSGHNLAKHCLHVVGPNVNKGEDIQLLKSAYENFNQHEVLLAPLLSAGIFGADPIHSLRVCVDTVRTNVYLAVFDKNLYDKLVSSFLEMKSEKQVEQKIAEIPKEEVKPFITESKPSVEQRKQDDKKIKACVEEVTTTLEETKFLTENLLLYIDINGNLHPDSATLVSDIDITFLKKDAPYIVGDVVQEGVLTAVVIPTKKAGGTTEMLAKALRKVPTDNYITTYPGQGLNGYTVEEAKTVLKKCKSAFYILPSIISNEKQEILGTVSWNLREMLAHAEETRKLMPVCVETKAIVSTIQRKYKGIKIQEGVVDYGARFYFYTSKTTVASLINTLNDLNETLVTMPLGYVTHGLNLEEAARYMRSLKVPATVSVSSPDAVTAYNGYLTSSSKTPEEHFIETISLAGSYKDWSYSGQSTQLGIEFLKRGDKSVYYTSNPTTFHLDGEVITFDNLKTLLSLREVRTIKVFTTVDNINLHTQVVDMSMTYGQQFGPTYLDGADVTKIKPHNSHEGKTFYVLPNDDTLRVEAFEYYHTTDPSFLGRYMSALNHTKKWKYPQVNGLTSIKWADNNCYLATALLTLQQIELRFNPPALQDAYYRARAGEAANFCALILAYCNKTVGELGDVRETMSYLFQHANLDSCKRVLNVVCKTCGQQQTTLKGVEAVMYMGTLSYEQFKKGVQIPCTCGKQATKYLVQQESPFVMMSAPPAQYELKHGTFTCASEYTGNYQCGHYKHITSKETLYCIDGALLTKSSEYKGPITDVFYKENSYTTTIKPVTYKLDGVVCTEIDPKLDNYYKKDNSYFTEQPIDLVPNQPYPNASFDNFKFVCDNIKFADDLNQLTGYKKPASRELKVTFFPDLNGDVVAIDYKHYTPSFKKGAKLLHKPIVWHVNNATNKATYKPNTWCIRCLWSTKPVETSNSFDVLKSEDAQGMDNLACEDLKPVSEEVVENPTIQKDVLECNVKTTEVVGDIILKPANNSLKITEEVGHTDLMAAYVDNSSLTIKKPNELSRVLGLKTLATHGLAAVNSVPWDTIANYAKPFLNKVVSTTTNIVTRCLNRVCTNYMPYFFTLLLQLCTFTRSTNSRIKASMPTTIAKNTVKSVGKFCLEASFNYLKSPNFSKLINIIIWFLLLSVCLGSLIYSTAALGVLMSNLGMPSYCTGYREGYLNSTNVTIATYCTGSIPCSVCLSGLDSLDTYPSLETIQITISSFKWDLTAFGLVAEWFLAYILFTRFFYVLGLAAIMQLFFSYFAVHFISNSWLMWLIINLVQMAPISAMVRMYIFFASFYYVWKSYVHVVDGCNSSTCMMCYKRNRATRVECTTIVNGVRRSFYVYANGGKGFCKLHNWNCVNCDTFCAGSTFISDEVARDLSLQFKRPINPTDQSSYIVDSVTVKNGSIHLYFDKAGQKTYERHSLSHFVNLDNLRANNTKGSLPINVIVFDGKSKCEESSAKSASVYYSQLMCQPILLLDQALVSDVGDSAEVAVKMFDAYVNTFSSTFNVPMEKLKTLVATAEAELAKNVSLDNVLSTFISAARQGFVDSDVETKDVVECLKLSHQSDIEVTGDSCNNYMLTYNKVENMTPRDLGACIDCSARHINAHVAKSHNIALIWNVKDFMSLSEQLRKQIRSAAKKNNLPFKLTCATTRQVVNVVTTKIALKGG

SEQ ID NO: 16083 - protein, 1946 aa, Artificial Sequence
  SARS-CoV-2__MT757029.1__non-structural protein 3 (NSP3)
MAPTKVTFGDDTVIEVQGYKSVNITFELDERIDKVLNEKCSAYTVELGTEVNEFACVVADAVIKTLQPVSELLTPLGIDLDEWSMATYYLFDESGEFKLASHMYCSFYPPDEDEEEGDCEEEEFEPSTQYEYGTEDDYQGKPLEFGATSAALQLEEEQEEDWLDDDSQQTVGQQDGSEDNQTTTIQTIVEVQPQLEMELTPVVQTIEVNSFSGYLKLTDNVYIKNADIVEEAKKVKPTVVVNAANVYLKHGGGVAGALNKATNNAMQVESDDYIATNGPLKVGGSCVLSGHNLAKHCLHVVGPNVNKGEDIQLLKSAYENFNQHEVLLAPLLSAGIFGADPIHSLRVCVDTVRTNVYLAVFDKNLYDKLVSSFLEMKSEKQVEQKIAEIPKEEVKPFITESKPSVEQRKQDDKKIKACVEEVTTTLEETKFLTENLLLYIDINGNLHPDSATLVSDIDITFLKKDAPYIVGDVVQEGVLTAVVIPTKKAGGTTEMLAKALRKVPTDNYITTYPGQGLNGYTVEEAKTVLKKCKSAFYILPSIISNEKQEILGTVSWNLREMLAHAEETRKLMPVCVETKAIVSTIQRKYKGIKIQEGVVDYGARFYFYTSKTTVASLINTLNDLNETLVTMPLGYVTHGLNLEEAARYMRSLKVPATVSVSSPDAVTAYNGYLTSSSKTPEEHFIETISLAGSYKDWSYSGQSTQLGIEFLKRGDKSVYYTSNPTTFHLDGEVITFDNLKTLLSLREVRTIKVFTTVDNINLHTQVVDMSMTYGQQFGLTYLDGADVTKIKPHNSHEGKTFYVLPNDDTLRVEAFEYYHTTDPSFLGRYMSALNHTKKWKYPQVNGLTSIKWADNNCYLATALLTLQQIELKFNPPALQDAYYRARAGEAANFCALILAYCNKTVGELGDVRETMSYLFQHANLDSCKRVLNVVCKTCGQQQTTLKGVEAVMYMGTLSYEQFKKGVQIPCTCGKQATKYLVQQESPFVMMSAPPAQYELKHGTFTCASEYTGNYQCGHYKHITSKETLYCIDGALLTKSSEYKGPITDVFYKENSYTTTIKPVTYKLDGVVCTEIDPKLDNYYKKDNSYFTEQPIDLVPNQPYPNASFDNFKFVCDNIKFADDLNQLTGYKKPASRELKVTFFPDLNGDVVAIDYKHYTPSFKKGAKLLHKPIVWHVNNATNKATYKPNTWCIRCLWSTKPVETSNSFDVLKSEDAQGMDNLACEDLKPVSEEVVENPTIQKDVLECNVKTTEVVGDIILKPANNSLKITEEVGHTDLMAAYVDNSSLTIKKPNELSRVLGLKTLATHGLAAVNSVPWDTIANYAKPFLNKVVSTTTNIVTRCLNRVCTNYMPYFFTLLLQLCTFTRSTNSRIKASMPTTIAKNTVKSVGKFCLEASFNYLKSPNFSKLINIIIWFLLLSVCLGSLIYSTAALGVLMSNLGMPSYCTGYREGYLNSTNVTIATYCTGSIPCSVCLSGLDSLDTYPSLETIQITISSFKWDLTAFGLVAEWFLAYILFTRFFYVLGLAAIMQLFFSYFAVHFISNSWLMWLIINLVQMAPISAMVRMYIFFASFYYVWKSYVHVVDGCNSSTCMMCYKRNRATRVECTTIVNGVRRSFYVYANGGKGFCKLHNWNCVNCDTFCAGSTFISDEVARDLSLQFKRPINPTDQSSYIVDSVTVKNGSIHLYFDKAGQKTYERHSLSHFVNLDNLRANNTKGSLPINVIVFDGKSKCEESSAKSASVYYSQLMCQPILLLDQALVSDVGDSAEVAVKMFDAYVNTFSSTFNVPMEKLKTLVATAEAELAKNVSLDNVLSTFISAARQGFVDSDVETKDVVECLKLSHQSDIEVTGDSCNNYMLTYNKVENMTPRDLGACIDCSARHINAQVAKSHNIALIWNVKDFMSLSEQLRKQIRSAAKKNNLPFKLTCATTRQVVNVVTTKIALKGG

SEQ ID NO: 16084 - protein, 1946 aa, Artificial Sequence
  SARS-CoV-2__MT757047.1__non-structural protein 3 (NSP3)
MAPTKVTFGDDTVIEVQGYKSVNITFELDERIDKVLNEKCSAYTVELGTEVNEFACVVADAVIKTLQPVSELLTPLGIDLDEWSMATYYLFDESGEFKLASHMYCSFYPPDEDEEEGDCEEEEFEPSTQYEYGTEDDYQGKPLEFGATSAALQLEEEQEEDWLDDDSQQTVGQQDGSEDNQTTTIQTIVEVQPQLEMELTPVVQTIEVNSFSGYLKLTDNVYIKNADIVEEAKKVKPTVVVNAANVYLKHGGGVAGALNKATNNAMQVESDDYIATNGPLKVGGSCVLSGHNLAKHCLHVVGPNVNKGEDIQLLKSAYENFNQHEVLLAPLLSAGIFGADPIHSLRVCVDTVRTNVYLAVFDKNLYDKLVSSFLEMKSEKQVEQKIAEIPKEEVKPFITESKPSVEQRKQDDKKIKACVEEVTTTLEETKFLTENLLLYIDINGNLHPDSATLVSDIDITFLKKDAPYIVGDVVQEGVLTAVVIPTKKAGGTTEMLAKALRKVPTDNYITTYPGQGLNGYTVEEAKTVLKKCKSAFYILPSIISNEKQEILGTVSWNLREMLAHAEETRKLMPVCVETKAIVSTIQRKYKGIKIQEGVVDYGARFYFYTSKTTVASLINTLNDLNETLVTMPLGYVTHGLNLEEAARYMRSLKVPATVSVSSPDAVTAYNGYLTSSSKTPEEHFIETISLAGSYKDWSYSGQSTQLGIEFLKRGDKSVYYTSNPTTFHLDGEVITFDNLKTLLSLREVRTIKVFTTVDNINLHTQVVDMSMTYGQQFGPTYLDGADVTKIKPHNSHEGKTFYVLPNDDTLRVEAFEYYHATDPSFLGRYMSALNHTKKWKYPQVNGLTSIKWADNNCYLATALLTLQQIELKFNPPALQDAYYRARAGEAANFCALILAYCNKTVGELGDVRETMSYLFQHANLDSCKRVLNVVCKTCGQQQTTLKGVEAVMYMGTLSYEQFKKGVQIPCTCGKQATKYLVQQESPFVMMSAPPAQYELKHGTFTCASEYTGNYQCGHYKHITSKETLYCIDGALLTKSSEYKGPITDVFYKENSYTTTIKPVTYKLDGVVCTEIDPKLDNYYKKDNSYFTEQPIDLVPNQPYPNASFDNFKFVCDNIKFADDLNQLTGYKKPASRELKVTFFPDLNGDVVAIDYKHYTPSFKKGAKLLHKPIVWHVNNATNKATYKPNTWCIRCLWSTKPVETSNSFDVLKSEDAQGMDNLACEDLKPVSEEVVENPTIQKDVLECNVKTTEVVGDIILKPANNSLKITEEVGHTDLMAAYVDNSSLTIKKPNELSRVLGLKTLATHGLAAVNSVPWDTIANYAKPFLNKVVSTTTNIVTRCLNRVCTNYMPYFFTLLLQLCTFTRSTNSRIKASMPTTIAKNTVKSVGKFCLEASFNYLKSPNFSKLINIIIWFLLLSVCLGSLIYSTAALGVLMSNLGMPSYCTGYREGYLNSTNVTIATYCTGSIPCSVCLSGLDSLDTYPSLETIQITISSFKWDLTAFGLVAEWFLAYILFTRFFYVLGLAAIMQLFFSYFAVHFISNSWLMWLIINLVQMAPISAMVRMYIFFASFYYVWKSYVHVVDGCNSSTCMMCYKRNRATRVECTTIVNGVRRSFYVYANGGKGFCKLHNWNCVNCDTFCAGSTFISDEVARDLSLQFKRPINPTDQSSYIVDSVTVKNGSIHLYFDKAGQKTYERHSLSHFVNLDNLRANNTKGSLPINVIVFDGKSKCEESSAKSASVYYSQLMCQPILLLDQALVSDVGDSAEVAVKMFDAYVNTFSSTFNVPMEKLKTLVATAEAELAKNVSLDNVLSTFISAARQGFVDSDVETKDVVECLKLSHQSDIEVTGDSCNNYMLTYNKVENMTPRDLGACIDCSARHINAQVAKSHNIALIWNVKDFMSLSEQLRKQIRSAAKKNNLPFKLTCATTRQVVNVVTTKIALKGG

SEQ ID NO: 16085 - protein, 1946 aa, Artificial Sequence
  SARS-CoV-2__MT757076.1__non-structural protein 3 (NSP3)
MAPTKVTFGDDTVIEVQGYKSVNITFELDERIDKVLNEKCSAYTVELGTEVNEFACVVADAVIKTLQPVSELLTPLGIDLDEWSMATYYLFDESGEFKLASHMYCSFYPPDEDEEEGDCEEEEFEPSTQYEYGTEDDYQGKPLEFGATSAALQPEEEQEEDWLDDDSQQTVGQQDGSEDNQTTTIQTIVEVQPQLEMELTPVVQTIEVNSFSGYLKLTDNVYIKNADIVEEAKKVKPTVVVNAANVYLKHGGGVAGALNKATNNAMQVESDDYIATNGPLKVGGSCVLSGHNLAKHCLHVVGPNVNKGEDIQLLKSAYENFNQHEVLLAPLLSAGIFGADPIHSLRVCVDTVRTNVYLAVFDKNLYDKLVSSFLEMKSEKQVEQKIAEIPKEEVKPFITESKPSVEQRKQDDKKIKACVEEVTTTLEETKFLTENLLLYIDINGNLHPDSATLVSDIDITFLKKDAPYIVGDVVQEGVLTAVVIPTKKAGGTTEMLAKALRKVPTDNYITTYPGQGLNGYTVEEAKTVLKKCKSAFYILPSIISNEKQEILGTVSWNLREMLAHAEETRKLMPVCVETKAIVSTIQRKYKGIKIQEGVVDYGARFYFYTSKTTVASLINTLNDLNETLVTMPLGYVTHGLNLEEAARYMRSLKVPATVSVSSPDAVTAYNGYLTSSSKTPEEHFIETISLAGSYKDWSYSGQSTQLGIEFLKRGDKSVYYTSNPTTFHLDGEVITFDNLKTLLSLREVRTIKVFTTVDNINLHTQVVDMSMTYGQQFGPTYLDGADVTKIKPHNSHEGKTFYVLPNDDTLRVEAFEYYHTTDPSFLGRYMSALNHTKKWKYPQVNGLTSIKWADNNCYLATALLTLQQIELKFNPPALQDAYYRARAGEAANFCALILAYCNKTVGELGDVRETMSYLFQHANLDSCKRVLNVVCKTCGQQQTTLKGVEAVMYMGTLSYEQFKKGVQIPCTCGKQATKYLVQQESPFVMMSAPPAQYELKHGTFTCASEYTGNYQCGHYKHITSKETLYCIDGALLTKSSEYKGPITDVFYKENSYTTTIKPVTYKLDGVVCTEIDPKLDNYYKKDNSYFTEQPIDLVPNQPYPNASFDNFKFVCDNIKFADDLNQLTGYKKPASRELKVTFFPDLNGDVVAIDYKHYTPSFKKGAKLLHKPIVWHVNNATNKATYKPNTWCIRCLWSTKPVETSNSFDVLKSEDAQGMDNLACEDLKPVSEEVVENPTIQKDVLECNVKTTEVVGDIILKPANNSLKITEEVGHTDLMAAYVDNSSLTIKKPNELSRVLGLKTLATHGLAAVNSVPWDTIANYAKPFLNKVVSTTTNIVTRCLNRVCTNYMPYFFTLLLQLCTFTRSTNSRIKASMPTTIAKNTVKSVGKFCLEASFNYLKSPNFSKLINIIIWFLLLSVCLGSLIYSTAALGVLMSNLGMPSYCTGYREGYLNSTNVTIATYCTGSIPCSVCLSGLDSLDTYPSLETIQITISSFKWDLTAFGLVAEWFLAYILFTRFFYVLGLAAIMQLFFSYFAVHFISNSWLMWLIINLVQMAPISAMVRMYIFFASFYYVWKSYVHVVDGCNSSTCMMCYKRNRATRVECTTIVNGVRRSFYVYANGGKGFCKLHNWNCVNCDTFCAGSTFISDEVARDLSLQFKRPINPTDQSSYIVDSVTVKNGSIHLYFDKAGQKTYERHSLSHFVNLDNLRANNTKGSLPINVIVFDGKSKCEESSAKSASVYYSQLMCQPILLLDQALVSDVGDSAEVAVKMFDAYVNTFSSTFNVPMEKLKTLVATAEAELAKNVSLDNVLSTFISAARQGFVDSDVETKDVVECLKLSHQSDIEVTGDSCNNYMLTYNKVENMAPRDLGACIDCSARHINAQVAKSHNIALIWNVKDFMSLSEQLRKQIRSAAKKNNLPFKLTCATTRQVVNVVTTKIALKGG

SEQ ID NO: 16086 - protein, 1946 aa, Artificial Sequence
  SARS-CoV-2__MT757085.1__non-structural protein 3 (NSP3)
MAPTKVTFGDDTVIEVQGYKSVNITFELDERIDKVLNEKCSAYTVELGTEVNEFACVVADAVIKTLQPVSELLTPLGIDLDEWSMATYYLFDESGEFKLASHMYCSFYPPDEDEEEGDCEEEEFEPSTQYEYGTEDDYQGKPLEFGATSAALQPEEEQEEDWLDDDSQQTVGQQDGSEDNQTTTIQTIVEVQPQLEMELTPVVQTIEVNSFSGYLKLTDNVYIKNADIVEEAKKVKPTVVVNAANVYLKHGGGVAGALNKATNNAMQVESDDYIATNGPLKVGGSCVLSGHNLAKHCLHVVGPNVNKGEDIQLLKSAYENFNQHEVLLAPLLSAGIFGADPIHSLRVCVDTVRTNVYLAVFDKNLYDKLVSSFLEMKSEKQVEQKIAEIPKEEVKPFITESKPSVEQRKQDDKKIKACVEEVTTTLEETKFLTENLLLYIDINGNLHPDSATLVSDIDITFLKKDAPYIVGDVVQEGVLTAVVIPTKKAGGTTEMLAKALRKVPTDNYITTYPGQGLNGYTVEEAKTVLKKCKSAFYILPSIISNEKQEILGTVSWNLREMLAHAEETRKLMPVCVETKAIVSTIQRKYKGIKIQEGVVDYGARFYFYTSKITVASLINTLNDLNETLVTMPLGYVTHGLNLEEAARYMRSLKVPATVSVSSPDAVTAYNGYLTSSSKTPEEHFIETISLAGSYKDWSYSGQSTQLGIEFLKRGDKSVYYTSNPTTFHLDGEVITFDNLKTLLSLREVRTIKVFTTVDNINLHTQVVDMSMTYGQQFGPTYLDGADVTKIKPHNSHEGKTFYVLPNDDTLRVEAFEYYHTTDPSFLGRYMSALNHTKKWKYPQVNGLTSIKWADNNCYLATALLTLQQIELKFNPPALQDAYYRARAGEAANFCALILAYCNKTVGELGDVRETMSYLFQHANLDSCKRVLNVVCKTCGQQQTTLKGVEAVMYMGTLSYEQFKKGVQIPCTCGKQATKYLVQQESPFVMMSAPPAQYELKHGTFTCASEYTGNYQCGHYKHITSKETLYCIDGALLTKSSEYKGPITDVFYKENSYTTTIKPVTYKLDGVVCTEIDPKLDNYYKKDNSYFTEQPIDLVPNQPYPNASFDNFKFVCDNIKFADDLNQLTGYKKPASRELKVTFFPDLNGDVVAIDYKHYTPSFKKGAKLLHKPIVWHVNNATNKATYKPNTWCIRCLWSTKPVETSNSFDVLKSEDAQGMDNLACEDLKPVSEEVVENPTIQKDVLECNVKTTEVVGDIILKPANNSLKITEEVGHTDLMAAYVDNSSLTIKKPNELSRVLGLKTLATHGLAAVNSVPWDTIANYAKPFLNKVVSTTTNIVTRCLNRVCTNYMPYFFTLLLQLCTFTRSTNSRIKASMPTTIAKNTVKSVGKFCLEASFNYLKSPNFSKLINIIIWFLLLSVCLGSLIYSTAALGVLMSNLGMPSYCTGYREGYLNSTNVTIATYCTGSIPCSVCLSGLDSLDTYPSLETIQITISSFKWDLTAFGLVAEWFLAYILFTRFFYVLGLAAIMQLFFSYFAVHFISNSWLMWLIINLVQMAPISAMVRMYIFFASFYYVWKSYVHVVDGCNSSTCMMCYKRNRATRVECTTIVNGVRRSFYVYANGGKGFCKLHNWNCVNCDTFCAGSTFISDEVARDLSLQFKRPINPTDQSSYIVDSVTVKNGSIHLYFDKAGQKTYERHSLSHFVNLDNLRANNTKGSLPINVIVFDGKSKCEESSAKSASVYYSQLMCQPILLLDQALVSDVGDSAEVAVKMFDAYVNTFSSTFNVPMEKLKTLVATAEAELAKNVSLDNVLSTFISAARQGFVDSDVETKDVVECLKLSHQSDIEVTGDSCNNYMLTYNKVENMTPRDLGACIDCSARHINAQVAKSHNIALIWNVKDFMSLSEQLRKQIRSAAKKNNLPFKLTCATTRQVVNVVTTKIALKGG

SEQ ID NO: 16087 - protein, 1946 aa, Artificial Sequence
  SARS-CoV-2__MT757105.1__non-structural protein 3 (NSP3)
MAPTKVTFGDDTVIEVQGYKSVNITFELDERIDKVLNEKCSAYTVELGTEVNEFACVVADAVIKTLQPVSELLTPLGIDLDEWSMATYYLFDESGEFKLASHMYCSFYPPDEDEEEGDCEEEEFEPSTQYEYGTEDDYQGKPLEFGATSAALQPEEEQEEDWLDDDSQQTVGQQDGSEDNQTTTIQTIVEVQPQLEMELTPVVQTIEVNSFSGYLKLTDNVYIKNADIVEEAKKVKPTVVVNAANVYLKHGGGVAGALNKATNNAMQVESDDYIATNGPLKVGGSCVLSGHNLAKHCLHVVGPNVNKGEDIQLLKSAYENFNQHEVLLAPLLSAGIFGADPIHSLRVCVDTVRTNVYLAVFDKNLYDKLVSSFLEMKSEKQVEQKIAEIPKEEVKPFITESKPSVEQRKQDDKKIKACVEEVTTTLEETKFLTENLLLYIDINGNLHPDSATLVSDIDITFLKKDAPYIVGDVVQEGVLTAVVIPTKKAGGTTEMLAKALRKVPTDNYITTYPGQGLNGYTVEEAKTVLKKCKSAFYILPSIISNEKQEILGTVSWSLREMLAHAEETRKLMPVCVETKAIVSTIQRKYKGIKIQEGVVDYGARFYFYTSKTTVASLINTLNDLNETLVTMPLGYVTHGLNLEEAARYMRSLKVPATVSVSSPDAVTAYNGYLTSSSKTPEEHFIETISLAGSYKDWSYSGQSTQLGIEFLKRGDKSVYYTSNPTTFHLDGEVITFDNLKTLLSLREVRTIKVFTTVDNINLHTQVVDMSMTYGQQFGPTYLDGADVTKIKPHNSHEGKTFYVLPNDDTLRVEAFEYYHTTDPSFLGRYMSALNHTKKWKYPQVNGLTSIKWADNNCYLATALLTLQQIELKFNPPALQDAYYRARAGEAANFCALILAYCNKTVGELGDVRETMSYLFQHANLDSCKRVLNVVCKTCGQQQTTLKGVEAVMYMGTLSYEQFKKGVQIPCTCGKQATKYLVQQESPFVMMSAPPAQYELKHGTFTCASEYTGNYQCGHYKHITSKETLYCIDGALLTKSSEYKGPITDVFYKENSYTTTIKPVTYKLDGVVCTEIDPKLDNYYKKDNSYFTEQPIDLVPNQPYPNASFDNFKFVCDNIKFADDLNQLTGYKKPASRELKVTFFPDLNGDVVAIDYKHYTPSFKKGAKLLHKPIVWHVNNATNKATYKPNTWCIRCLWSTKPVETSNSFDVLKSEDAQGMDNLACEDLKPVSEEVVENPTIQKDVLECNVKTTEVVGDIILKPANNSLKITEEVGHTDLMAAYVDNSSLTIKKPNELSRVLGLKTLATHGLAAVNSVPWDTIANYAKPFLNKVVSTTTNIVTRCLNRVCTNYMPYFFTLLLQLCTFTRSTNSRIKASMPTTIAKNTVKSVGKFCLEASFNYLKSPNFSKLINIIIWFLLLSVCLGSLIYSTAALGVLMSNLGMPSYCTGYREGYLNSTNVTIATYCTGSIPCSVCLSGLDSLDTYPSLETIQITISSFKWDLTAFGLVAEWFLAYILFTRFFYVLGLAAIMQLFFSYFAVHFISNSWLMWLIINLVQMAPISAMVRMYIFFASFYYVWKSYVHVVDGCNSSTCMMCYKRNRATRVECTTIVNGVRRSFYVYANGGKGFCKLHNWNCVNCDTFCAGSTFISDEVARDLSLQFKRPINPTDQSSYIVDSVTVKNGSIHLYFDKAGQKTYERHSLSHFVNLDNLRANNTKGSLPINVIVFDGKSKCEESSAKSASVYYSQLMCQPILLLDQALVSDVGDSAEVAVKMFDAYVNTFSSTFNVPMEKLKTLVATAEAELAKNVSLDNVLSTFISAARQGFVDSDVETKDVVECLKLSHQSDIEVTGDSCNNYMLTYNKVENMTPRDLGACIDCSARHINAQVAKSHNIALIWNVKDFMSLSEQLRKQIRSAAKKNNLPFKLTCATTRQVVNVVTTKIALKGG

SEQ ID NO: 16088 - protein, 1946 aa, Artificial Sequence
  SARS-CoV-2__MT745584.1__non-structural protein 3 (NSP3)
MAPTKVTFGDDTVIEVQGYKSVNITFELDERIDKVLNEKCSAYTVELGTEVNEFACVVADAVIKTLQPVSELLIPLGIDLDEWSMATYYLFDESGEFKLASHMYCSFYPPDEDEEEGDCEEEEFEPSTQYEYGTEDDYQGKPLEFGATSAALQPEEEQEEDWLDDDSQQTVGQQDGSEDNQTTTIQTIVEVQPQLEMELTPVVQTIEVNSFSGYLKLTDNVYIKNADIVEEAKKVKPTVVVNAANVYLKHGGGVAGALNKATNNAMQVESDDYIATNGPLKVGGSCVLSGHNLAKHCLHVVGPNVNKGEDIQLLKSAYENFNQHEVLLAPLLSAGIFGADPIHSLRVCVDTVRTNVYLAVFDKNLYDKLVSSFLEMKSEKQVEQKIAEIPKEEVKPFITESKPSVEQRKQDDKKIKACVEEVTTTLEETKFLTENLLLYIDINGNLHPDSATLVSDIDITFLKKDAPYIVGDVVQEGVLTAVVIPTKKAGGTTEMLAKALRKVPTDNYITTYPGQGLNGYTVEEAKTVLKKCKSAFYILPSIISNEKQEILGTVSWNLREMLAHAEETRKLMPVCVETKAIVSTIQRKYKGIKIQEGVVDYGARFYFYTSKTTVASLINTLNDLNETLVTMPLGYVTHGLNLEEAARYMRSLKVPATVSVSSPDAVTAYNGYLTSSSKTPEEHFIETISLAGSYKDWSYSGQSTQLGIEFLKRGDKSVYYTSNPTTFHLDGEVITFDNLKTLLSLREVRTIKVFTTVDNINLHTQVVDMSMTYGQQFGPTYLDGADVTKIKPHNSHEGKTFYVLPNDDTLRVEAFEYYHTTDPSFLGRYMSALNHTKKWKYPQVNGLTSIKWADNNCYLATALLTLQQIELKFNPPALQDAYYRARAGEAANFCALILAYCNKTVGELGDVRETMSYLFQHANLDSCKRVLNVVCKTCGQQQTTLKGVEAVMYMGTLSYEQFKKGVQIPCTCGKQATKYLVQQESPFVMMSAPPAQYELKHGTFTCASEYTGNYQCGHYKHITSKETLYCIDGALLTKSSEYKGPITDVFYKENSYTTTIKPVTYKLDGVVCTEIDPKLDNYYKKDNSYFTEQPIDLVPNQPYPNASFDNFKFVCDNIKFADDLNQLTGYKKPASRELKVTFFPDLNGDVVAIDYKHYTPSFKKGAKLLHKPIVWHVNNATNKATYKPNTWCIRCLWSTKPVETSNSFDVLKSEDAQGMDNLACEDLKPVSEEVVENPTIQKDVLECNVKTTEVVGDIILKPANNSLKITEEVGHTDLMAAYVDNSSLTIKKPNELSRVLGLKTLATHGLAAVNSVPWDTIANYAKPFLNKVVSTTTNIVTRCLNRVCTNYMPYFFTLLLQLCTFTRSTNSRIKASMPTTIAKNTVKSVGKFCLEASFNYLKSPNFSKLINIIIWFLLLSVCLGSLIYSTAALGVLMSNLGMPSYCTGYREGYLNSTNVTIATYCTGSIPCSVCLSGLDSLDTYPSLETIQITISSFKWDLTAFGLVAEWFLAYILFTRFFYVLGLAAIMQLFFSYFAVHFISNSWLMWLIINLVQMAPISAMVRMYIFFASFYYVWKSYVHVVDGCNSSTCMMCYKRNRATRVECTTIVNGVRRSFYVYANGGKGFCKLHNWNCVNCDTFCAGSTFISDEVARDLSLQFKRPINPTDQSSYIVDSVTVKNGSIHLYFDKAGQKTYERHSLSHFVNLDNLRANNTKGSLPINVIVFDGKSKCEESSAKSASVYYSQLMCQPILLLDQALVSDVGDSAEVAVKMFDAYVNTFSSTFNVPMEKLKTLVATAEAELAKNVSLDNVLSTFISAARQGFVDSDVETKDVVECLKLSHQSDIEVTGDSCNNYMLTYNKVENMTPRDLGACIDCSARHINAHVAKSHNIALIWNVKDFMSLSEQLRKQIRSAAKKNNLPFKLTCATTRQVVNVVTTKIALKGG

SEQ ID NO: 16089 - protein, 1946 aa, Artificial Sequence
  SARS-CoV-2__MT745648.1__non-structural protein 3 (NSP3)
MAPTKVTFGDDTVIEVQGYKSVNITFELDERIDKVLNEKCSAYTVELGTEVNEFACVVADAVIKTLQPVSELLTPLGIDLDEWSMATYYLFDESGEFKLASHMYCSFYPPDEDEEEGDCEEEEFEPSTQYEYGTEDDYQGKPLEFGATSAALQPEEEQEEDWLDDDSQQTVGQQDGSEDNQTTTIQTIVEVQPQLEMELTPVVQTIEVNSFSGYLKLTDNVYIKNADIVEEAKKVKPTVVVNAANVYLKHGGGVAGALNKATNNAMQVESDDYIATNGPLKVGGSCVLSGHNLAKHCLHVVGPNVNKGEDIQLLKSAYENFNQHEVLLAPLLSAGIFGADPIHSLRVCVDTVRTNVYLAVFDKNLYDKLVSSFLEMKSEKQVEQKIAEIPKEEVKPFITESKPSVEQRKQDDNKIKACVEEVTTTLEEIKFLTENLLLYIDINGNLHPDSATLVSDIDITFLKKDAPYIVGDVVQEGVLTAVVIPTKKAGGTTEMLAKALRKVPTDNYITTYPGQGLNGYTVEEAKTVLKKCKSAFYILPSIISNEKQEILGTVSWNLREMLAHAEETRKLMPVCVETKAIVSTIQRKYKGIKIQEGVVDYGARFYFYTSKTTVASLINTLNDLNETLVTMPLGYVTHGLNLEEAARYMRSLKVPATVSVSSPDAVTAYNGYLTSSSKTPEEHFIETISLAGSYKDWSYSGQSTQLGIEFLKRGDKSVYYTSNPTTFHLDGEVITFDNLKTLLSLREVRTIKVFTTVDNINLHTQVVDMSMTYGQQFGPTYLDGADVTKIKPHNSHEGKTFYVLPNDDTLRVEAFEYYHTTDPSFLGRYMSALNHTKKWKYPQVNGLTSIKWADNNCYLATALLTLQQIELKFNPPALQDAYYRARAGEAANFCALILAYCNKTVGELGDVRETMSYLFQHANLDSCKRVLNVVCKTCGQQQTTLKGVEAVMYMGTLSYEQFKKGVQIPCTCGKQATKYLVQQESPFVMMSAPPAQYELKHGTFTCASEYTGNYQCGHYKHITSKETLYCIDGALLTKSSEYKGPITDVFYKENSYTTTIKPVTYKLDGVVCTEIDPKLDNYYKKDNSYFTEQPIDLVPNQPYPNASFDNFKFVCDNIKFADDLNQLTGYKKPASRELKVTFFPDLNGDVVAIDYKHYTPSFKKGAKLLHKPIVWHVNNATNKATYKPNTWCIRCLWSTKPVETSNSFDVLKSEDAQGMDNLACEDLKPVSEEVVENPTIQKDVLECNVKTTEVVGDIILKPANNSLKITEEVGHTDLMAAYVDNSSLTIKKPNELSRVLGLKTLATHGLAAVNSVPWDTIANYAKPFLNKVVSTTTNIVTRCLNRVCTNYMPYFFTLLLQLCTFTRSTNSRIKASMPTTIAKNTVKSVGKFCLEASFNYLKSPNFSKLINIIIWFLLLSVCLGSLIYSTAALGVLMSNLGMPSYCTGYREGYLNSTNVTIATYCTGSIPCSVCLSGLDSLDTYPSLETIQITISSFKWDLTAFGLVAEWFLAYILFTRFFYVLGLAAIMQLFFSYFAVHFISNSWLMWLIINLVQMAPISAMVRMYIFFASFYYVWKSYVHVVDGCNSSTCMMCYKRNRATRVECTTIVNGVRRSFYVYANGGKGFCKLHNWNCVNCDTFCAGSTFISDEVARDLSLQFKRPINPTDQSSYIVDSVTVKNGSIHLYFDKAGQKTYERHSLSHFVNLDNLRANNTKGSLPINVIVFDGKSKCEESSAKSASVYYSQLMCQPILLLDQALVSDVGDSAEVAVKMFDAYVNTFSSTFNVPMEKLKTLVATAEAELAKNVSLDNVLSTFISAARQGFVDSDVETKDVVECLKLSHQSDIEVTGDSCNNYMLTYNKVENMTPRDLGACIDCSARHINAQVAKSHNIALIWNVKDFMSLSEQLRKQIRSAAKKNNLPFKLTCATTRQVVNVVTTKIALKGG

SEQ ID NO: 16090 - protein, 1946 aa, Artificial Sequence
  SARS-CoV-2__MT745658.1__non-structural protein 3 (NSP3)
MAPTKVTFGDDTVIEVQGYKSVNITFELDERIDKVLNEKCSAYTVELGTEVNEFACVVADAVIKTLQPVSELLTPLGIDLDEWSMATYYLFDESGEFKLASHMYCSFYPPDEDEEEGDCEEEEFEPSTQYEYGTEDDYQGKPLEFGATSAALQPEEEQEEDWLDDDSQQTVGQQDGSDDNQTTTIQTIVEVQPQLEMELTPVVQTIEVNSFSGYLKLTDNVYIKNADIVEEAKKVKPTVVVNAANVYLKHGGGVAGALNKATNNAMQVESDDYIATNGPLKVGGSCVLSGHNLAKHCLHVVGPNVNKGEDIQLLKSAYENFNQHEVLLAPLLSAGIFGADPIHSLRVCVDTVRTNVYLAVFDKNLYDKLVSSFLEMKSEKQVEQKIAEIPKEEVKPFITESKPSVEQRKQDDKKIKACVEEVTTTLEETKFLTENLLLYIDINGNLHPDSATLVSDIDITFLKKDAPYIVGDVVQEGVLTAVVIPTKKAGGTTEMLAKALRKVPTDNYITTYPGQGLNGYTVEEAKTVLKKCKSAFYILPSIISNEKQEILGTVSWNLREMLAHAEETRKLMPVCVETKAIVSTIQRKYKGIKIQEGVVDYGARFYFYTSKTTVASLINTLNDLNETLVTMPLGYVTHGLNLEEAARYMRSLKVPATVSVSSPDAVTAYNGYLTSSSKTPEEHFIETISLAGSYKDWSYSGQSTQLGIEFLKRGDKSVYYTSNPTTFHLDGEVITFDNLKTLLSLREVRTIKVFTTVDNINLHTQVVDMSMTYGQQFGPTYLDGADVTKIKPHNSHEGKTFYVLPNDDTLRVEAFEYYHTTDPSFLGRYMSALNHTKKWKYPQVNGLTSIKWADNNCYLATVLLTLQQIELKFNPPALQDAYYRARAGEAANFCALILAYCNKTVGELGDVRETMSYLFQHANLDSCKRVLNVVCKTCGQQQTTLKGVEAVMYMGTLSYEQFKKGVQIPCTCGKQATKYLVQQESPFVMMSAPPAQYELKHGTFTCASEYTGNYQCGHYKHITSKETLYCIDGALLTKSSEYKGPITDVFYKENSYTTTIKPVTYKLDGVVCTEIDPKLDNYYKKDNSYFTEQPIDLVPNQPYPNASFDNFKFVCDNIKFADDLNQLTGYKKPASRELKVTFFPDLNGDVVAIDYKHYTPSFKKGAKLLHKPIVWHVNNATNKATYKPNTWCIRCLWSTKPVETSNSFDVLKSEDAQGMDNLACEDLKPVSEEVVENPTIQKDVLECNVKTTEVVGDIILKPANNSLKITEEVGHTDLMAAYVDNSSLTIKKPNELSRVLGLKTLATHGLAAVNSVPWDTIANYAKPFLNKVVSTTTNIVTRCLNRVCTNYMPYFFTLLLQLCTFTRSTNSRIKASMPTTIAKNTVKSVGKFCLEASFNYLKSPNFSKLINIIIWFLLLSVCLGSLIYSTAALGVLMSNLGMPSYCTGYREGYLNSTNVTIATYCTGSIPCSVCLSGLDSLDTYPSLETIQITISSFKWDLTAFGLVAEWFLAYILFTRFFYVLGLAAIMQLFFSYFAVHFISNSWLMWLIINLVQMAPISAMVRMYIFFASFYYVWKSYVHVVDGCNSSTCMMCYKRNRATRVECTTIVNGVRRSFYVYANGGKGFCKLHNWNCVNCDTFCAGSTFISDEVARDLSLQFKRPINPTDQSSYIVDSVTVKNGSIHLYFDKAGQKTYERHSLSHFVNLDNLRANNTKGSLPINVIVFDGKSKCEESSAKSASVYYSQLMCQPILLLDQALVSDVGDSAEVAVKMFDAYVNTFSSTFNVPMEKLKTLVATAEAELAKNVSLDNVLSTFISAARQGFVDSDVETKDVVECLKLSHQSDIEVTGDSCNNYMLTYNKVENMTPRDLGACIDCSARHINAQVAKSHNIALIWNVKDFMSLSEQLRKQIRSAAKKNNLPFKLTCATTRQVVNVVTTKIALKGG

SEQ ID NO: 16091 - protein, 1946 aa, Artificial Sequence
  SARS-CoV-2__MT745659.1__non-structural protein 3 (NSP3)
MAPTKVTFGDDTVIEVQGYKSVNITFELDERIDKVLNEKCSAYTVELGTEVNEFACVVADAVIKTLQPVSELLTPLGIDLDEWSMATYYLFDESGEFKLASHMYCSFYPPDEDEEEGDCEEEEFEPSTQYEYGTEDDYQGKPLEFGATSAALQPEEEQEEDWLDDDSQQTVGQQDGSEDNQTTTIQTIVEVQPQLEMELTPVVQTIEVNSFSGYLKLTDNVYIKNADIVEEAKKVKPTVVVNAANVYLKHGGGVAGALNKATNNAMQVESDDYIATNGPLKVGGSCVLSGHNLAKHCLHVVGPNVNKGEDIQLLKSAYENFNQHEVLLAPLLSAGIFGADPIHSLRVCVDTVRTNVYLAVFDKNLYDKLVSSFLEMKSEKQVEQKIAEIPKEEVKPFITESKPSVEQRKQDDKKIKACVEEVTTTLEEIKFLTENLLLYIDINGNLHPDSATLVSDIDITFLKKDAPYIVGDVVQEGVLTAVVIPTKKAGGTTEMLVKALRKVPTDNYITTYPGQGLNGYTVEEAKTVLKKCKSAFYILPSIISNEKQEILGTVSWNLREMLAHAEETRKLMPVCVETKAIVSTIQRKYKGIKIQEGVVDYGARFYFYTSKTTVASLINTLNDLNETLVTMPLGYVTHGLNLEEAARYMRSLKVPATVSVSSPDAVTAYNGYLTSSSKTPEEHFIETISLAGSYKDWSYSGQSTQLGIEFLKRGDKSVYYTSNPTTFHLDGEVITFDNLKTLLSLREVRTIKVFTTVDNINLHTQVVDMSMTYGQQFGPTYLDGADVTKIKPHNSHEGKTFYVLPNDDTLRVEAFEYYHTTDPSFLGRYMSALNHTKKWKYPQVNGLTSIKWADNNCYLATALLTLQQIELKFNPPALQDAYYRARAGEAANFCALILAYCNKTVGELGDVRETMSYLFQHANLDSCKRVLNVVCKTCGQQQTTLKGVEAVMYMGTLSYEQFKKGVQIPCTCGKQATKYLVQQESPFVMMSAPPAQYELKHGTFTCASEYTGNYQCGHYKHITSKETLYCIDGALLTKSSEYKGPITDVFYKENSYTTTIKPVTYKLDGVVCTEIDPKLDNYYKKDNSYFTEQPIDLVPNQPYPNASFDNFKFVCDNIKFADDLNQLTGYKKPASRELKVTFFPDLNGDVVAIDYKHYTPSFKKGAKLLHKPIVWHVNNATNKATYKPNTWCIRCLWSTKPVETSNSFDVLKSEDAQGMDNLACEDLKPVSEEVVENPTIQKDVLECNVKTTEVVGDIILKPANNSLKITEEVGHTDLMAAYVDNSSLTIKKPNELSRVLGLKTLATHGLAAVNSVPWDTIANYAKPFLNKVVSTTTNIVTRCLNRVCTNYMPYFFTLLLQLCTFTRSTNSRIKASMPTTIAKNTVKSVGKFCLEASFNYLKSPNFSKLINIIIWFLLLSVCLGSLIYSTAALGVLMSNLGMPSYCTGYREGYLNSTNVTIATYCTGSIPCSVCLSGLDSLDTYPSLETIQITISSFKWDLTAFGLVAEWFLAYILFTRFFYVLGLAAIMQLFFSYFAVHFISNSWLMWLIINLVQMAPISAMVRMYIFFASFYYVWKSYVHVVDGCNSSTCMMCYKRNRATRVECTTIVNGVRRSFYVYANGGKGFCKLHNWNCVNCDTFCAGSTFISDEVARDLSLQFKRPINPTDQSSYIVDSVTVKNGSIHLYFDKAGQKTYERHSLSHFVNLDNLRANNTKGSLPINVIVFDGKSKCEESSAKSASVYYSQLMCQPILLLDQALVSDVGDSAEVAVKMFDAYVNTFSSTFNVPMEKLKTLVATAEAELAKNVSLDNVLSTFISAARQGFVDSDVETKDVVECLKLSHQSDIEVTGDSCNNYMLTYNKVENMTPRDLGACIDCSARHINAQVAKSHNIALIWNVKDFMSLSEQLRKQIRSAAKKNNLPFKLTCATTRQVVNVVTTKIALKGG

SEQ ID NO: 16092 - protein, 1946 aa, Artificial Sequence
  SARS-CoV-2__MT745676.1__non-structural protein 3 (NSP3)
MAPTKVTFGDDTVIEVQGYKSVNITFELDERIDKVLNEKCSAYTVELGTEVNEFACVVADAVIKTLQPVSELLTPLGIDLDEWSMATYYLFDESGEFKLASHMYCSFYPPDEDEEEGDCEEEEFEPSTQYEYGTEDDYQGKPLEFGATSAALQPEEEQEEDWLDDDSQQTVGQQDGSEDNQTTTIQTIVEVQPQLEMELTPVVQTIEVNSFSGYLKLTDNVYIKNADIVEEAKKVKPTVVVNAANVYLKHGGGVAGALNKATNNAMQVESDDYIATNGPLKVGGSCVLSGHNLAKHCLHVVGPNVNKGEDIQLLKSAYENFNQHEVLLAPLLSAGIFGADPIHSLRVCVDTVRTNVYLAVFDKNLYDKLVSSFLEMKSEKQVEQKIAEIPKEEVKPFITESKPSVEQRKQDDKKIKACVEEVTTTLEETKFLTENLLLYIDINGNLHPDSATLVSDIDITFLKKDAPYIVGDVVQEGVLTAVVIPTKKAGGTTEMLAKALRKVPTDNYITTYPGQGLNGYTVEEAKTVLKKCKSAFYILPSIISNEKQEILGTVSWNLREMLAHAEETRKLMPVCVETKAIVSTIQRKYKGIKIQEGVVDYGARFYFYTSKTTVASLINTLNDLNETLVTMPLGYVTHGLNLEEAARYMRSLKVPATVSVSSPDAVTAYNGYLTSSSKTPEEHFIETISLAGSYKDWSYSGQSTQLGIEFLKRGDKSVYYTSNPTTFHLDGEVITFDNLKTLLSLREVRTIKVFTTVDNINLHTQVVDMSMTYGQQFGPTYLDGADVTKIKPHNSHEGKTFYVLPNDDTLRVEAFEYYHTTDPSFLGRYMSALNHTKKWKYPQVNGLTSIKWADNNCYLATALLTLQQIELKFNPPALQDAYYRARAGEAANFCALILAYCNKTVGELGDVRETMSYLFQHANLDSCKRVLNVVCKTCGQQQTTLKGVEAVMYMGTLSYEQFKKGVQIPCTCGKQATKYLVQQESPFVMMSAPPAQYELKHGTFTCASEYTGNYQCGHYKHITSKETLYCIDGALLTKSSEYKGPITDVFYKENSYTTTIKPVTYKLDGVVCTEIDPKLDNYYKKDNSYFTEQPIDLVPNQPYPNASFDNFKFVCDNIKFADDLNQLTGYKKPASRELKVTFFPDLNGDVVAIDYKHYTPSFKKGAKLLHKPIVWHVNNATNKATYKPNTWCIRCLWSKKPVETSNSFDVLKSEDAQGMDNLACEDLKPVSEEVVENPTIQKDVLECNVKTTEVVGDIILKPANNSLKITEEVGHTDLMAAYVDNSSLTIKKPNELSRVLGLKTLATHGLAAVNSVPWDTIANYAKPFLNKVVSTTTNIVTRCLNRVCTNYMPYFFTLLLQLCTFTRSTNSRIKASMPTTIAKNTVKSVGKFCLEASFNYLKSPNFSKLINIIIWFLLLSVCLGSLIYSTAALGVLMSNLGMPSYCTGYREGYLNSTNVTIATYCTGSIPCSVCLSGLDSLDTYPSLETIQITISSFKWDLTAFGLVAEWFLAYILFTRFFYVLGLAAIMQLFFSYFAVHFISNSWLMWLIINLVQMAPISAMVRMYIFFASFYYVWKSYVHVVDGCNSSTCMMCYKRNRATRVECTTIVNGVRRSFYVYANGGKGFCKLHNWNCVNCDTFCAGSTFISDEVARDLSLQFKRPINPTDQSSYIVDSVTVKNGSIHLYFDKAGQKTYERHSLSHFVNLDNLRANNTKGSLPINVIVFDGKSKCEESSAKSASVYYSQLMCQPILLLDQALVSDVGDSAEVAVKMFDAYVNTFSSTFNVPMEKLKTLVATAEAELAKNVSLDNVLSTFISAARQGFVDSDVETKDVVECLKLSHQSDIEVTGDSCNNYILTYNKVENMTPRDLGACIDCSARHINAQVAKSHNIALIWNVKDFMSLSEQLRKQIRSAAKKNNLPFKLTCATTRQVVNVVTTKIALKGG

SEQ ID NO: 16093 - protein, 1946 aa, Artificial Sequence
  SARS-CoV-2__MT745677.1__non-structural protein 3 (NSP3)
MAPTKVTFGDDTVIEVQGYKSVNITFELDERIDKVLNEKCSAYTVELGTEVNEFACVVADAVIKTLQPVSELLTPLGIDLDEWSMATYYLFDESGEFKLASHMYCSFYPPDEDEEEGDCEEEEFEPSTQYEYGTEDDYQGKPLEFGATSAALQPEEEQEEDWLDDDSQQTVGQQDGSEDNQTTTIQTIVEVQPQLEMELTPVVQTIEVNSFSGYLKLTDNVYIKNADIVEEAKKVKPTVVVNAANVYLKHGGGVAGALNKATNNAMQVESDDYIATNGPLKVGGSCVLSGHNLAKHCLHVVGPNVNKGEDIQLLKSAYENFNQHEVLLAPLLSAGIFGADPIHSLRVCVDTVRTNVYLAVFDKNLYDKLVSSFLEMKSEKQVEQKIAEIPKEEVKPFITESKPSVEQRKQDDKKIKACVEEVTTTLEETKFLTENLLLYIDINGNLHPDSATLVSDIDITFLKKDAPYIVGDVVQEGVLTAVVIPTKKAGGTTEMLAKALRKVPTDNYITTYPGQGLNGYTVEEAKTVLKKCKSAFYILPSIISNEKQEILGTVSWNLREMLAHAEETRKLMPVCVETKAIVSTIQRKYKGIKIQEGVVDYGARFYFYTSKTTVASLINTLNDLNETLVTMPLGYVTHGLNLEEAARYMRSLKVPATVSVSSPDAVTAYNGYLTSSSKTPEEHFIETISLAGSYKDWSYSGQSTQLGIEFLKRGDKSVYYTSNPTTFHLDGEVITFDNLKTLLSLREVRIIKVFTTVDNINLHTQVVDMSMTYGQQFGPTYLDGADVTKIKPHNSHEGKTFYVLPNDDTLRVEAFEYYHTTDPSFLGRYMSALNHTKKWKYPQVNGLTSIKWADNNCYLATALLTLQQIELKFNPPALQDAYYRARAGEAANFCALILAYCNKTVGELGDVRETMSYLFQHANLDSCKRVLNVVCKTCGQQQTTLKGVEAVMYMGTLSYEQFKKGVQIPCTCGKQATKYLVQQESPFVMMSAPPAQYELKHGTFTCASEYTGNYQCGHYKHITSKETLYCIDGALLTKSSEYKGPITDVFYKENSYTTTIKPVTYKLDGVVCTEIDPKLDNYYKKDNSYFTEQPIDLVPNQPYPNASFDNFKFVCDNIKFADDLNQLTGYKKPASRELKVTFFPDLNGDVVAIDYKHYTPSFKKGAKLLHKPIVWHVNNATNKATYKPNTWCIRCLWSTKPVETSNSFDVLKSEDAQGMDNLACEDLKPVSEEVVENPTIQKDVLECNVKTTEVVGDIILKPANNSLKITEEVGHTDLMAAYVDNSSLTIKKPNELSRVLGLKTLATHGLAAVNSVPWDTIANYAKPFLNKVVSTTTNIVTRCLNRVCTNYMPYFFTLLLQLCTFTRSTNSRIKASMPTTIAKNTVKSVGKFCLEASFNYLKSPNFSKLINIIIWFLLLSVCLGSLIYSTAALGVLMSNLGMPSYCTGYREGYLNSTNVTIATYCTGSIPCSVCLSGLDSLDTYPSLETIQITISSFKWDLTAFGLVAEWFLAYILFTRFFYVLGLAAIMQLFFSYFAVHFISNSWLMWLIINLVQMAPISAMVRMYIFFASFYYVWKSYVHVVDGCNSSTCMMCYKRNRATRVECTTIVNGVRRSFYVYANGGKGFCKLHNWNCVNCDTFCAGSTFISDEVARDLSLQFKRPINPTDQSSYIVDSVTVKNGSIHLYFDKAGQKTYERHSLSHFVNLDNLRANNTKGSLPINVIVFDGKSKCEESSAKSASVYYSQLMCQPILLLDQALVSDVGDSAEVAVKMFDAYVNTFSSTFDVPMEKLKTLVATAEAELAKNVSLDNVLSTFISAARQGFVDSDVETKDVVECLKLSHQSDIEVTGDSCNNYMLTYNKVENMTPRDLGACIDCSARHINAQVAKSHNIALIWNVKDFMSLSEQLRKQIRSAAKKNNLPFKLTCATTRQVVNVVTTKIALKGG

SEQ ID NO: 16094 - protein, 1946 aa, Artificial Sequence
  SARS-CoV-2__MT745688.1__non-structural protein 3 (NSP3)
MAPTKVTFGDDTVIEVQGYKSVNITFELDERIDKVLNEKCSAYTVELGTEVNEFACVVADAVIKTLQPVSELLTPLGIDLDEWSMATYYLFDESGEFKLASHMYCSFYPPDEDEEEGDCEEEEFEPSTQYEYGTEDDYQGKPLEFGATSAALQPEEEQEEDWLDDDSQQTVGQQDGSDDNQTTTIQTIVEVQPQLEMELTPVVQTIEVNSFSGYLKLTDNVYIKNADIVEEAKKVKPTVVVNAANVYLKHGGGVAGALNKATNNAMQVESDDYIATNGPLKVGGSCVLSGHNLAKHCLHVVGPNVNKGEDIQLLKSAYENFNQHEVLLAPLLSAGIFCADPIHSLRVCVDTVRTNVYLAVFDKNLYDKLVSSFLEMKSEKQVEQKIAEIPKEEVKPFITESKPSVEQRKQDDKKIKACVEEVTTTLEETKFLTENLLLYIDINGNLHPDSATLVSDIDITFLKKDAPYIVGDVVQEGVLTAVVIPTKKAGGTTEMLAKALRKVPTDNYITTYPGQGLNGYTVEEAKTVLKKCKSAFYILPSIISNEKQEILGTVSWNLREMLAHAEETRKLMPVCVETKAIVSTIQRKYKGIKIQEGVVDYGARFYFYTSKTTVASLINTLNDLNETLVTMPLGYVTHGLNLEEAARYMRSLKVPATVSVSSPDAVTAYNGYLTSSSKTPEEHFIETISLAGSYKDWSYSGQSTQLGIEFLKRGDKSVYYTSNPTTFHLDGEVITFDNLKTLLSLREVRTIKVFTTVDNINLHTQVVDMSMTYGQQFGPTYLDGADVTKIKPHNSHEGKTFYVLPNDDTLRVEAFEYYHTTDPSFLGRYMSALNHTKKWKYPQVNGLTSIKWADNNCYLATVLLTLQQIELKFNPPALQDAYYRARAGEAANFCALILAYCNKTVGELGDVRETMSYLFQHANLDSCKRVLNVVCKTCGQQQTTLKGVEAVMYMGTLSYEQFKKGVQIPCTCGKQATKYLVQQESPFVMMSAPPAQYELKHGTFTCASEYTGNYQCGHYKHITSKETLYCIDGALLTKSSEYKGPITDVFYKENSYTTTIKPVTYKLDGVVCTEIDPKLDNYYKKDNSYFTEQPIDLVPNQPYPNASFDNFKFVCDNIKFADDLNQLTGYKKPASRELKVTFFPDLNGDVVAIDYKHYTPSFKKGAKLLHKPIVWHVNNATNKATYKPNTWCIRCLWSTKPVETSNSFDVLKSEDAQGMDNLACEDLKPVSEEVVENPTIQKDVLECNVKTTEVVGDIILKPANNSLKITEEVGHTDLMAAYVDNSSLTIKKPNELSRVLGLKTLATHGLAAVNSVPWDTIANYAKPFLNKVVSTTTNIVTRCLNRVCTNYMPYFFTLLLQLCTFTRSTNSRIKASMPTTIAKNTVKSVGKFCLEASFNYLKSPNFSKLINIIIWFLLLSVCLGSLIYSTAALGVLMSNLGMPSYCTGYREGYLNSTNVTIATYCTGSIPCSVCLSGLDSLDTYPSLETIQITISSFKWDLTAFGLVAEWFLAYILFTRFFYVLGLAAIMQLFFSYFAVHFISNSWLMWLIINLVQMAPISAMVRMYIFFASFYYVWKSYVHVVDGCNSSTCMMCYKRNRATRVECTTIVNGVRRSFYVYANGGKGFCKLHNWNCVNCDTFCAGSTFISDEVARDLSLQFKRPINPTDQSSYIVDSVTVKNGSIHLYFDKAGQKTYERHSLSHFVNLDNLRANNTKGSLPINVIVFDGKSKCEESSAKSASVYYSQLMCQPILLLDQALVSDVGDSAEVAVKMFDAYVNTFSSTFNVPMEKLKTLVATAEAELAKNVSLDNVLSTFISAARQGFVDSDVETKDVVECLKLSHQSDIEVTGDSCNNYMLTYNKVENMTPRDLGACIDCSARHINAQVAKSHNIALIWNVKDFMSLSEQLRKQIRSAAKKNNLPFKLTCATTRQVVNVVTTKIALKGG

SEQ ID NO: 16095 - protein, 1946 aa, Artificial Sequence
  SARS-CoV-2__MT745694.1__non-structural protein 3 (NSP3)
MAPTKVTFGDDTVIEVQGYKSVNITFELDERIDKVLNEKCSAYTVELGTEVNEFACVVADAVIKTLQPVSELLTPLGIDLDEWSMATYYLFDESGEFKLASHMYCSFYPPDEDEEEGDCEEEEFEPSTQYEYGTEDDYQGKPLEFGATSAALQPEEEQEEDWLDDDSQQTVGQQDGSEDNQTTTIQTIVEVQPQLEMELTPVVQTIEVNSFSGYLKLTDNVYIKNADIVEEAKKVKPTVVVNAANVYLKHGGGVAGALNKATNNAMQVESDDYIATNGPLKVGGSCVLSGHNLAKHCLHVVGPNVNKGEDIQLLKSAYENFNQHEVLLAPLLSAGIFGADPIHSLRVCVDTVRTNVYLAVFDKNLYDKLVSSFLEMKSEKQVEQKIAEIPKEEVKPFITESKPSVEQRKQDDKKIKACVEEVTTTLEETKFLTENLLLYIDINGNLHPDSATLVSDIDITFLKKDAPYIVGDVVQEGVLTAVVIPTKKAGGTTEMLAKALRKVPTDNYITTYPGQGLNGYTVEEAKTVLKKCKSAFYILPSIISNEKQEILGTVSWNLREMLAHAEETRKLMPVCVETKAIVSTIQRKYKGIKIQEGVVDYGARFYFYTSKTTVASLINTLNDLNETLVTMPLGYVTHGLNLEEAARYMRSLKVPATVSVSSPDAVTAYNGYLTSSSKTPEEHFIETISLAGSYKDWSYSGQSTQLGIEFLKRGDKSVYYTSNPTTFHLDGEVITFDNLKTLLSLREVRTIKVFTTVDNINLHTQVVDMSMTYGQQFGPTYLDGADVTKIKPHNSHEGKTFYVLPNDDTLRVEAFEYYHTTDPSFLGRYMSALNHTKKWKYPQVNGLTSIKWADNNCYLATALLTLQQIELKFNPPALQDAYYRARAGEAANFCALILAYCNKTVGELGDVRETMSYLFQHANLDSCKRVLNVVCKTCGQQQTTLKGVEAVMYMGTLSYEQFKKGVQIPCTCGKQATKYLVQQESPFVMMSAPPAQYELKHGTFTCASEYTGNYQCGHYKHITSKETLYCIDGALLTKSSEYKGPITDVFYKENSYTTTIKPVTYKLDGVVCTEIDPKLDNYYKKDNSYFTEQPIDLVPNQPYPNASFDNFKFVCDNIKFADDLNQLTGYKKPASRELKVTFFPDLNGDVVAIDYKHYTPSFKKGAKLLHKPIVWHVNNATNKATYKPNTWCIRCLWSTKPVETSNSFDVLKSEDAQGMDNLACEDLKPVSEEVVENPTIQKDVLECNVKTTEVVGDIILKPANNSLKITEEVGHTDLMAAYVDNSSLTIKKPNELSRVLGLKTLATHGLAAVNSVPWDTIANYAKPFLNKVVSTTTNIVTRCLNRVCTNYMPYFFTLLLQLCTFTRSTNSRIKVSMPTTIAKNTVKSVGKFCLEASFNYLKSPNFSKLINIIIWFLLLSVCLGSLIYSTAALGVLMSNLGMPSYCTGYREGYLNSTNVTIATYCTGSIPCSVCLSGLDSLDTYPSLETIQITISSFKWDLTAFGLVAEWFLAYILFTRFFYVLGLAAIMQLFFSYFAVHFISNSWLMWLIINLVQMAPISAMVRMYIFFASFYYVWKSYVHVVDGCNSSTCMMCYKRNRATRVECTTIVNGVRRSFYVYANGGKGFCKLHNWNCVNCDTFCAGSTFISDEVARDLSLQFKRPINPTDQSSYIVDSVTVKNGSIHLYFDKAGQKTYERHSLSHFVNLDNLRANNTKGSLPINVIVFDGKSKCEESSAKSASVYYSQLMCQPILLLDQALVSDVGDSAEVAVKMFDAYVNTFSSTFNVPMEKLKTLVATAEAELAKNVSLDNVLSTFISAARQGFVDSDVETKDVVECLKLSHQSDIEVTGDSCNNYMLTYNKVENMTPRDLGACIDCSARHINAQVAKSHNIALIWNVKDFMSLSEQLRKQIRSAAKKNNLPFKLTCATTRQVVNVVTTKIALKGG

SEQ ID NO: 16096 - protein, 1946 aa, Artificial Sequence
  SARS-CoV-2__MT745711.1__non-structural protein 3 (NSP3)
MAPTKVTFGDDTVIEVQGYKSVNITFELDERIDKVLNEKCSAYTVELGTEVNEFACVVADAVIKTLQPVSELLTPLGIDLDEWSMATYYLFDESGEFKLASHMYCSFYPPDEDEEEGDCEEEEFEPSTQYEYGTEDDYQGKPLEFGATSAALQPEEEQEEDWLDDDSQQTVGQQDGSEDNQTTTIQTIVEVQPQLEMELTPVVQTIEVNSFSGYLKLTDNVYIKNADIVEEAKKVKPTVVVNAANVYLKHGGGVAGALNKATNNAMQVESDDYIATNGPLKVGGSCVLSGHNLAKHCLHVVGPNVNKGEDIQLLKSAYENFNQHEVLLAPLLSAGIFGADPIHSLRVCVDTVRTNVYLAVFDKNLYDKLVSSFLEMKSEKQVEQKIAEIPKEEVKPFITESKPSVEQRKQDDKKIKACVEEVTTTLEETKFLTENLLLYIDINGNLHPDSATLVSDIDITFLKKDAPYIVGDVVQEGVLTAVVIPTKKAGGTTEMLAKALRKVPTDNYITTYPGQGLNGYTVEEAKTVLKKCKSAFYILPSIISNEKQEILGTVSWNLREMLAHAEETRKLMPVCVETKAIVSTIQRKYKGIKIQEGVVDYGARFYFYTSKTTVASLINTLNDLNETLVTMPLGYVTHGLNLEEAARYMRSLKVPATVSVSSPDAVTAYNGYLTSSSKTPEEHFIETISLAGSYKDWSYSGQSTQLGIEFLKRGDKSVYYTSNPTTFHLDGEVITFDNLKTLLSLREVRTIKVFTTVDNINLHTQVVDMSMTYGQQFGPTYLDGADVTKIKPHNSHEGKTFYVLPNDDTLRVEAFEYYHTTDPSFLGRYMSALNHTKKWKYPQVNGLTSIKWADNNCYLATALLTLQQIELKFNPPALQDAYYRARAGEAANFCALILAYCNKTVGELGDVRETMSYLFQHANLDSCKRVLNVVCKTCGQQQTTLKGVEAVMYMGTLSYEQFKKGVQIPCTCGKQATKYLVQQESPFVMMSAPPAQYELKHGTFTCASEYTGNYQCGHYKHITSKETLYCIDGALLTKSSEYKGPITDVFYKENSYTTTIKPVTYKLDGVVCTEIDPKLDNYYKKDNSYFTEQPIDLVPNQPYPNASFDNFKFVCDNIKFADDLNQLTGYKKPASRELKVTFFPDLNGDVVAIDYKHYTPSFKKGAKLLHKPIVWHVNNATNKATYKPNTWCIRCLWSTKPVETSNSFDVLKSEDAQGMDNLACEDLKPVSEEVVENPTIQKDFLECNVKTTEVVGDIILKPANNSLKITEEVGHTDLMAAYVDNSSLTIKKPNELSRVLGLKTLATHGLAAVNSVPWDTIANYAKPFLNKVVSTTTNIVTRCLNRVCTNYMPYFFTLLLQLCTFTRSTNSRIKASMPTTIAKNTVKSVGKFCLEASFNYLKSPNFSKLINIIIWFLLLSVCLGSLIYSTAALGVLMSNLGMPSYCTGYREGYLNSTNVTIATYCTGSIPCSVCLSGLDSLDTYPSLETIQITISSFKWDLTAFGLVAEWFLAYILFTRFFYVLGLAAIMQLFFSYFAVHFISNSWLMWLIINLVQMAPISAMVRMYIFFASFYYVWKSYVHVVDGCNSSTCMMCYKRNRATRVECTTIVNGVRRSFYVYANGGKGFCKLHNWNCVNCDTFCAGSTFISDEVARDLSLQFKRPINPTDQSSYIVDSVTVKNGSIHLYFDKAGQKTYERHSLSHFVNLDNLRANNTKGSLPINVIVFDGKSKCEESSAKSASVYYSQLMCQPILLLDQALVSDVGDSAEVAVKMFDAYVNTFSSTFNVPMEKLKTLVATAEAELAKNVSLDNVLSTFISAARQGFVDSDVETKDVVECLKLSHQSDIEVTGDSCNNYMLTYNKVENMTPRDLGACIDCSARHINAQVAKSHNIALIWNVKDFMSLSEQLRKQIRSAAKKNNLPFKLTCATTRQVVNVVTTKIALKGG

SEQ ID NO: 16097 - protein, 1946 aa, Artificial Sequence
  SARS-CoV-2__MT745715.1__non-structural protein 3 (NSP3)
MAPTKVTFGDDTVIEVQGYKSVNITFELDERIDKVLNEKCSAYTVELGTEVNEFACVVADAVIKTLQPVSELLTPLGIDLDEWSMATYYLFDESGEFKLASHMYCSFYPPDEDEEEGDCEEEEFEPSTQYEYGTEDDYQGKPLEFGATSAALQPEEEQEEDWLDDDSQQTVGQQDGSEDNQTTTIQTIVEVQPQLEMELTPVVQTIEVNSFSGYLKLTDNVYIKNADIVEEAKKVKPTVVVNAANVYLKHGGGVAGALNKATNNAMQVESDDYIATNGPLKVGGSCVLSGHNLAKHCLHVVGPNVNKGEDIQLLKSAYENFNQHEVLLAPLLSAGIFGADPIHSLRVCVDTVRTNVYLAVFDKNLYDKLVSSFLEMKSEKQVEQKIAEIPKEEVKPFITESKPSVEQRKQDDKKIKACVEEVTTTLEETKFLTENLLLYIDINGNLHPDSATLVSDIDITFLKKDAPYIVGDVVQEGVLTAVVIPTKKAGGTTEMLAKALRKVPTDNYITTYPGQGLNGYTVEEAKTVLKKCKSAFYILPSIISNEKQEILGTVSWNLREMLAHAEETRKLMPVCVETKAIVSTIQRKYKGIKIQEGVVDYGARFYFYTSKTTVASLINTLNDLNETLVTMPLGYVTHGLNLEEAARYMRSLKVPATVSVSSPDAVTAYNGYLTSSSKTPEEHFIETISLAGSYKDWSYSGQSTQLGIEFLKRGDKSVYYTSNPTTFHLDGEVITFDNLKTLLSLREVRTIKVFTTVDNINLHTQVVDMSMTYGQQFGPTYLDGADVTKIKPHNSHEGKTFYVLPNDDTLRVEAFEYYHTTDPSFLGRYMSALNHTKKWKYPQVNGLTSIKWADNNCYLATALLTLQQIELKFNPPALQDAYYRARAGEAANFCALILAYCNKTVGELGDVRETMSYLFQHANLDSCKRVLNVVCKTCGQQQTTLKGVEAVMYMGTLSYEQFKKGVQIPCTCGKQATKYLVQQESPFVMMSAPPAQYELKHGTFTCASEYTGNYQCGHYKHITSKETLYCIDGALLTKSSEYKGPITDVFYKENSYITTIKPVTYKLDGVVCTEIDPKLDNYYKKDNSYFTEQPIDLVPNQPYPNASFDNFKFVCDNIKFADDLNQLTGYKKPASRELKVTFFPDLNGDVVAIDYKHYTPSFKKGAKLLHKPIVWHVNNATNKATYKPNTWCIRCLWSTKPVETSNSFDVLKSEDAQGMDNLACEDLKPVSEEVVENPTIQKDVLECNVKTTEVVGDIILKPANNSLKITEEVGHTDLMAAYVDNSSLTIKKPNELSRVLGLKTLATHGLAVVNSVPWDTIANYAKPFLNKVVSTTTNIVTRCLNRVCTNYMPYFFTLLLQLCTFTRSTNSRIKASMPTTIAKNTVKSVGKFCLEASFNYLKSPNFSKLINIIIWFLLLSVCLGSLIYSTAALGVLMSNLGMPSYCTGYREGYLNSTNVTIATYCTGSIPCSVCLSGLDSLDTYPSLETIQITISSFKWDLTAFGLVAEWFLAYILFTRFFYVLGLAAIMQLFFSYFAVHFISNSWLMWLIINLVQMAPISAMVRMYIFFASFYYVWKSYVHVVDGCNSSTCMMCYKRNRATRVECTTIVNGVRRSFYVYANGGKGFCKLHNWNCVNCDTFCAGSTFISDEVARDLSLQFKRPINPTDQSSYIVDSVTVKNGSIHLYFDKAGQKTYERHSLSHFVNLDNLRANNTKGSLPINVIVFDGKSKCEESSAKSASVYYSQLMCQPILLLDQALVSDVGDSAEVAVKMFDAYVNTFSSTFNVPMEKLKTLVATAEAELAKNVSLDNVLSTFISAARQGFVDSDVETKDVVECLKLSHQSDIEVTGDSCNNYMLTYNKVENMTPRDLGACIDCSARHINAQVAKSHNIALIWNVKDFMSLSEQLRKQIRSAAKKNNLPFKLTCATTRQVVNVVTTKIALKGG

SEQ ID NO: 16098 - protein, 1946 aa, Artificial Sequence
  SARS-CoV-2__MT750044.1__non-structural protein 3 (NSP3)
MAPTKVTFGDDTVIEVQGYKSVNITFELDERIDKVLNEKCSAYTVELGTEVNEFACVVADAVIKTLQPVSELLTPLGIDLDEWSMATYYLFDESGEFKLASHMYCSFYPPDEDEEEGDCEEEEFEPSTQYEYGTEDDYQGKPLEFGATSAALQPEEEQEEDWLDDDSQQTVGQQDGSEDNQTTTIQTIVEVQPQLEMELTPVVQTIEVNSFSGYLKLTDNVYIKNADIVEEAKKVKPTVVVNAANVYLKHGGGVAGALNKATNNAMQVESDDYIATNGPLKVGGSCVLSGHNLAKHCLHVVGPNVNKGEDIQLLKSAYENFNQHEVLLAPLLSAGIFGADPIHSLRVCVDTVRTNVYLAVFDKNLYDKLVSSFLEMKSEKQVEQNIAEIPKEEVKPFITESKPSVEQRKQDDKKIKACVEEVTTTLEETKFLTENLLLYIDINGNLHPDSATLVSDIDITFLKKDAPYIVGDVVQEGVLTAVVIPTKKAGGTTEMLAKALRKVPTDNYITTYPGQGLNGYTVEEAKTVLKKCKSAFYILPSIISNEKQEILGTVSWNLREMLAHAEETRKLMPVCVETKAIVSTIQRKYKGIKIQEGVVDYGARFYFYTSKTTVASLINTLNDLNETLVTMPLGYVTHGLNLEEAARYMRSLKVPATVSVSSPDAVTAYNGYLTSSSKTPEEHFIETISLAGSYKDWSYSGQSTQLGIEFLKRGDKSVYYTSNPTTFHLDGEVITFDNLKTLLSLREVRTIKVFTTVDNINLHTQVVDMSMTYGQQFGPTYLDGADVTKIKPHNSHEGKTFYVLPNDDTLRVEAFEYYHTTDPSFLGRYMSALNHTKKWKYPQVNGLTSIKWADNNCYLATALLTLQQIELKFNPPALQDAYYRARAGEAANFCALILAYCNKTVGELGDVRETMSYLFQHANLDSCKRVLNVVCKTCGQQQTTLKGVEAVMYMGTLSYEQFKKGVQIPCTCGKQATKYLVQQESPFVMMSAPPAQYELKHGTFTCASEYTGNYQCGHYKHITSKETLYCIDGALLTKSSEYKGPITDVFYKENSYTTTIKPVTYKLDGVVCTEIDPKLDNYYKKDNSYFTEQPIDLVPNQPYPNASFDNFKFVCDNIKFADDLNQLTGYKKPASRELKVTFFPDLNGDVVAIDYKHYTPSFKKGAKLLHKPIVWHVNNATNKATYKPNTWCIRCLWSTKPVETSNSFDVLKSEDAQGMDNLACEDLKPVSEEVVENPTIQKDVLECNVKTTEVVGDIILKPANNSLKITEEVGHTDLMAAYVDNSSLTIKKPNELSRVLGLKTLATHGLAAVNSVPWDTIANYAKPFLNKVVSTTTNIVTRCLNRVCTNYMPYFFTLLLQLCTFTRSTNSRIKASMPTTIAKNTVKSVGKFCLEALFNYLKSPNFSKLINIIIWFLLLSVCLGSLIYSTAALGVLMSNLGMPSYCTGYREGYLNSTNVTIATYCTGSIPCSVCLSGLDSLDTYPSLETIQITISSFKWDLTAFGLVAEWFLAYILFTRFFYVLGLAAIMQLFFSYFAVHFISNSWLMWLIINLVQMAPISAMVRMYIFFASFYYVWKSYVHVVDGCNSSTCMMCYKRNRATRVECTTIVNGVRRSFYVYANGGKGFCKLHNWNCVNCDTFCAGSTFISDEVARDLSLQFKRPINPTDQSSYIVDSVTVKNGSIHLYFDKAGQKTYERHSLSHFVNLDNLRANNTKGSLPINVIVFDGKSKCEESSAKSASVYYSQLMCQPILLLDQALVSDVGDSAEVAVKMFDAYVNTFSSTFNVPMEKLKTLVATAEAELAKNVSLDNVLSTFISAARQGFVDSDVETKDVVECLKLSHQSDIEVTGDSCNNYMLTYNKVENMTPRDLGACIDCSARHINAQVAKSHNVALIWNVKDFMSLSEQLRKQIRSAAKKNNLPFKLTCATTRQVVNVVTTKIALKGG

SEQ ID NO: 16099 - protein, 1946 aa, Artificial Sequence
  SARS-CoV-2__MT750049.1__non-structural protein 3 (NSP3)
MAPTKVTFGDDTVIEVQGYKSVNITFELDERIDKVLNEKCSAYTVELGTEVNEFACVVADAVIKTLQPVSELLTPLGIDLDEWSMATYYLFDESGEFKLASHMYCSFYPPDEDEEEGDCEEEEFEPSTQYEYGTEDDYQGKPLEFGATSAALQPEEEQEEDWLDDDSQQTVGQQDGSEDNQTTTIQTIVEVQPQLEMELTPVVQTIEVNSFSGYLKLTDNVYIKNADIVEEAKKVKPTVVVNAANVYLKHGGGVAGALNKATNNAMQVESDDYIATNGPLKVGGSCVLSGHNLAKHCLHVVGPNVNKGEDIQLLKSAYENFNQHEVLLAPLLSAGIFGADPIHSLRVCVDTVRTNVYLAVFDKNLYDKLVSSFLEMKSEKQVEQNIAEIPKEEVKPFITESKPSVEQRKQDDKKIKACVEEVTTTLEETKFLTENLLLYIDINGNLHPDSATLVSDIDITFLKKDAPYIVGDVVQEGVLTAVVIPTKKAGGTTEMLAKALRKVSTDNYITTYPGQGLNGYTVEEAKTVLKKCKSAFYILPSIISNEKQEILGTVSWNLREMLAHAEETRKLMPVCVETKAIVSTIQRKYKGIKIQEGVVDYGARFYFYTSKTTVASLINTLNDLNETLVTMPLGYVTHGLNLEEAARYMRSLKVPATVSVSSPDAVTAYNGYLTSSSKTPEEHFIETISLAGSYKDWSYSGQSTQLGIEFLKRGDKSVYYTSNPTTFHLDGEVITFDNLKTLLSLREVRTIKVFTTVDNINLHTQVVDMSMTYGQQFGPTYLDGADVTKIKPHNSHEGKTFYVLPNDDTLRVEAFEYYHTTDPSFLGRYMSALNHTKKWKYPQVNGLTSIKWADNNCYLATALLTLQQIELKFNPPALQDAYYRARAGEAANFCALILAYCNKTVGELGDVRETMSYLFQHANLDSCKRVLNVVCKTCGQQQTTLKGVEAVMYMGTLSYEQFKKGVQIPCTCGKQATKYLVQQESSFVMMSAPPAQYELKHGTFTCASEYTGNYQCGHYKHITSKETLYCIDGALLTKSSEYKGPITDVFYKENSYTTTIKPVTYKLDGVVCTEIDPKLDNYYKKDNSYFTEQPIDLVPNQPYPNASFDNFKFVCDNIKFADDLNQLTGYKKPASRELKVTFFPDLNGDVVAIDYKHYTPSFKKGAKLLHKPIVWHVNNATNKATYKPNTWCIRCLWSTKPVETSNSFDVLKSEDAQGMDNLACEDLKPVSEEVVENPTIQKDVLECNVKTTEVVGDIILKPANNSLKITEEVGHTDLMAAYVDNSSLTIKKPNELSRVLGLKTLATHGLAAVNSVPWDTIANYAKPFLNKVVSTTTNIVTRCLNRVCTNYMPYFFTLLLQLCTFTRSTNSRIKASMPTTIAKNTVKSVGKFCLEASFNYLKSPNFSKLINIIIWFLLLSVCLGSLIYSTAALGVLMSNLGMPSYCTGYREGYLNSTNVTIATYCTGSIPCSVCLSSLDSLDTYPSLETIQITISSFKWDLTAFGLVAEWFLAYILFTRFFYVLGLAAIMQLFFSYFAVHFISNSWLMWLIINLVQMAPISAMVRMYIFFASFYYVWKSYVHVVDGCNSSTCMMCYKRNRATRVECTTIVNGVRRSFYVYANGGKGFCKLHNWNCVNCDTFCAGSTFISDEVARDLSLQFKRPINPTDQSSYIVDSVTVKNGSIHLYFDKAGQKTYERHSLSHFVNFDNLRANNTKGSLPINVIVFDGKSKCEESSAKSASVYYSQLMCQPILLLDQALVSDVGDSAEVAVKMFDAYVNTFSSTFNVPMEKLKTLVATAEAELAKNVSLDNVLSTFISAARQGFVDSDVETKDVVECLKLSHQSDIEVTGDSCNNYMLTYNKVENMTPRDLGACIDCSARHINAQVAKSHNIALIWNVKDFMSLSEQLRKQIRSAAKKNNLPFKLTCATTRQVVNVVTTKIALKGG

SEQ ID NO: 16100 - protein, 1946 aa, Artificial Sequence
  SARS-CoV-2__MT750056.1__non-structural protein 3 (NSP3)
MAPTKVTFGDDTVIEVQGYKSVNITFELDERIDKVLNEKCSAYTVELGTEVNEFACVVADAVIKTLQPVSELLTPLGIDLDEWSMATYYLFDESGEFKLASHMYCSFYPPDEDEEEGDCEEEEFEPSTQYEYGTEDDYQGKPLEFGATSAALQPEEEQEEDWLDDDSQQTVGQQDGSEDNQTTTIQTIVEVQPQLEMELTPVVQTIEVNSFSGYLKLTDNVYIKNADIVEEAKKVKPTVVVNAANVYLKHGGGVAGALNKATNNAMQVESDDYIATNGPLKVGGSCVLSGHNLAKHCLHVVGPNVNKGEDIQLLKSAYENFNQHEVLLAPLLSAGIFGADPIHSLRVCVDTVRTNVYLAVFDKNLYDKLVSSFLEMKSEKQVEQNIAEIPKEEVKPFITESKPSVEQRKQDDKKIKACVEEVTTTLEETKFLTENLLLYIDINGNLHPDSATLVSDIDITFLKKDAPYIVGDVVQEGVLTAVVIPTKKAGGTTEMLAKALRKVPTDNYITTYPGQGLNGYTVEEAKTVLKKCKSAFYILPSIISNEKQEILGTVSWNLREMLAHAEETRKLMPVCVETKAIVSTIQRKYKGIKIQEGVVDYGARFYFYTSKTTVASLINTLNDLNETLVTMPLGYVTHGLNLEEAARYMRSLKVPATVSVSSPDAVTAYNGYLTSSSKTPEEHFIETISLAGSYKDWSYSGQSTQLGIEFLKRGDKSVYYTSNPTTFHLDGEVITFDNLKTLLSLREVRTIKVFTTVDNINLHTQVVDMSMTYGQQFGPTYLDGADVTKIKPHNSHEGKTFYVLPNDDTLRVEAFEYYHTTDPSFLGRYMSALNHTKKWKYPQVNGLTSIKWADNNCYLATALLTLQQIELKFNPPALQDAYYRARAGEAANFCALILAYCNKTVGELGDVRETMSYLFQHANLDSCKRVLNVVCKTCGQQQTTLKGVEAVMYMGTLSYEQFKKGVQIPCTCGKQATKYLVQQESPFVMMSAPPAQYELKHGTFTCASEYTGNYQCGHYKHITSKETLYCIDGALLTKSSEYKGPITDVFYKENSYTTTIKPVTYKLDGVVCTEIDPKLDNYYKKDNSYFTEQPIDLVPNQPYPNASFDNFKFVCDNIKFADDLNQLTGYKKPASRELKVTFFPDLNGDVVAIDYKHYTPSFKKGAKLLHKPIVWHVNNATNKATYKPNTWCIRCLWSTKPVETSNSFDVLKSEDAQGMDNLACEDLKPVSEEVVENPTIQKDVLECNVKTTEVVGDIILKPANNSLKITEEVGHTDLMAAYVDNSSLTIKKPNELSRVLGLKTLATHGLAAVNSVPWDTIANYAKPFLNKVVSTTTNIVTRCLNRVCTNYMPYFFTLLLQLCTFTRSTNSRIKASMPTTIAKNTVKSVGKFCLEASFNYLKSPNFSKLINIIIWFLLLSVCLGSLIYSTAALGVLMSNLGMPSYCTGYREGYLNSTNVTIATYCTGSIPCSVCLSGLDSLDTYPSLETIQITISSFKWDLTAFGLVAEWFLAYILFTRFFYVLGLAAIMQLFFSYFAVHFISNSWLMWLIINLVQMAPISAMVRMYIFFASFYYVWKSYVHVVDGCNSSTCMMCYKRNRATRVECTTIVNGVRRSFYVYANGGKGFCKLHNWNCVNCDTFCAGSTFISDEVARDLSLQFKRPINPTDQSSYIVDSVTVKNGSIHLYFDKAGQKTYERHSLSHFVNLDNLRANNTKSSLPINVIVFDGKSKCEESSAKSASVYYSQLMCQPILLLDQALVSDVGDSAEVAVKMFDAYVNTFSSTFNVPMEKLKTLVATAEAELAKNVSLDNVLSTFISAARQGFVDSDVETKDVVECLKLSHQSDIEVTGDSCNNYMLTYNKVENMTPRDLGACIDCSARHINAQVAKSHNIALIWNVKDFMSLSEQLRKQIRSAAKKNNLPFKLTCATTRQVVNVVTTKIALKGG

SEQ ID NO: 16101 - protein, 1946 aa, Artificial Sequence
  SARS-CoV-2__MT750087.1__non-structural protein 3 (NSP3)
MAPTKVTFGDDTVIEVQGYKSVNITFELDERIDKVLNEKCSAYTVELGTEVNEFACVVADAVIKTLQPVSELLTPLGIDLDEWSMATYYLFDESGEFKLASHMYCSFYPPDEDEEEGDCEEEEFEPSTQYEYGTEDDYQGKPLEFGATSAALQPEEEQEEDWLDDDSQQTVGQQDGSEDNQTTTIQTIVEVQPQLEMELTPVVQTIEVNSFSGYLKLTDNVYIKNADIVEEAKKVKPTVVVNAANVYLKHGGGVAGALNKATNNAMQVESDDYIATNGPLKVGGSCVLSGHNLAKHCLHVVGPNVNKGEDIQLLKSAYENFNQHEVLLAPLLSAGIFGADPIHSLRVCVDTVRTNVYLAVFDKNLYDKLVSSFLEMKSEKQVEQKIAEIPKEEVKPFITESKPSVEQRKQDDKKIKACVEEVTTTLEETKFLTENLLLYIDINGNLHPDSATLVSDIDITFLKKDAPYIVGDVVQEGVLTAVVIPTKKAGGTTEMLAKALRKVPTDNYITTYPGQGLNGYTVEEAKTVLKKCKSAFYILPSIISNEKQEILGTVSWNLREMLAHAEETRKLMPVCVETKAIVSIIQRKYKGIKIQEGVVDYGARFYFYTSKTTVASLINTLNDLNETLVTMPLGYVTHGLNLEEAARYMRSLKVPATVSVSSPDAVTAYNGYLTSSSKTPEEHFIETISLAGSYKDWSYSGQSTQLGIEFLKRGDKSVYYTSNPTTFHLDGEVITFDNLKTLLSLREVRTIKVFTTVDNINLHTQVVDMSMTYGQQFGPTYLDGADVTKIKPHNSHEGKTFYVLPNDDTLRVEAFEYYHTTDPSFLGRYMSALNHTKKWKYPQVNGLTSIKWADNNCYLATALLTLQQIELKFNPPALQDAYYRARAGEAANFCALILAYCNKTVGELGDVRETMSYLFQHANLDSCKRVLNVVCKTCGQQQTTLKGVEAVMYMGTLSYEQFKKGVQIPCTCGKQATKYLVQQESPFVMMSAPPAQYELKHGTFTCASEYTGNYQCGHYKHITSKETLYCIDGALLTKSSEYKGPITDVFYKENSYTTTIKPVTYKLDGVVCTEIDPKLDNYYKKDNSYFTEQPIDLVPNQPYPNASFDNFKFVCDNIKFADDLNQLTGYKKPASRELKVTFFPDLNGDVVAIDYKHYTPSFKKGAKLLHKPIVWHVNNATNKATYKPNTWCIRCLWSTKPVETSNSFDVLKSEDAQGMDNLACEDLKPVSEEVVENPTIQKDVLECNVKTTEVVGDIILKPANNSLKITEEVGHTDLMAAYVDNSSLTIKKPNELSRVLGLKTLATHGLAAVNSVPWDTIANYAKPFLNKVVSTTTNIVTRCLNRVCTNYMPYFFTLLLQLCTFTRSTNSRIKASMPTTIAKNTVKSVGKFCLEASFNYLKSPNFSKLINIIIWFLLLSVCLGSLIYSTAALGVLMSNLGMPSYCTGYREGYLNSTNVTIATYCTGSIPCSVCLSGLDSLDTYPSLETIQITISSFKWDLTAFGLVAEWFLAYILFTRFFYVLGLAAIMQLFFSYFAVHFISNSWLMWLIINLVQMAPISAMVRMYIFFASFYYVWKSYVHVVDGCNSSTCMMCYKRNRATRVECTTIVNGVRRSFYVYANGGKGFCKLHNWNCVNCDTFCAGSTFISDEVARDLSLQFKRPINPTDQSSYIVDSVTVKNGSIHLYFDKAGQKTYERHSLSHFVNLDNLRANNTKGSLPINVIVFDGKSKCEESSAKSASVYYSQLMCQPILLLDQALVSDVGDSAEVAVKMFDAYVNTFSSTFNVPMEKLKTLVATAEAELAKNVSLDNVLSTFISAARQGFVDSDVETKDVVECLKLSHQSDIEVTGDSCNNYMLTYNKVENMTPRDLGACIDCSARHINAQVAKSHNIALIWNVKDFMSLSEQLRKQIRSAAKKNNLPFKLTCATTRQVVNVVTTKIALKGG

SEQ ID NO: 16102 - protein, 1946 aa, Artificial Sequence
  SARS-CoV-2__MT750365.1__non-structural protein 3 (NSP3)
MAPTKVTFGDDTVIEVQGYKSVNITFELDERIDKVLNEKCSAYTVELGTEVNEFACVVADAVIKTLQPVSELLTPLGIDLDEWSMATYYLFDESGEFKLASHMYCSFYPPDEDEEEGDCEEEEFEPSTQYEYGTEDDYQGKPLEFGATSAALQPEEEQEEDWLDDDSQQTVGQQDGSEDNQTTTIQTIVEVQPQLEMELTPVVQTIEVNSFSGYLKLTDNVYIKNADIVEEAKKVKPTVVVNAANVYLKHGGGVAGALNKATNNAMQVESDDYIATNGPLKVGGSCVLSGHNLAKHCLHVVGPNVNKGEDIQLLKSAYENFNQHEVLLAPLLSAGIFGADPIHSLRVCVDTVRTNVYLAVFDKNLYDKLVSSFLEMKSEKQVEQKIAEIPKEEVKPFITESKPSVEQRKQDDKKIKACVEEVTTTLEETKFLTENLLLYIDINGNLHPDSATLVSDIDITFLKKDAPYIVGDVVQEGVLTAVVIPTKKAGGTTEMLAKALRKVPTDNYITTYPGQGLNGYTVEEAKTVLKKCKSAFYILPSIISNEKQEILGTVSWNLREMLAHAEETRKLMPVCVETKAIVSTIQRKYKGIKIQEGVVDYGARFYFYTSKTTVASLINTLNDLNETLVTMPLGYVTHGLNLEEAARYMRSLKVPATVSVSSPDAVTAYNGYLTSSSKTPEEHFIETISLAGSYKDWSYSGQSTQLGIEFLKRGDKSVYYTSNPTTFHLDGEVITFDNLKTLLSLREVRTIKVFTTVDNINLHTQVVDMSMTYGQQFGPTYLDGADVTKIKPHNSHEGKTFYVLPNDDTLRVEAFEYYHTTDPSFLGRYMSALNHTKKWKYPQVNGLTSIKWADNNCYLATALLTLQQIELKFNPPALQDAYYRARAGEAANFCALILAYCNKTVGELGDVRETMSYLFQHANLDSCKRVLNVVCKTCGQQQTTLKGVEAVMYMGTLSYEQFKKGVQIPCTCGKQATKYLVQQESPFVMMSAPPAQYELKHGTFTCASEYTGNYQCGHYKHITSKETLYCIDGALLTKSSEYKGPITDVFYKENSYTTTIKPVTYKLDGVVCTEIDPKLDNYYKKDNSYFTEQPIDLVPNQPYPNASFDNFKFVCDNIKFADDLNQLTGYKKPASRELKVTFFPDLNGDVVAIDYKHYTPSFKKGAKLLHKPIVWHVNNATNKATYKPNTWCIRCLWSTKPVETSNSFDVLKSEDAQGMDNLACEDLKPVSEEVVENPTIQKDVLECNVKTTEVVGDIILKPANNSLKITEDVGHTDLMAAYVDNSSLTIKKPNELSRVLGLKTLATHGLAAVNSVPWDTIANYAKPFLNKVVSTTTNIVTRCLNRVCTNYMPYFFTLLLQLCTFTRSTNSRIKASMPTTIAKNTVKSVGKFCLEASFNYLKSPNFSKLINIIIWFLLLSVCLGSLIYSTAALGVLMSNLGMPSYCTGYREGYLNSTNVTIATYCTGSIPCSVCLSGLDSLDTYPSLETIQITISSFKWDLTAFGLVAEWFLAYILFTRFFYVLGLAAIMQLFFSYFAVHFISNSWLMWLIINLVQMAPISAMVRMYIFFASFYYVWKSYVHVVDGCNSSTCMMCYKRNRATRVECTTIVNGVRRSFYVYANGGKGFCKLHNWNCVNCDTFCAGSTFISDEVARDLSLQFKRPINPTDQSSYIVDSVTVKNGSIHLYFDKAGQKTYERHSLSHFVNLDNLRANNTKGSLPINVIVFDGKSKCEESSAKSASVYYSQLMCQPILLLDQALVSDVGDSAEVAVKMFDAYVNTFSSTFNVPMEKLKTLVATAEAELAKNVSLDNVLSTFISAARQGFVDSDVETKDVVECLKLSHQSDIEVTGDSCNNYMLTYNKVENMTPRDLGACIDCSARHINAQVAKSHNIALIWNVKDFMSLSEQLRKQIRSAAKKNNLPFKLTCATTRQVVNVVTTKIALKGG

SEQ ID NO: 16103 - protein, 1946 aa, Artificial Sequence
  SARS-CoV-2__MT750410.1__non-structural protein 3 (NSP3)
MAPTKVTFGDDTVIEVQGYKSVNITFELDERIDKVLNEKCSAYTVELGTEVNEFACVVADAVIKTLQPVSELLTPLGIDLDEWSMATYYLFDESGEFKLASHMYCSFYPPDEDEEEGDCEEEEFEPSTQYEYGTEDDYQGKPLEFGATSAALQPEEEQEEDWLDDDSQQTVGQQDGSEDNQTTTIQTIVGVQPQLEMELTPVVQTIEVNSFSGYLKLTDNVYIKNADIVEEAKKVKPTVVVNAANVYLKHGGGVAGALNKATNNAMQVESDDYIATNGPLKVGGSCVLSGHNLAKHCLHVVGPNVNKGEDIQLLKSAYENFNQHEVLLAPLLSAGIFGADPIHSLRVCVDTVRTNVYLAVFDKNLYDKLVSSFLEMKSEKQVEQKIAEIPKEEVKPFITESKPSVEQRKQDDKKIKACVEEVTTTLEETKFLTENLLLYIDINGNLHPDSATLVSDIDITFLKKDAPYIVGDVVQEGVLTAVVIPTKKAGGTTEMLAKALRKVPTDNYITTYPGQGLNGYTVEEAKTVLKKCKSAFYILPSIISNEKQEILGTVSWNLREMLAHAEETRKLMPVCVETKAIVSTIQRKYKGIKIQEGVVDYGARFYFYTSKTTVASLINTLNDLNETLVTMPLGYVTHGLNLEEAARYMRSLKVPATVSVSSPDAVTAYNGYLTSSSKTPEEHFIETISLAGSYKDWSYSGQSTQLGIEFLKRGDKSVYYTSNPTTFHLDGEVITFDNLKTLLSLREVRTIKVFTTVDNINLHTQVVDMSMTYGQQFGPTYLDGADVTKIKPHNSHEGKTFYVLPNDDTLRVEAFEYYHTTDPSFLGRYMSALNHTKKWKYPQVNGLTSIKWADNNCYLATALLTLQQIELKFNPPALQDAYYRARAGEAANFCALILAYCNKTVGELGDVRETMSYLFQHANLDSCKRVLNVVCKTCGQQQTTLKGVEAVMYMGTLSYEQFKKGVQIPCTCGKQATKYLVQQESPFVMMSAPPAQYELKHGTFTCASEYTGNYQCGHYKHITSKETLYCIDGALLTKSSEYKGPITDVFYKENSYTTTIKPVTYKLDGVVCTEIDPKLDNYYKKDNSYFTEQPIDLVPNQPYPNASFDNFKFVCDNIKFADDLNQLTGYKKPASRELKVTFFPDLNGDVVAIDYKHYTPSFKKGAKLLHKPIVWHVNNATNKATYKPNTWCIRCLWSTKPVETSNSFDVLKSEDAQGMDNLACEDLKPVSEEVVENPTIQKDVLECNVKTTEVVGDIILKPANNSLKITEEVGHTDLMAAYVDNSSLTIKKPNELSRVLGLKTLATHGLAAVNSVPWDTIANYAKPFLNKVVSTTTNIVTRCLNRVCTNYMPYFFTLLLQLCTFTRSTNSRIKASMPTTIAKNTVKSVGKFCLEASFNYLKSPNFSKLINIIIWFLLLSVCLGSLIYSTAALGVLMSNLGMPSYCTGYREGYLNSTNVTIATYCTGSIPCSVCLSGLDSLDTYPSLETIQITISSFKWDLTAFGLVAEWFLAYILFTRFFYVLGLAAIMQLFFSYFAVHFISNSWLMWLIINLVQMAPISAMVRMYIFFASFYYVWKSYVHVVDGCNSSTCMMCYKRNRATRVECTTIVNGVRRSFYVYANGGKGFCKLHNWNCVNCDTFCAGSTFISDEVARDLSLQFKRPINPTDQSSYIVDSVTVKNGSIHLYFDKAGQKTYERHSLSHFVNLDNLRANNTKGSLPINVIVFDGKSKCEESSAKSASVYYSQLMCQPILLLDQALVSDVGDSAEVAVKMFDAYVNTFSSTFNVPMEKLKTLVATAEAELAKNVSLDNVLSTFISAARQGFVDSDVETKDVVECLKLSHQSDIEVTGDSCNNYMLTYNKVENMTPRDLGACIDCSARHINAQVAKSHNIALIWNVKDFMSLSEQLRKQIRSAAKKNNLPFKLTCATTRQVVNVVTTKIALKGG

SEQ ID NO: 16104 - protein, 1946 aa, Artificial Sequence
  SARS-CoV-2__MT750418.1__non-structural protein 3 (NSP3)
MAPTKVTFGDDTVIEVQGYKSVNITFELDERIDKVLNEKCSAYTVELGTEVNEFACVVADAVIKTLQPVSELLTPLGIDLDEWSMATYYLFDESGEFKLASHMYCSFYPPDEDEEEGDCEEEEFEPSTQYEYGTEDDYQGKPLEFGATSAALQPEEEQEEDWLDDDSQQTVGQQDGSEDNQTTTIQTIVEVQPQLEMELTPVVQTIEVNSFSGYLKLTDNVYIKNADIVEEAKKVKPTVVVNAANVYLKHGGGVAGALNKATNNAMQVESDDYIATNGPLKVGGSCVLSGHNLAKHCLHVVGPNVNKGEDIQLLKSAYENFNQHEVLLAPLLSAGIFGADPIHSLRVCVDTVRTNVYLAVFDKNLYDKLVSSFLEMKSEKQVEQKIAEIPKEEVKPFITESKPSVEQRKQDDKKIKACVEEVTTTLEETKFLTENLLLYIDINGNLHPDSATLVSDIDITFLKKDAPYIVGDVVQEGVLTAVVIPTKKAGGTTEMLAKALRKVPTDNYITTYPGQGLNGYTVEEAKTVLKKCKSAFYILPSIISNEKQEILGTVSWNLREMLAHAEETRKLMPVCVETKAIVSTIQRKYKGIKIQEGVVDYGARFYFYTSKTTVASLINTLNDLNETLVTMPLGYVTHGLNLEEAARYMRSLKVPATVSVSSPDAVTAYNGYLTSSSKTPEEHFIETISLAGSYKDWSYSGQSTQLGIEFLKRGDKSVYYTSNPTTFHLDGEVITFDNLKTLLSLREVRTIKVFTTVDNINLHTQVVDMSMTYGQQFGPTYLDGADVTKIKPHNSHEGKTFYVLPNDDTLRVEAFEYYHTTDPSFLGRYMSALNHTKKWKYPQVNGLTSIKWADNNCYLATALLTLQQIELKFNPPALQDAYYRARAGEAANFCALILAYCNKTVGELGDVRETMSYLFQHANLDSCKRVLNVVCKTCGQQQTTLKGVEAVMYMGTLSYEQFKKGVQIPCTCGKQATKYLVQQESPFVMMSAPPAQYELKHGTFTCASEYTGNYQCGHYKHITSKETLYCIDGALLTKSSEYKGPITDVFYKENSYTTTIKPVTYKLDGVVCTEIDPKLDNYYKKDNSYFTEQPIDLVPNQPYPNASFDNFKFVCDNIKFADDLNQLTGYKKPASRELKVTFFPDLNGDVVAIDYKHYTPSFKKGAKLLHKPIVWHVNNATNKATYKPNTWCIRCLWSTKPVETSNSFDVLKSEDAQGMDNLACEDLKPVSEEVVENPTIQKDVLECNVKTTEVVGDIILKPANNSLKITEEVGHTDLMAAYVDNSSLTIKKPNELSRVLGLKTLATHGLAAVNSVPWDTIANYAKPFLNKVVSTTTNIVTRCLNRVCTNYMPYFFTLLLQLCTFTRSTNSRIKASMPTTIAKNTVKSVGKFCLEASFNYLKSPNFSKLINIIIWFLLLSVCLGSLIYSTAALGVLMSNLGMPSYCTGYREGYLNSTNVTIATYCTGSIPCSVCLSGLDSLDTYPSLETIQITISSFKWDLTAFGLVAEWFLAYILFTRFFYVLGLAAIMQLFFSYFAVHFISNSWLMWLIINLVQMAPISAMVRMYIFFASFYYVWKSYVHVVDGCNSSTCMMCYKRNRATRVECTTIVNGVRRSFYVYANGGKGFCKLHNWNCVNCDTFCAGSTFISDEVARDLSLQFKRPINPTDQSSYIVDSVTVKNGSIHLYFDKAGQKTYERHSLSHFVNLDNLRANNTKGSLPINVIVFDGKSKCEESSAKSASVYYSQLMCQPILLLDQALVSDVGDSAEAAVKMFDAYVNTFSSTFNVPMEKLKTLVATAEAELAKNVSLDNVLSTFISAARQGFVDSDVETKDVVECLKLSHQSDIEVTGDSCNNYMLTYNKVENMTPRDLGACIDCSARHINAQVAKSHNIALIWNVKDFMSLSEQLRKQIRSAAKKNNLPFKLTCATTRQVVNVVTTKIALKGG

SEQ ID NO: 16105 - protein, 1946 aa, Artificial Sequence
  SARS-CoV-2__MT750436.1__non-structural protein 3 (NSP3)
MAPTKVTFGDDTVIEVQGYKSVNITFELDERIDKVLNEKCSAYTVELGTEVNEFACVVADAVIKTLQPVSELLTPLGIDLDEWSMATYYLFDESGEFKLASHMYCSFYPPDEDEEEGDCEEEEFEPSTQYEYGTEDDYQGKPLEFGATSAALQPEEEQEEDWLDDDSQQTVGQQDGSEDNQTTTIQTIVEVQPQLDMELTPVVQTIEVNSFSGYLKLTDNVYIKNADIVEEAKKVKPTVVVNAANVYLKHGGGVAGALNKATNNAMQVESDDYIATNGPLKVGGSCVLSGHNLAKHCLHVVGPNVNKGEDIQLLKSAYENFNQHEVLLAPLLSAGIFGADPIHSLRVCVDTVRTNVYLAVFDKNLYDKLVSSFLEMKSEKQVEQKIAEIPKEEVKPFITESKPSVEQRKQDDKKIKACVEEVTTTLEETKFLTENLLLYIDINGNLHPDSATLVSDIDITFLKKDAPYIVGDVVQEGVLTAVVIPTKKAGGTTEMLAKALRKVPTDNYITTYPGQGLNGYTVEEAKTVLKKCKSAFYILPSIISNEKQEILGTVSWNLREMLAHAEETRKLMPVCVETKAIVSTIQRKYKGIKIQEGVVDYGARFYFYTSKTTVASLINTLNDLNETLVTMPLGYVTHGLNLEEAARYMRSLKVPATVSVSSPDAVTAYNGYLTSSSKTPEEHFIETISLAGSYKDWSYSGQSTQLGIEFLKRGDKSVYYTSNPTTFHLDGEVITFDNLKTLLSLREVRTIKVFTTVDNINLHTQVVDMSMTYGQQFGPTYLDGADVTKIKPHNSHEGKTFYVLPNDDTLRVEAFEYYHTTDPSFLGRYMSALNHTKKWKYPQVNGLTSIKWADNNCYLATALLTLQQIELKFNPPALQDAYYRARAGEAANFCALILAYCNKTVGELGDVRETMSYLFQHANLDSCKRVLNVVCKTCGQQQTTLKGVEAVMYMGTLSYEQFKKGVQIPCTCGKQATKYLVQQESPFVMMSAPPAQYELKHGTFTCASEYTGNYQCGHYKHITSKETLYCIDGALLTKSSEYKGPITDVFYKENSYTTTIKPVTYKLDGVVCTEIDPKLDNYYKKDNSYFTEQPIDLVPNQPYPNASFDNFKFVCDNIKFADDLNQLTGYKKPASRELKVTFFPDLNGDVVAIDYKHYTPSFKKGAKLLHKPIVWHVNNATNKATYKPNTWCIRCLWSTKPVETSNSFDVLKSEDAQGMDNLACEDLKPVSEEVVENPTIQKDVLECNVKTTEVVGDIILKPANNSLKITEEVGHTDLMAAYVDNSSLTIKKPNELSRVLGLKTLATHGLAAVNSVPWDTIANYAKPFLNKVVSTTTNIVTRCLNRVCTNYMPYFFTLLLQLCTFTRSTNSRIKASMPTTIAKNTVKSVGKFCLEASFNYLKSPNFSKLINIIIWFLLLSVCLGSLIYSTAALGVLMSNLGMPSYCTGYREGYLNSTNVTIATYCTGSIPCSVCLSGLDSLDTYPSLETIQITISSFKWDLTAFGLVAEWFLAYILFTRFFYVLGLAAIMQLFFSYFAVHFISNSWLMWLIINLVQMAPISAMVRMYIFFASFYYVWKSYVHVVDGCNSSTCMMCYKRNRATRVECTTIVNGVRRSFYVYANGGKGFCKLHNWNCVNCDTFCAGSTFISDEVARDLSLQFKRPINPTDQSSYIVDSVTVKNGSIHLYFDKAGQKTYERHSLSHFVNLDNLRANNTKGSLPINVIVFDGKSKCEESSAKSASVYYSQLMCQPILLLDQALVSDVGDSAEVAVKMFDAYVNTFSSTFNVPMEKLKTLVATAEAELAKNVSLDNVLSTFISAARQGFVDSDVETKDVVECLKLSHQSDIEVTGDSCNNYMLTYNKVENMTPRDLGACIDCSARHINAQVAKSHNIALIWNVKDFMSLSEQLRKQIRSAAKKNNLPFKLTCATTRQVVNVVTTKIALKGG

SEQ ID NO: 16106 - protein, 1946 aa, Artificial Sequence
  SARS-CoV-2__MT742784.1__non-structural protein 3 (NSP3)
MAPTKVTFGDDTVIEVQGYKSVNITFELDERIDKVLNEKCSAYTVELGTEVNEFACVVADAVIKTLQPVSELLTPLGIDLDEWSMATYYLFDESGEFKLASHMYCSFYPLDEDEEEGDCEEEEFEPSTQYEYGTEDDYQGKPLEFGATSAALQPEEEQEEDWLDDDSQQTVGQQDGSEDNQTTTIQTIVEVQPQLEMELTPVVQTIEVNSFSGYLKLTDNVYIKNADIVEEAKKVKPTVVVNAANVYLKHGGGVAGALNKATNNAMQVESDDYIATNGPLKVGGSCVLSGHNLAKHCLHVVGPNVNKGEDIQLLKSAYENFNQHEVLLAPLLSAGIFGADPIHSLRVCVDTVRTNVYLAVFDKNLYDKLVSSFLEMKSEKQVEQKIAEIPKEEVKPFITESKPSVEQRKQDDKKIKACVEEVTTTLEETKFLTENLLLYIDINGNLHPDSATLVSDIDITFLKKDAPYIVGDVVQEGVLTAVVIPTKKAGGTTEMLAKALRKVPTDNYITTYPGQGLNGYTVEEAKTVLKKCKSAFYILPSIISNEKQEILGTVSWNLREMLAHAEETRKLMPVCVETKAIVSTIQRKYKGIKIQEGVVDYGARFYFYTSKTTVASLINTLNDLNETLVTMPLGYVTHGLNLEEAARYMRSLKVPATVSVSSPDAVTAYNGYLTSSSKTPEEHFIETISLAGSYKDWSYSGQSTQLGIEFLKRGDKSVYYTSNPTTFHLDGEVITFDNLKTLLSLREVRTIKVFTTVDNINLHTQVVDMSMTYGQQFGPTYLDGADVTKIKPHNSHEGKTFYVLPNDDTLRVEAFEYYHTTDPSFLGRYMSALNHTKKWKYPQVNGLTSIKWADNNCYLATALLTLQQIELKFNPPALQDAYYRARAGEAANFCALILAYCNKTVGELGDVRETMSYLFQHANLDSCKRVLNVVCKTCGQQQTTLKGVEAVMYMGTLSYEQFKKGVQIPCTCGKQATKYLVQQESPFVMMSAPPDQYELKHGTFTCASEYTGNYQCGHYKHITSKETLYCIDGALLTKSSEYKGPITDVFYKENSYTTTIKPVTYKLDGVVCTEIDPKLDNYYKKDNSYFTEQPIDLVPNQPYPNASFDNFKFVCDNIKFADDLNQLTGYKKPASRELKVTFFPDLNGDVVAIDYKHYTPSFKKGAKLLHKPIVWHVNNATNKATYKPNTWCIRCLWSTKPVETSNSFDVLKSEDAQGMDNLACEDLKPVSEEVVENPTIQKDVLECNVKTTEVVGDIILKPANNSLKITEEVGHTDLMAAYVDNSSLTIKKPNELSRVLGLKTLATHGLAAVNSVPWDTIANYAKPFLNKVVSTTTNIVTRCLNRVCTNYMPYFFTLLLQLCTFTRSTNSRIKASMPTTIAKNTVKSVGKFCLEASFNYLKSPNFSKLINIIIWFLLLSVCLGSLIYSTAALGVLMSNLGMPSYCTGYREGYLNSTNVTIATYCTGSIPCSVCLSGLDSLDTYPSLETIQITISSFKWDLTAFGLVAEWFLAYILFTRFFYVLGLAAIMQLFFSYFAVHFISNSWLMWLIINLVQMAPISAMVRMYIFFASFYYVWKSYVHVVDGCNSSTCMMCYKRNRATRVECTTIVNGVRRSFYVYANGGKGFCKLHNWNCVNCDTFCAGSTFISDEVARDLSLQFKRPINPTDQSSYIVDSVTVKNGSIHLYFDKAGQKTYERHSLSHFVNLDNLRANNTKGSLPINVIVFDGKSKCEESSAKSASVYYSQLMCQPILLLDQALVSDVGDSAEVAVKMFDAYVNTFSSTFNVPMEKLKTLVATAEAELAKNVSLDNVLSTFISAARQGFVDSDVETKDVVECLKLSHQSDIEVTGDSCNNYMLTYNKVENMTPRDLGACIDCSARHINAQVAKSHNIALIWNVKDFMSLSEQLRKQIRSAAKKNNLPFKLTCATTRQVVNVVTTKIALKGG

SEQ ID NO: 16107 - protein, 1946 aa, Artificial Sequence
  SARS-CoV-2__MT740392.1__non-structural protein 3 (NSP3)
MAPTKVTFGDDTVIEVQGYKSVNITFELDERIDKVLNEKCSAYTVELGTEVNEFACVVADAVIKTLQPVSELLTPLGIDLDEWSMATYYLFDESGEFKLASHMYCSFYPPDEDEEEGDCEEEEFEPSTQYEYGTEDDYQGKPLEFGATSAALQPEEEQEEDWLDDDSQQTVGQQDGSDDNQTTTIQTIVEVQPQLEMELTPVVQTIEVNSFSGYLKLTDNVYIKNADIVEEAKKVKPTVVVNAANVYLKHGGGVAGALNKATNNAMQVESDDYIATNGPLKVGGSCVLSGHNLAKHCLHVVGPNVNKGEDIQLLKSAYENFNQHEVLLAPLLSAGIFGADPIHSLRVCVDTVRTNVYLAVFDKNLYDKLVSSFLEMKSEKQVEQKIAEIPKEEVKPFITESKPSVEQRKQDDKKIKACVEEVTTTLEETKFLTENLLLYIDINGNLHPDSATLVSDIDITFLKKDAPYIVGDVVQEGVLTAVVIPTKKAGGTTEMLAKALRKVPTDNYITTYPGQGLNGYTVEEAKTVLKKCKSAFYILPSIISNEKQEILGTVSWNLREMLAHAEETRKLMPVCVETKAIVSTIQRKYKGIKIQEGVVDYGARFYFYTSKTTVASLINTLNDLNETLVTMPLGYVTHGLNLEEAARYMRSLKVPATVSVSSPDAVTAYNGYLTSSSKTPEEHFIETISLAGSYKDWSYSGQSTQLGIEFLKRGDKSVYYTSNPTTFHLDGEVITFDNLKTLLSLREVRTIKVFTTVDNINLHTQVVDMSMTYGQQFGPTYLDGADVTKIKPHNSHEGKTFYVLPNDDTLRVEAFEYYHTTDPSFLGRYMSALNHTKKWKYPQVNGLTSIKWADNNCYLATALLTLQQIELKFNPPALQDAYYRARAGEAANFCALILAYCNKTVGELGDVRETMSYLFQHANLDSCKRVLNVVCKTCGQQQTTLKGVEAVMYMGTLSYEQFKKGVQIPCTCGKQATKYLVQQESPFVMMSAPPAQYELKHGTFTCASEYTGNYQCGHYKHITSKETLYCIDGALLTKSSEYKGPITDVFYKENSYTTTIKPVTYKLDGVVCTEIDPKLDNYYKKDNSYFTEQPIDLVPNQPYPNASFDNFKFVCDNIKFADDLNQLTGYKKPASRELKVTFFPDLNGDVVAIDYKHYTPSFKKGAKLLHKPIVWHVNNATNKATYKPNTWCIRCLWSTKPVETSNSFDVLKSEDAQGMDNLACEDLKPVSEEVVENPTIQKDVLECNVKTTEVVGDIILKPANNSLKITEEVGHTDLMAAYVDNSSLTIKKPNELSRVLGLKTLATHGLAAVNSVPWDTIANYAKPFLNKVVSTTTNIVTRCLNRVCTNYMPYFFTLLLQLCTFTRSTNSRIKASMPTTIAKNTVKSVGKFCLEASFNYLKSPNFSKLINIIIWFLLLSVCLGSLIYSTAALGVLMSNLGMPSYCTGYREGYLNSTNVTIATYCTGSIPCSVCLSGLDSLDTYPSLETIQITISSFKWDLTAFGLVAEWFLAYILFTRFFYVLGLAAIMQLFFSYFAVHFISNSWLMWLIINLVQMAPISAMVRMYIFFASFYYVWKSYVHVVDGCNSSTCMMCYKRNRATRVECTTIVNGVRRSFYVYANGGKGFCKLHNWNCVNCDTFCAGSTFISDEVARDLSLQFKRPINPTDQSSYIVDSVTVKNGSIHLYFDKAGQKTYERHSLSHFVNLDNLRANNTKGSLPINVIVFDGKSKCEESSAKSASVYYSQLMCQPILLLDQALVSDVGDSAEVAVKMFDAYVNTFSSTFNVPMEKLKTLVATAEAELAKNVSLDNVLSTFISAARQGFVDSDVETKDVVECLKLSHQSDIEVTGDSCNNYMLTYNKVENMTPRDLGACIDCSARHINAQVAKSHNIALIWNVKDFMSLSEQLRKQIRSAAKKNNLPFKLTCATTRQVVNVVTTKIALKGG

SEQ ID NO: 16108 - protein, 1946 aa, Artificial Sequence
  SARS-CoV-2__MT740401.1__non-structural protein 3 (NSP3)
MAPTKVTFGDDTVIEVQGYKSVNITFELDERIDKVLNEKCSAYTVELGTEVNEFACVVADAVIKTLQPVSELLTPLGIDLDEWSMATYYLFDESGEFKLASHMYCSFYPPDEDEEEGDCEEEEFEPSTQYEYGTEDDYQGKPLEFGATSAALQPEEEQEEDWLDDDSQQTVGQQDGSEDNQTTTIQTIVEVQPQLEMELTPVVQTIEVNSFSGYLKLTDNVYIKNADIVEEAKKVKPTVVVNAANVCLKHGGGVAGALNKATNNAMQVESDDYIATNGPLKVGGSCVLSGHNLAKHCLHVVGPNVNKGEDIQLLKSAYENFNQHEVLLAPLLSAGIFGADPIHSLRVCVDTVRTNVYLAVFDKNLYDKLVSSFLEMKSEKQVEQKIAEIPKEEVKPFITESKPSVEQRKQDDKKIKACVEEVTTTLEETKFLTENLLLYIDINGNLHPDSATLVSDIDITFLKKDAPYIVGDVVQEGVLTAVVIPTKKAGGTTEMLAKALRKVPTDNYITTYPGQGLNGYTVEEAKTVLKKCKSAFYILPSIISNEKQEILGTVSWNLREMLAHAEETRKLMPVCVETKAIVSTIQRKYKGIKIQEGVVDYGARFYFYTSKTTVASLINTLNDLNETLVTMPLGYVTHGLNLEEAARYMRSLKVPATVSVSSPDAVTAYNGYLTSSSKTPEEHFIETISLAGSYKDWSYSGQSTQLGIEFLKRGDKSVYYTSNPTTFHLDGEVITFDNLKTLLSLREVRTIKVFTTVDNINLHTQVVDMSMTYGQQFGPTYLDGADVTKIKPHNSHEGKTFYVLPNDDTLRVEAFEYYHTTDPSFLGRYMSALNHTKKWKYPQVNGLTSIKWADNNCYLATALLTLQQIELKFNPPALQDAYYRARAGEAANFCALILAYCNKTVGELGDVRETMSYLFQHANLDSCKRVLNVVCKTCGQQQTTLKGVEAVMYMGTLSYEQFKKGVQIPCTCGKQATKYLVQQESPFVMMSAPPAQYELKHGTFTCASEYTGNYQCGHYKHITSKETLYCIDGALLTKSSEYKGPITDVFYKENSYTTTIKPVTYKLDGVVCTEIDPKLDNYYKKDNSYFTEQPIDLVPNQPYPNASFDNFKFVCDNIKFADDLNQLTGYKKPASRELKVTFFPDLNGDVVAIDYKHYTPSFKKGAKLLHKPIVWHVNNATNKATYKPNTWCIRCLWSTKPVETSNSFDVLKSEDAQGMDNLACEDLKPVSEEVVENPTIQKDVLECNVKTTEVVGDIILKPANNSLKITEEVGHTDLMAAYVDNSSLTIKKPNELSRVLGLKTLATHGLAAVNSVPWDTIANYAKPFLNKVVSTTTNIVTRCLNRVCTNYMPYFFTLLLQLCTFTRSTNSRIKASMPTTIAKNTVKSVGKFCLEASFNYLKSPNFSKLINIIIWFLLLSVCLGSLIYSTAALGVLMSNLGMPSYCTGYREGYLNSTNVTIATYCTGSIPCSVCLSGLDSLDTYPSLETIQITISSFKWDLTAFGLVAEWFLAYILFTRFFYVLGLAAIMQLFFSYFAVHFISNSWLMWLIINLVQMAPISAMVRMYIFFASFYYVWKSYVHVVDGCNSSTCMMCYKRNRATRVECTTIVNGVRRSFYVYANGGKGFCKLHNWNCVNCDTFCAGSTFISDEVARDLSLQFKRPINPTDQSSYIVDSVTVKNGSIHLYFDKAGQKTYERHSLSHFVNLDNLRANNTKGSLPINVIVFDGKSKCEESSAKSASVYYSQLMCQPILLLDQALVSDVGDSAEVAVKMFDAYVNTFSSTFNVPMEKLKTLVATAEAELAKNVSLDNVLSTFISAARQGFVDSDVETKDVVECLKLSHQSDIEVTGDSCNNYMLTYNKVENMTPRDLGACIDCSARHINAQVAKSHNIALIWNVKDFMSLSEQLRKQIRSAAKKNNLPFKLTCATTRQVVNVVTTKIALKGG

SEQ ID NO: 16109 - protein, 1946 aa, Artificial Sequence
  SARS-CoV-2__MT740435.1__non-structural protein 3 (NSP3)
MAPTKVTFGDDTVIEVQGYKSVNITFELDERIDKVLNEKCSAYTVELGTEVNEFACVVADAVIKTLQPVSELLTPLGIDLDEWSMATYYLFDESGEFKLASHMYCSFYPPDEDEEEGDCEEEEFEPSTQYEYGTEDDYQGKPLEFGATSAALQPEEEQEEDWLDDDSQQTVGQQDGSEDNQTTTIQTIVEVQPQLEMELTPVVQTIEVNSFSGYLKLTDNVYIKNADIVEEAKKVKPTVVVNAANVYLKHGGGVAGALNKATNNAMQVESDDYIATNGPLKVGGSCVLSGHNLAKHCLHVVGPNVNKGEDIQLLKSAYENFNQHEVLLAPLLSAGIFGADPIHSLRVCVDTVRTNVYLAVFDKNLYDKLVSSFLEMKSEKQVEQKIAEIPKEEVKPFITESKPSVEQRKQDDKKIKACVEEVTTTLEETKFLTENLLLYIDINGNLHPDSATLVSDIDITFLKKDAPYIVGDVVQEGVLTAVVIPTKKAGGTTEMLAKALRKVPTDNYITTYPGQGLNGYTVEEAKTVLKKCKSAFYILPSIISNEKQEILGTVSWNLREMLAHAEETRKLMPVCVETKAIVSTIQRKYKGIKIQEGVVDYGARFYFYTSKTTVASLINTLNDLNETLVTMPLGYVTHGLNLEEAARYMRSLKVPATVSVSSPDAVTAYNGYLTSSSKTPEEHFIETISLAGSYKDWSYSGQSTQLGIEFLKRGDKSVYYTSNPTTFHLDGEVITFDNLKTLLSLREVRTIKVFTTVDNINLHTQVVDMSMTYGQQFGPTYLDGADVTKIKPHNSHEGKTFYVLPNDDTLRVEAFEYYHTTDPSFLGRYMSALNHTKKWKYPQVNGLTSIKWADNNCYLATALLTLQQIELKFNPPALQDAYYRARAGEAANFCALILAYCNKTVGELGDVRETMSYLFQHANLDSCKRVLNVVCKTCGQQQTTLKGVEAVMYMGTLSYEQFKKGVQIPCTCGKQATKYLVQQESPFVMMSAPPAQYELKHGTFTCASEYTGNYQCGHYKHITSKETLYCIDGALLTKSSEYKGPITDVFYKENSYTTTIKPVTYKLDGVVCTEIDPKLDNYYKKDNSYFTEQPIDLVPNQPYPNASFDNFKFVCDNIKFADDLNQLTGYKKPASRELKVTFFPDLNGDVVAIDYKHYTPSFKKGAKLLHKPIVWHVNNATNKATYKPNTWCIRCLWSTKPVETSNSFDVLKSEDAQGMDNLACEDLKPVSEEVVENPTIQKDVLECNVKTTEVVGDIILKPANNSLKITEEVGHTDLMAAYVDNSSLTIKKPNELSRVLGLKTLATHGLAAVNSVPWDTIANYAKPFLNKVVSTTTNIVTRCLNRVCTNYMPYFFTLLLQLCTFTRSTNSRIKASMPTTIAKNTVKSVGKFCLEASFNYLKSPNFSKLINIIIWFLLLSVCLGSLIYSTAALGVLMSNLGMPSYCTGYREGYLNSTNVTIATYCTGSIPCSVCLSGLDSLDTYPSLETIQITISSFKWDLTAFGLVAEWFLAYILFTRFFYVLGLAAIMQLFFSYFAVHFISNSWLMWLIINLVQMAPISAMVRMYIFFASFYYVWKSYVHVVDGCNSSTCMMCYKRNRATRVECTTIVNGVRRSFYVYANGGKGFCKLHNWNCVNCDTFCAGSTFISDEVARDLSLQFKRPINPTDQSSYIVDSVTVKNGSIHLYFDKAGQKTYERHSLSHFVNLDNLRANNTKGSLPINVIVFDGKSKCEESSAKSASVYYSQLMCQPILLLDQALVSDVGDSAEVAVKMFDAYVNTFSSTFNVPMEKLKTLVATAEAELAKNVSLDNVLSTFISASRQGFVDSDVETKDVVECLKLSHQSDIEVTGDSCNNYMLTYNKVENMTPRDLGACIDCSARHINAQVAKSHNIALIWNVKDFMSLSEQLRKQIRSAAKKNNLPFKLTCATTRQVVNVVTTKIALKGG

SEQ ID NO: 16110 - protein, 1946 aa, Artificial Sequence
  SARS-CoV-2__MT740441.1__non-structural protein 3 (NSP3)
MAPTKVTFGDDTVIEVQGYKSVNITFELDERIDKVLNEKCSAYTVELGTEVNEFACVVADAVIKTLQPVSELLTPLGIDLDEWSMATYYLFDESGEFKLASHMYCSFYPPDEDEEEGDCEEEEFEPSTQYEYGTEDDYQGKPLEFGATSAALQPEEEQEEDWLDDDSQQTVGQQDGSEDNQTTTIQTIVEVQPQLEMELTPVVQTIEVNSFSGYLKLTDNVYIKNADIVEEAKKVKPTVVVNAANVYLKHGGGVAGALNKATNNAMQVESDDYIATNGPLKVGGSCVLSGHNLAKHCLHVVGPNVNKGEDIQLLKSAYENFNQHEVLLAPLLSAGIFGADPIHSLRVCVDTVRTNVYLAVFDKNLYDKLVSSFLEMKSEKQVEQKIAEIPKEEVKPFITESKPSVEQRKQDDKKIKACVEEVTTTLEETKFLTENLLLYIDINGNLHPDSATLVSDIDITFLKKDAPYIVGDVVQEGVLTAVVIPTKKAGGTTEMLAKALRKVPTDNYITTYPGQGLNGYTVEEAKTVLKKCKSAFYILPSIISNEKQEILGTVSWNLREMLAHAEETRKLMPVCVETKAIVSTIQRKYKGIKIQEGVVDYGARFYFYTSKTTVASLINTLNDLNETLVTMPLGYVTHGLNLEEAARYMRSLKVPATVSVSSPDAVTAYNGYLTSSSKTPEEHFIETISLAGSYKDWSYSGQSTQLGIEFLKRGDKSVYYTSNPTTFHLDGEVITFDNLKTLLSLREVRTIKVFTTVDNINLHTQVVDMSMTYGQQFGPTYLDGADVTKIKPHNSHEGKTFYVLPNDDTLRVEAFEYYHTTDPSFLGRYMSALNHTKKWKYPQVNGLTSIKWADNNCYLATALLTLQQIELKFNPPALQDAYYRARAGEAANFCALILAYCNKTVGELGDVRETMSYLFQHANLDSCKRVLNVVCKTCGQQQTTLKGVEAVMYMGTLSYEQFKKGVQIPCTCGKQATKYLVQQESPFVMMSAPPAQYELKHGTFTCASEYTGNYQCGHYKHITSKETLYCIDGALLTKSSEYKGPITDVFYKENSYTTTIKPVTYKLDGVVCTEIDPKLDNYYKKDNSYFTEQPIDLVPNQPYPNASFDNFKFVCDNIKFADYLNQLTGYKKPASRELKVTFFPDLNGDVVAIDYKHYTPSFKKGAKLLHKPIVWHVNNATNKATYKPNTWCIRCLWSTKPVETSNSFDVLKSEDAQGMDNLACEDLKPVSEEVVENPTIQKDVLECNVKTTEVVGDIILKPANNSLKITEEVGHTDLMAAYVDNSSLTIKKPNELSRVLGLKTLATHGLAAVNSVPWDTIANYAKPFLNKVVSTTTNIVTRCLNRVCTNYMPYFFTLLLQLCTFTRSTNSRIKASMPTTIAKNTVKSVGKFCLEASFNYLKSPNFSKLINIIIWFLLLSVCLGSLIYSTAALGVLMSNLGMPSYCTGYREGYLNSTNVTIATYCTGSIPCSVCLSGLDSLDTYPSLETIQITISSFKWDLTAFGLVAEWFLAYILFTRFFYVLGLAAIMQLFFSYFAVHFISNSWLMWLIINLVQMAPISAMVRMYIFFASFYYVWKSYVHVVDGCNSSTCMMCYKRNRATRVECTTIVNGVRRSFYVYANGGKGFCKLHNWNCVNCDTFCAGSTFISDEVARDLSLQFKRPINPTDQSSYIVDSVTVKNGSIHLYFDKAGQKTYERHSLSHFVNLDNLRANNTKGSLPINVIVFDGKSKCEESSAKSASVYYSQLMCQPILLLDQALVSDVGDSAEVAVKMFDAYVNTFSSTFNVPMEKLKTLVATAEAELAKNVSLDNVLSTFISAARQGFVDSDVETKDVVECLKLSHQSDIEVTGDSCNNYMLTYNKVENMTPRDLGACIDCSARHINAQVAKSHNIALIWNVKDFMSLSEQLRKQIRSAAKKNNLPFKLTCATTRQVVNVVTTKIALKGG

SEQ ID NO: 16111 - protein, 1946 aa, Artificial Sequence
  SARS-CoV-2__MT740483.1__non-structural protein 3 (NSP3)
MAPTKVTFGDDTVIEVQGYKSVNITFELDERIDKVLNEKCSAYTVELGTEVNEFACVVADAVIKTLQPVSELLTPLGIDLDEWSMATYYLFDESGEFKLASHMYCSFYPPDEDEEEGDCEEEEFEPSTQYEYGTEDDYQGKPLEFGATSAALQPEEEQEEDWLDDDSQQTVGQQDGSEDNQTTTIQTIVEVQPQLEMELTPVVQTIEVNSFSGYLKLTDNVYIKNADIVEEAKKVKPTVVVNAANVYLKHGGGVAGALNKATNNAMQVESDDYIATNGPLKVGGSCVLSGHNLAKHCLHVVGPNVNKGEDIQLLKSAYENFNQHEVLLAPLLSAGIFGADPIHSLRVCVDTVRTNVYLAVFDKNLYDKLVSSFLEMKSEKQVEQKIAEIPKEEVKPFITESKPSVEQRKQDDKKIKACVEEVTTTLEETKFLTENLLLYIDINGNLHPDSATLVSDIDITFLKKDAPYIVGDVVQEGVLTAVVIPTKKAGGTTEMLAKALRKVPTDNYITTYPGQGLNGYTVEEAKTVLKKCKSAFYILPSIISNEKQEILGTVSWNLREMLAHAEETRKLMPVCVETKAIVSTIQRKYKGIKIQEGVVDYGARFYFYTSKTTVASLINTLNDLNETLVTMPLGYVTHGLNLEEAARYMRSLKVPATVSVSSPDAVTAYNGYLTSSSKTPEEHFIETISLAGSYKDWSYSGQSTQLGIEFLKRGDKSVYYTSNPTTFHLDGEVITFDNLKTLLSLREVRTIKVFTTVDNINLHTQVVDMSMTYGQQFGPTYLDGADVTKIKPHNSHEGKTFYVLPNDDTLRVEAFEYYHTTDPSFLGRYMSALNHTKKWKYPQVNGLTSIKWADNNCYLATALLTLQQIELKFNPPALQDAYYRARAGEAANFCALILAYCNKTVGELGDVRETMSYLFQHANLDSCKRVLNVVCKTCGQQQTTLKGVEAVMYMGTLSYEQFKKGVQIPCTCGKQATKYLVQQESPFVMMSAPPAQYELKHGTFTCASEYTGNYQCGHYKHITSKETLYCIDGALLTKSSEYKGPITDVFYKENSYTTTIKPVTYKLDGVVCTEIDPKLDNYYKKDNSYFTEQPIDLVPNQPYPNASFDNFKFVCDNIKFADDLNHLTGYKKPASRELKVTFFPDLNGDVVAIDYKHYTPSFKKGAKLLHKPIVWHVNNATNKATYKPNTWCIRCLWSTKPVETSNSFDVLKSEDAQGMDNLACEDLKPVSEEVVENPTIQKDVLECNVKTTEVVGDIILKPANNSLKITEEVGHTDLMAAYVDNSSLTIKKPNELSRVLGLKTLATHGLAAVNSVPWDTIANYAKPFLNKVVSTTTNIVTRCLNRVCTNYMPYFFTLLLQLCTFTRSTNSRIKASMPTTIAKNTVKSVGKFCLEASFNYLKSPNFSKLINIIIWFLLLSVCLGSLIYSTAALGVLMSNLGMPSYCTGYREGYLNSTNVTIATYCTGSIPCSVCLSGLDSLDTYPSLETIQITISSFKWDLTAFGLVAEWFLAYILFTRFFYVLGLAAIMQLFFSYFAVHFISNSWLMWLIINLVQMAPISAMVRMYIFFASFYYVWKSYVHVVDGCNSSTCMMCYKRNRATRVECTTIVNGVRRSFYVYANGGKGFCKLHNWNCVNCDTFCAGSTFISDEVARDLSLQFKRPINPTDQSSYIVDSVTVKNGSIHLYFDKAGQKTYERHSLSHFVNLDNLRANNTKGSLPINVIVFDGKSKCEESSAKSASVYYSQLMCQPILLLDQALVSDVGDSAEVAVKMFDAYVNTFSSTFNVPMEKLKTLVATAEAELAKNVSLDNVLSTFISAARQGFVDSDVETKDVVECLKLSHQSDIEVTGDSCNNYMLTYNKVENMTPRDLGACIDCSARHINAQVAKSHNIALIWNVKDFMSLSEQLRKQIRSAAKKNNLPFKLTCATTRQVVNVVTTKIALKGG

SEQ ID NO: 16112 - protein, 1946 aa, Artificial Sequence
  SARS-CoV-2__MT742091.1__non-structural protein 3 (NSP3)
MAPTKVTFGDDTVIEVQGYKSVNITFELDERIDKVLNEKCSAYTVELGTEVNEFACVVADAVIKTLQPVSELLTPLGIDLDEWSMATYYLFDESGEFKLASHMYCSFYPPDEDEEEGDCEEEEFEPSTQYEYGTEDDYQGKPLEFGATSAALQPEEEQEEDWLDDDSQQTVGQQDGSEDNQTTTIQTIVEVQPQLEMELTPVVQTIEVNSFSGYLKLTDNVYIKNADIVEEAKKVKPTVVVNAANVYLKHGGGVAGALNKATNNAMQVESDDYIATNGPLKVGGSCVLSGHNLAKHCLHVVGPNVNKGEDIQLLKSAYENFNQHEVLLAPLLSAGIFGADPIHSLRVCVDTVRTNVYLAVFDKNLYDKLVSSFLEMKSEKQVEQKIAEIPKEEVKPFITESKPSVEQRKQDDKKIKACVEEVTTTLEETKFLTENLLLYIDINGNLHPDSATLVSDIDITFLKKDAPYIVGDVVQEGVLTAVVIPTKKAGGTTEMLAKALRKVPTDNYITTYPGQGLNGYTVEEAKTVLKKCKSAFYILPSIISNEKQEILGTVSWNLREMLAHAEETRKLMPVCVETKAIVSTIQRKYKGIKIQEGVVDYGARFYFYTSKTTVASLINTLNDLNETLVTMPLGYVTHGLNLEEAARYMRSLKVPATVSVSSPDAVTAYNGYLTSSSKTPEEHFIETISLAGSYKDWSYSGQSTQLGIEFLKRGDKSVYYTSNPTTFHLDGEVITFDNLKTLLSLREVRTIKVFTTVDNINLHTQVVDMSMTYGQQFGPTYLDGADVTKIKPHNSHEGKTFYVLPNDDTLRVEAFEYYHTTDPSFLGRYMSALNHTKKWKYPQVNGLTSIKWADNNCYLATALLTLQQIELKFNPPALQDAYYRARAGEAANFCALILAYCNKTVGELGDVRETMSYLFQHANLDSCKRVLNVVCKTCGQQQTTLKGVEAVMYMGTLSYEQFKKGVQIPCTCGKQATKYLVQQESPFVMMSAPPAQYELKHGTFTCASEYTGNYQCGHYKHITSKETLYCIDGALLTKSSEYKGPITDVFYKENSYTTTIKPVTYKLDGVVCTEIDPKLDNYYKKDNSYFTEQPIDLVPNQPYPNASFDNFKFVCDNIKFADDLNQLTGYKKPASRELKVTFFPDLNGDVVAIDYKHYTPSFKKGAKLLHKPIVWHVNNATNKATYKPNTWCIRCLWSTKPVETSNSFDVLKSEDAQGMDNLACEDLKPVSEEVVENPTIQKDVLECNVKTTEVVGDIILKPANNSLKITEEVGHTDLMAAYVDNSSLTIKKPNELSRVLGLKTLATHGLAAVNSVPWDTIANYAKPFLNKVVSTTTNIVTRCLNRVCTNYMPYFFTLLLQLCTFTRSTNSRIKASMPTTIAKNSVKSVGKFCLEASFNYLKSPNFSKLINIIIWFLLLSVCLGSLIYSTAALGVLMSNLGMPSYCTGYREGYLNSTNVTIATYCTGSIPCSVCLSGLDSLDTYPSLETIQITISSFKWDLTAFGLVAEWFLAYILFTRFFYVLGLAAIMQLFFSYFAVHFISNSWLMWLIINLVQMAPISAMVRMYIFFASFYYVWKSYVHVVDGCNSSTCMMCYKRNRATRVECTTIVNGVRRSFYVYANGGKGFCKLHNWNCVNCDTFCAGSTFISDEVARDLSLQFKRPINPTDQSSYIVDSVTVKNGSIHLYFDKAGQKTYERHSLSHFVNLDNLRANNTKGSLPINVIVFDGKSKCEESSAKSASVYYSQLMCQPILLLDQALVSDVGDSAEVAVKMFDAYVNTFSSTFNVPMEKLKTLVATAEAELAKNVSLDNVLSTFISAARQGFVDSDVETKDVVECLKLSHQSDIEVTGDSCNNYMLTYNKVENMTPRDLGACIDCSARHINAQVAKSHNIALIWNVKDFMSLSEQLRKQIRSAAKKNNLPFKLTCATTRQVVNVVTTKIALKGG

SEQ ID NO: 16113 - protein, 1946 aa, Artificial Sequence
  SARS-CoV-2__MT734055.1__non-structural protein 3 (NSP3)
MAPTKVTFGDDTVIEVQGYKSVNITFELDERIDKVLNEKCSAYTVELGTEVNEFACVVADAVIKTLQPVSELLTPLGIDLDEWSMATYYLFDESGEFKLASHMYCSFYPPDEDEEEGDCEEEEFEPSTQYEYGTEDDYQGKPLEFGATSAALQPEEEQEEDWLDDDSQQTVGQQDGSEDNQTTTIQTIVEVQPQLEMELTPVVQTIEVNSFSGYLKLTDNVYIKNADIVEEAKKVKPTVVVNAANVYLKHGGGVAGALNKATNNAMQVESDDYIATNGPLKVGGSCVLSGHNLAKHCLHVVGPNVNKGEDIQLLKSAYENFNQHEVLLAPLLSAGIFGADPIHSLRVCVDTVRTNVYLAVFDKNLYDKLVSSFLEMKSEKQVEQKIAEIPKEEVKPFITESKPSVEQRKQDDKKIKACVEEVTTTLEETKFLTENLLLYIDINGNLHPDSATLVSDIDITFLKKDAPYIVGDVVQEGVLTAVVIPTKKAGGTTEMLAKALRKVPTDNYITTYPGQGLNGYTVEEAKTVLKKCKSAFYILPSIISNEKQEILGTVSWNLREMLAHAEETRKLMPVCVETKAIVSTIQRKYKGIKIQEGVVDYGARFYFYTSKTTVASLINTLNDLNETLVTMPLGYVTHGLNLEEAARYMRSLKVPATVSVSSPDAVTAYNGYLTSSSKTPEEHFIETISLAGSYKDWSYSGQSTQLGIEFLKRGDKSVYYTSNPTTFHLDGEVITFDNLKTLLSLREVRTIKVFTTVDNINLHTQVVDMSMTYGQQFGPTYLDGADVTKIKPHNSHEGKTFYVLPNDDTLRVEAFEYYHTTDPSFLGRYMSALNHTKKWKYPQVNGLTSIKWADNNCYLATALLTLQQIELKFNPPALQDAYYRARAGEAANFCALILAYCNKTVGELGDVRETMSYLFQHANLDSCKRVLNVVCKTCGQQQTTLKGVEAVMYMGTLSYEQFKKGVQIPCTCGKQATKYLVQQESPFVMMSAPPAQYELKHGTFTCASEYTGNYQCGHYKHITSKETLYCIDGALLTKSSEYKGPITDVFYKENSYTTTIKPVTYKLDGVVCTEIDPKLDNYYKKDNSYFTEQPIDLVPNQPYPNASFDNFKFVCDNIKFADDLNQLTGYKKPASRELKVTFFPDLNGDVVAIDYKHYTPSFKKGAKLLHKPIVWHVNNATNKATYKPNTWCIRCLWSTKPVETSNSFDVLKSEDAQGMDNLACEDLKPVSEEVVENPTIQKDVLECNVKTTEVVGDIILKPANNSLKITEEVGHTDLMAAYVDNSSLTIKKPNELSRVLGLKTLATHGLAAVNSVPWDTIANYAKPFLNKVVSTTTNIVTRCLNRVCTNYMPYFFTLLLQLCTFTRSTNSRIKASMPTTIAKNTVKSVGKFCLEASFNYLKSPNFSKLINIIIWFLLLSVCLGSLIYSTAALGVLMSNLGMPSYCTGYREGYLNSTNVTIATYCTGSIPCSVCLSGLDSLDTYPSLETIQITISSFKWDLTVFGLVAEWFLAYILFTRFFYVLGLAAIMQLFFSYFAVHFISNSWLMWLIINLVQMAPISAMVRMYIFFASFYYVWKSYVHVVDGCNSSTCMMCYKRNRATRVECTTIVNGVRRSFYVYANGGKGFCKLHNWNCVNCDTFCAGSTFISDEVARDLSLQFKRPINPTDQSSYIVDSVTVKNGSIHLYFDKAGQKTYERHSLSHFVNLDNLRANNTKGSLPINVIVFDGKSKCEESSAKSASVYYSQLMCQPILLLDQALVSDVGDSAEVAVKMFDAYVNTFSSTFNVPMEKLKTLVATAEAELAKNVSLDNVLSTFISAARQGFVDSDVETKDVVECLKLSHQSDIEVTGDSCNNYMLTYNKVENMTPRDLGACIDCSARHINAQVAKSHNIALIWNVKDFMSLSEQLRKQIRSAAKKNNLPFKLTCATTRQVVNVVTTKIALKGG

SEQ ID NO: 16114 - protein, 1946 aa, Artificial Sequence
  SARS-CoV-2__MT730002.1__non-structural protein 3 (NSP3)
MAPTKVTFGDDTVIEVQGYKSVNITFELDERIDKVLNEKCSAYTVELGTEVNEFACVVADAVIKTLQPVSELLTPLGIDLDEWSMATYYLFDESGEFKLASHMYCSFYPPDEDEEEGDCEEEEFEPSTQYEYGTEDDYQGKPLEFGATSAALQPEEEQEEDWLDDDSQQTVGQQDGSEDNQTTTIQTIVEVQPQLEMELTPVVQTIEVNSFSGYLKLTDNVYIKNADIVEEAKKVKPTVVVNAANVYLKHGGGVAGALNKATNNAMQVESDDYIATNGPLKVGGSCVLSGHNLAKHCLHVVGPNVNKGEDIQLLKSAYENFNQHEVLLAPLLSAGIFGADPIHSLRVCVDTVRTNVYLAVFDKNLYDKLVSSFLEMKSEKQVEQKIAEIPKEEVKPFITESKPSVEQRKQDDKKIKACVEEVTTTLEETKFLTENLLLYIDINGNLHPDSATLVSDIDITFLKKDAPYIVGDVVQEGVLTAVVIPTKKAGGTTEMLAKALRKVPTDNYITTYPGQGLNGYTVEEAKTVLKKCKSAFYILPSIISNEKQEILGTVSWNLREMLAHAEETRKLMPVCVETKAIVSTIQRKYKGIKIQEGVVDYGARFYFYTSKTTVASLINTLNDLNETLVTMPLGYVTHGLNLEEAARYMRSLKVPATVSVSSPDAVTAYNGYLTSSSKTPEEHFIETISLAGSYKDWSYSGQSTQLGIEFLKRGDKSVYYTSNPTTFHLDGEVITFDNLKTLLSLREVRTIKVFTTVDNINLHTQVVDMSMTYGQQFGPTYLDGADVTKIKPHNSHEGKTFYVLPNDDTLRVEAFEYYHTTDPSFLGRYMSALNHTKKWKYPQVNGLTSIKWADNNCYLATALLTLQQIELKFNPPALQDAYYRARAGEAANFCALILAYCNKTVGELGDVRETMSYLFQHANLDSCKRVLNVVCKTCGQQQTTLKGVEAVIYMGTLSYEQFKKGVQIPCTCGKQATKYLVQQESPFVMMSAPPAQYELKHGTFTCASEYTGNYQCGHYKHITSKETLYCIDGALLTKSSEYKGPITDVFYKENSYTTTIKPVTYKLDGVVCTEIDPKLDNYYKKDNSYFTEQPIDLVPNQPYPNASFDNFKFVCDNIKFADDLNQLTGYKKPASRELKVTFFPDLNGDVVAIDYKHYTPSFKKGAKLLHKPIVWHVNNATNKATYKPNTWCIRCLWSTKPVETSNSFDVLKSEDAQGMDNLACEDLKPVSEEVVENPTIQKDVLECNVKTTEVVGDIILKPANNSLKITEEVGHTDLMAAYVDNSSLTIKKPNELSRVLGLKTLATHGLAAVNSVPWDTIANYAKPFLNKVVSTTTNIVTRCLNRVCTNYMPYFFTLLLQLCTFTRSTNSRIKASMPTTIAKNTVKSVGKFCLEASFNYLKSPNFSKLINIIIWFLLLSVCLGSLIYSTAALGVLMSNLGMPSYCTGYREGYLNSTNVTIATYCTGSIPCSVCLSGLDSLDTYPSLETIQITISSFKWDLTAFGLVAEWFLAYILFTRFFYVLGLAAIMQLFFSYFAVHFISNSWLMWLIINLVQMAPISAMVRMYIFFASFYYVWKSYVHVVDGCNSSTCMMCYKRNRATRVECTTIVNGVRRSFYVYANGGKGFCKLHNWNCVNCDTFCAGSTFISDEVARDLSLQFKRPINPTDQSSYIVDSVTVKNGSIHLYFDKAGQKTYERHSLSHFVNLDNLRANNTKGSLPINVIVFDGKSKCEESSAKSASVYYSQLMCQPILLLDQALVSDVGDSAEVAVKMFDAYVNTFSSTFNVPMEKLKTLVATAEAELAKNVSLDNVLSTFISAARQGFVDSDVETKDVVECLKLSHQSDIEVTGDSCNNYMLTYNKVENMTPRDLGACIDCSARHINAQVAKSHNIALIWNVKDFMSLSEQLRKQIRSAAKKNNLPFKLTCATTRQVVNVVTTKIALKGG

SEQ ID NO: 16115 - protein, 1946 aa, Artificial Sequence
  SARS-CoV-2__MT731327.1__non-structural protein 3 (NSP3)
MAPTKVTFGDDTVIEVQGYKSVNITFELDERIDKVLNEKCSAYTVELGTEVNEFACVVADAVIKTLQPVSELLTPLGIDLDEWSMATYYLFDESGEFKLASHMYCSFYPPDEDEEEGDCEEEEFEPSTQYEYGTEDDYQGKPLEFGATSAALQPEEEQEEDWLDDDSQQTVGQQDGSEDNQTTTIQTIVEVQPQLEMELTPVVQTIEVNSFSGYLKLTDNVYIKNADIVEEAKKVKPTVVVNAANVYLKHGGGVAGALNKATNNAMQVESDDYIATNGPLKVGGSCVLSGHNLAKHCLHVVGPNVNKGEDIQLLKSAYENFNQHEVLLAPLLSAGIFGADPIHSLRVCVDTVRTNVYLAVFDKNLYDKLVSSFLEMKSEKQVEQKIAEIPKEEVKPFITESKPSVEQRKQDDKKIKACVEEVTTTLEETKFLTENLLLYIDINGNLHPDSATLVSDIDITFLKKDAPYIVGDVVQEGVLTAVVIPTKKAGGTTEMLAKALRKVPTDNYITTYPGQGLNGYTVEEAKTVLKKCKSAFYILPSIISNEKQEILGTVSWNLREMLAHAEETRKLMPVCVETKAIVSTIQRKYKGIKIQEGVVDYGARFYFYTSKTTVASLINTLNDLNETLVTMPLGYVTHGLNLEEAARYMRSLKVPATVSVSSPDAVTAYNGYLTSSSKTPEEHFIETISLAGSYKDWSYSGQSTQLGIEFLKRGDKSVYYTSNPTTFHLDGEVITFDNLKTLLSLREVRTIKVFTTVDNINLHTQVVDMSMTYGQQFGPTYLDGADVTKIKPHNSHEGKTFYVLPNDDTLRVEAFEYYHTTDPSFLGRYMSALNHTKKWKYPQVNGLTSIKWADNNCYLATALLTLQQIELKFNPPALQDAYYRARAGEAANFCALILAYCNKTVGELGDVRETMSYLFQHANLDSCKRVLNVVCKTCGQQQTTLKGVEAVMYMGTLSYEQFKKGVQIPCTCGKQATKYLVQQESPFVMMSAPPAQYELKHGTFTCASEYTGNYQCGHYKHITSKETLYCIDGALLTKSSEYKGPITDVFYKENSYTTTIKPVTYKLDGVVCTEIDPKLDNYYKKDNSYFTEQPIDLVPNQPYPNASFDNFKFVCDNIKFADDLNQLTGYKKPASRELKVTFFPDLNGDVVAIDYKHYTPSFKKGAKLLHKPIVWHVNNATNKATYKPNTWCIRCLWSTKPVETSNSFDVLKSEDAQGMDNLACEDLKPFSEEVVENPTIQKDVLECNVKTTEVVGDIILKPANNSLKITEEVGHTDLMAAYVDNSSLTIKKPNELSRVLGLKTLATHGLAAVNSVPWDTIANYAKPFLNKVVSTTTNIVTRCLNRVCTNYMPYFFTLLLQLCTFTRSTNSRIKASMPTTIAKNTVKSVGKFCLEASFNYLKSPNFSKLINIIIWFLLLSVCLGSLIYSTAALGVLMSNLGMPSYCTGYREGYLNSTNVTIATYCTGSIPCSVCLSGLDSLDTYPSLETIQITISSFKWDLTAFGLVAEWFLAYILFTRFFYVLGLAAIMQLFFSYFAVHFISNSWLMWLIINLVQMAPISAMVRMYIFFASFYYVWKSYVHVVDGCNSSTCMMCYKRNRATRVECTTIVNGVRRSFYVYANGGKGFCKLHNWNCVNCDTFCAGSTFISDEVARDLSLQFKRPINPTDQSSYIVDSVTVKNGSIHLYFDKAGQKTYERHSLSHFVNLDNLRANNTKGSLPINVIVFDGKSKCEESSAKSASVYYSQLMCQPILLLDQALVSDVGDSAEVAVKMFDAYVNTFSSTFNVPMEKLKTLVATAEAELAKNVSLDNVLSTFISAARQGFVDSDVEIKDVVECLKLSHQSDIEVTGDSCNNYMLTYNKVENMTPRDLGACIDCSARHINAQVAKSHNIALIWNVKDFMSLSEQLRKQIRSAAKKNNLPFKLTCATTRQVVNVVTTKIALKGG

SEQ ID NO: 16116 - protein, 1946 aa, Artificial Sequence
  SARS-CoV-2__MT731656.1__non-structural protein 3 (NSP3)
MAPTKVTFGDDTVIEVQGYKSVNITFELDERIDKVLNEKCSAYTVELGTEVNEFACVVADAVIKTLQPVSELLTPLGIDLDEWSMATYYLFDESGEFKLASHMYCSFYPPDEDEEEGDCEEEEFEPSTQYEYGTEDDYQGKPLEFGATSAALQPEEEQEEDWLDDDSQQTVGQQDGSEDNQTTTIQTIVEVQPQLEMELTPVVQTIEVNSFSGYLKLTDNVYIKNADIVEEAKKVKPTVVVNAANVYLKHGGGVAGALNKATNNAMQVESDDYIATNGPLKVGGSCVLSGHNLAKHCLHVVGPNVNKGEDIQLLKSAYENFNQHEVLLAPLLSAGIFGADPIHSLRVCVDTVRTNVYLAVFDKNLYDKLVSSFMEMKSEKQVEQKIAEIPKEEVKPFITESKPSVEQRKQDDKKIKACVEEVTTTLEETKFLTENLLLYIDINGNLHPDSATLVSDIDITFLKKDAPYIVGDVVQEGVLTAVVIPTKKAGGTTEMLAKALRKVPTDNYITTYPGQGLNGYTVEEAKTVLKKCKSAFYILPSIISNEKQEILGTVSWNLREMLAHAEETRKLMPVCVETKAIVSTIQRKYKGIKIQDGVVDYGARFYFYTSKTTVASLINTLNDLNETLVTMPLGYVTHGLNLEEAARYMRSLKVPATVSVSSPDAVTAYNGYLTSSSKTPEEHFIETISLAGSYKDWSYSGQSTQLGIEFLKRGDKSVYYTSNPTTFHLDGEVITFDNLKTLLSLREVRTIKVFTTVDNINLHTQVVDMSMTYGQQFGPTYLDGADVTKIKPHNSHEGKTFYVLPNDDTLRVEAFEYYHTTDPSFLGRYMSALNHTKKWKYPQVNGLTSIKWADNNCYLATALLTLQQIELKFNPPALQDAYYRARAGEAANFCALILAYCNKTVGELGDVRETMSYLFQHANLDSCKRVLNVVCKTCGQQQTTLKGVEAVMYMGTLSYEQFKKGVQIPCTCGKQATKYLVQQESPFVMMSAPPAQYELKHGTFTCASEYTGNYQCGHYKHITSKETLYCIDGALLTKSSEYKGPITDVFYKENSYTTTIKPVTYKLDGVVCTEIDPKLDNYYKKDNSYFTEQPIDLVPNQPYPNASFDNFKFVCDNIKFADDLNQLTGYKKPASRELKVTFFPDLNGDVVAIDYKHYTPSFKKGAKLLHKPIVWHVNNATNKATYKPNTWCIRCLWSTKPVETSNSFDVLKSEDAQGMDNLACEDLKPVSEEVVENPTIQKDVLECNVKTTEVVGDIILKPANNSLKITEEVGHTDLMAAYVDNSSLTIKKPNELSRVLGLKTLATHGLAAVNSVPWDTIANYAKPFLNKVVSTTTNIVTRCLNRVCTNYMPYFFTLLLQLCTFTRSTNSRIKASMPTTIAKNTVKSVGKFCLEASFNYLKSPNFSKLINIIIWFLLLSVCLGSLIYSTAALGVLMSNLGMPSYCTGYREGYLNSTNVTIATYCTGSIPCSVCLSGLDSLDTYPSLETIQITISSFKWDLTAFGLVAEWFLAYILFTRFFYVLGLAAIMQLFFSYFAVHFISNSWLMWLIINLVQMAPISAMVRMYIFFASFYYVWKSYVHVVDGCNSSTCMMCYKRNRATRVECTTIVNGVRRSFYVYANGGKGFCKLHNWNCVNCDTFCAGSTFISDEVARDLSLQFKRPINPTDQSSYIVDSVTVKNGSIHLYFDKAGQKTYERHSLSHFVNLDNLRANNTKGSLPINVIVFDGKSKCEESSAKSASVYYSQLMCQPILLLDQALVSDVGDSAEVAVKMFDAYVNTFSSTFNVPMEKLKTLVATAEAELAKNVSLDNVLSTFISAARQGFVDSDVETKDVVECLKLSHQSDIEVTGDSCNNYMLTYNKVENMTPRDLGACIDCSARHINAQVAKSHNIALIWNVKDFMSLSEQLRKQIRSAAKKNNLPFKLTCATTRQVVNVVTTKIALKGG

SEQ ID NO: 16117 - protein, 1946 aa, Artificial Sequence
  SARS-CoV-2__MT731938.1__non-structural protein 3 (NSP3)
MAPTKVTFGDDTVIEVQGYKSVNITFELDERIDKVLNEKCSAYTVELGTEVNEFACVVADAVIKTLQPVSELLTPLGIDLDEWSMATYYLFDESGEFKLASHMYCSFYPPDEDEEEGDCEEEEFEPSTQYEYGTEDDYQGKPLEFGATSAALQPEEEQEEDWLDDDSQQTVGQQDGSEDNQTTTIQTIVEVQPQLEMELTPVVQTIEVNSFSGYLKLTDNVYIKNADIVEEAKKVKPTVVVNAANVYLKHGGGVAGALNKATNNAMQVESDDYIATNGPLKVGGSCVLSGHNLAKHCLHVVGPNVNKGEDIQLLKSAYENFNQHEVLLAPLLSAGIFGADPIHSLRVCVDTVRTNVYLAVFDKNLYDKLVSSFLEMKSEKQVEQKIADITESKPSVEQRKQDDKKIKACVEEVTTTLEETKFLTENLLLYIDINGNLHPDSATLVSDIDITFLKKDAPYIVGDVVQEGVLTAVVIPTKKAGGTTEMLAKALRKVPTDNYITTYPGQGLNGYTVEEAKTVLKKCKSAFYILPSIISNEKQEILGTVSWNLREMLAHAEETRKLMPVCVETKAIVSTIQRKYKGIKIQEGVVDYGARFYFYTSKTTVASLINTLNDLNETLVTMPLGYVTHGLNLEEAARYMRSLKVPATVSVSSPDAVTAYNGYLTSSSKTPEEHFIETISLAGSYKDWSYSGQSTQLGIEFLKRGDKSVYYTSNPTTFHLDGEVITFDNLKTLLSLREVRTIKVFTTVDNINLHTQVVDMSMTYGQQFGPTYLDGADVTKIKPHNSHEGKTFYVLPNDDTLRVEAFEYYHTTDPSFLGRYMSALNHTKKWKYPQVNGLTSIKWADNNCYLATALLTLQQIELKFNPPALQDAYYRARAGEAANFCALILAYCNKTVGELGDVRETMSYLFQHANLDSCKRVLNVVCKTCGQQQTTLKGVEAVMYMGTLSYEQFKKGVQIPCTCGKQATKYLVQQESPFVMMSAPPAQYELKHGTFTCASEYTGNYQCGHYKHITSKETLYCIDGALLTKSSEYKGPITDVFYKENSYTTTIKPVTYKLDGVVCTEIDPKLDNYYKKDNSYFTEQPIDLVPNQPYPNASFDNFKFVCDNIKFADDLNQLTGYKKPASRELKVTFFPDLNGDVVAIDYKHYTPSFKKGAKLLHKPIVWHVNNATNKATYKPNTWCIRCLWSTKPVETSNSFDVLKSEDAQGMDNLACEDLKPVSEEVVENPTIQKDVLECNVKTTEVVGDIILKPANNSLKITEEVGHTDLMAAYVDNSSLTIKKPNELSRVLGLKTLATHGLAAVNSVPWDTIANYAKPFLNKVVSTTTNIVTRCLNRVCTNYMPYFFTLLLQLCTFTRSTNSRIKASMPTTIAKNTVKSVGKFCLEASFNYLKSPNFSKLINIIIWFLLLSVCLGSLIYSTAALGVLMSNLGMPSYCTGYREGYLNSTNVTIATYCTGSIPCSVCLSGLDSLDTYPSLETIQITISSFKWDLTAFGLVAEWFLAYILFTRFFYVLGLAAIMQLFFSYFAVHFISNSWLMWLIINLVQMAPISAMVRMYIFFASFYYVWKSYVHVVDGCNSSTCMMCYKRNRATRVECTTIVNGVRRSFYVYANGGKGFCKLHNWNCVNCDTFCAGSTFISDEVARDLSLQFKRPINPTDQSSYIVDSVTVKNGSIHLYFDKAGQKTYERHSLSHFVNLDNLRANNTKGSLPINVIVFDGKSKCEESSAKSASVYYSQLMCQPILLLDQALVSDVGDSAEVAVKMFDAYVNTFSSTFNVPMEKLKTLVATAEAELAKNVSLDNVLSTFISAARQGFVDSDVETKDVVECLKLSHQSDIEVTGDSCNNYMLTYNKVENMTPRDLGACIDCSARHINAQVAKSHNIALIWNVKDFMSLSEQLRKQIRSAAKKNNLPFKLTCATTRQVVNVVTTKIALKGGKIVNNWLKQ

SEQ ID NO: 16118 - protein, 1946 aa, Artificial Sequence
  SARS-CoV-2__MT712861.1__non-structural protein 3 (NSP3)
MAPTKVTFGDDTVIEVQGYKSVNITFELDERIDKVLNEKCSAYTVELGTEVNEFACVVADAVIKTLQPVSELLTPLGIDLDEWSMATYYLFDESGEFKLASHMYCSFYPPDEDEEEGDCEEEEFEPSTQYEYGTEDDYQGKPLEFGATSAALQPEEEQEEDWLDDDSQQTVGQQDGSEDNQTTTIQTIVEVQPQLEMELTPVVQTIEVNSFSGYLKLTDNVYIKNADIVEEAKKVKPTVVVNAANVYLKHGGGVAGALNKATNNAMQVESDDYIATNGPLKVGGSCVLSGHNLAKHCLHVVGPNVNKGEDIQLLKSAYENFNQHEVLLAPLLSAGIFGADPIHSLRVCVDTVRTNVYLAVFDKNLYDKLVSSFLEMKSEKQVEQKIAEIPKEEVKPFITESKPSVEQRKQDDKKIKACVEEVTTTLEETKFLTENLLLYIDINGNLHPDSATLVSDIDITFLKKDAPYIVGDVVQEGVLTAVVIPTKKAGGTTEMLAKALRKVPTDNYITTYPGQGLNGYTVEEAKTVLKKCKSAFYILPSIISNEKQEILGTVSWNLREMLAHAEETRKLMPVCVETKAIVSTIQRKYKGIKIQEGVVDYGARFYFYTSKTTVASLINTLNDLNETLVTMPLGYVTHGLNLEEAARYMRSLKVPATVSVSSPDAVTAYNGYLTSSSKTPEEHFIETISLAGSYKDWSYSGQSTQLGIEFLKRGDKSVYYTSNPTTFHLDGEVITFDNLKTLLSLREVRTIKVFTTVDNINLHTQVVDMSMTYGQQFGPTYLDGADVTKIKPHNSHEGKTFYVLPNDDTLRVEAFEYYHTTDPSFLGRYMSALNHTKKWKYPQVNGLTSIKWADNNCYLATALLTLQQIELKFNPPALQDAYYRARAGEAANFCALILAYCNKTVGELGDVRETMSYLFQHANLDSCKRVLNVVCKTCGQQQTTLKGVEAVMYMGTLSYEQFKKGVQIPCTCGKQATKYLVQQESPFVMMSAPPAQYELKHGTFTCASEYTGNYQCGHYKHITSKETLYCIDGALLTKSSEYKGPITDVFYKENSYTTTIKPVTYKLDGVVCTEIDPKLDNYYKKDNSYFTEQPIDLVPNQPYPNASFDNFKFVCDNIKFADDLNQLTGYKKPASRELKVTFFPDLNGDVVAIDYKHYTPSFKKGAKLLHKPIVWHVNNATNKATYKPNTWCIRCLWSTKPVETSNSFDVLKSEDAQGMDNLACEDLKPVSEEVVENPTIQKDFLECNVKTTEVVGDIILKPANNSLKITEEVGHTDLMAAYVDNSSLTIKKPNELSRVLGLKTLATHGLAAVNSVPWDTIANYAKPFLNKVVSTTTNIVTRCLNRVCTNYMPYFFTLLLQLCTFTRSTNSRIKASMPTTIAKNTVKSVGKFCLEASFNYLKSPNFSKLINIIIWFLLLSVCLGSLIYSTAALGVLMSNLGMPSYCTGYREGYLNSTNVTIATYCTGSIPCSVCLSGLDSLDTYPSLETIQITISSFKWDLTAFGLVAEWFLAYILFTRFFYVLGLAAIMQLFFSYFAVHFISNSWLMWLIINLVQMAPISAMVRMYIFFASFYYVWKSYVHVVDGCNSSTCMMCYKRNRATRVECTTIVNGVRRSFYVYANGGKGFCKLHNWNCVNCDTFCAGSTFISDEVARDLSLQFKRPINPTDQSSYIVDSVTVKNGSIHLYFDKAGQKTYERHSLSHFVNLDNLRANNTKGSLPINVIVFDGKSKCEESSAKSASVYYSQLMCQPILLLDQALVSDVGDSAEVAVKMFDAYVNTFSSTFNVSMEKLKTLVATAEAELAKNVSLDNVLSTFISAARQGFVDSDVETKDVVECLKLSHQSDIEVTGDSCNNYMLTYNKVENMTPRDLGACIDCSARHINAQVAKSHNIALIWNVKDFMSLSEQLRKQIRSAAKKNNLPFKLTCATTRQVVNVVTTKIALKGG

SEQ ID NO: 16119 - protein, 1946 aa, Artificial Sequence
  SARS-CoV-2__MT706162.1__non-structural protein 3 (NSP3)
MAPTKVTFGDDTVIEVQGYKSVNITFELDERIDKVLNEKCSAYTVELGTEVNEFACVVADAVIKTLQPVSELLTPLGIDLDEWSMATYYLFDESGEFKLASHMYCSFYPPDEDEEEGDCEEEEFEPSTQYEYGTEDDYQGKPLEFGATSAALQPEEEQEEDWLDDDSQQTVGQQDGSEDNQTTTIQTIVEVQPQLEMELTPVVQTIEVNSFSGYLKLTDNVYIKNADIVEEAKKVKPTVVVNAANVYLKHGGGVAGALNKATNNAMQVESDDYIATNGPLKVGGSCVLSGHNLAKHCLHVVGPNVNKGEDIQLLKSAYENFNQHEVLLAPLLSAGIFGADPIHSLRVCVDTVRTNVYLAVFDKNLYDKLVSSFLEMKSEKQVEQKIAEIPKEEVKPFITESKPSVEQRKQDDKKIKACVEEVTTTLEETKFLTENLLLYIDINGNLHPDSATLVSDIDITFLKKDAPYIVGDVVQEGVLTAVVIPTKKAGGTTEMLAKALRKVPTDNYITTYPGQGLNGYTVEEAKTVLKKCKSAFYILPSIISNEKQEILGTVSWNLREMLAHAEETRKLMPVCVETKAIVSTIQRKYKGIKIQEGVVDYGARFYFYTSKTTVASLINTLNDLNETLVTMPLGYVTHGLNLEEAARYMRSLKVPATVSVSSPDAVTAYNGYLTSSSKTPEEHFIETISLAGSYKDWSYSGQSTQLGIEFLKRGDKSVYYTSNPTTFHLDGEVITFDNLKTLLSLREVRTIKVFTTVDNINLHTQVVDMSMTYGQQFGPTYLDGADVTKIKPHNSHEGKTFYVLPNDDTLRVEAFEYYHTTDPSFLGRYMSALNHTKKWKYPQVNGLTSIKWADNNCYLATALLTLQQIELKFNPPALQDAYYRARAGEAANFCALILAYCNKTVGELGDVRETMSYLFQHANLDSCKRVLNVVCKTCGQQQTTLKGVEAVMYMGTLSYEQFKKGVQIPCTCGKQATKYLVQQESPFVMMSAPPAQYELKHGTFTCASEYTGNYQCGHYKHITSKETLYCIDGALLTKSSEYKGPITDVFYKENSYTTTIKPVTYKLDGVVCTEIDPKLDNYYKKDNSYFTEQPIDLVPNQPYPNASFDNFKFVCDNIKFADDLNQLTGYKKPASRELKVTFFPDLNGDVVAIDYKHYTPSFKKGAKLLHKPIVWHVNNATNKATYKPNTWCIRCLWSTKPVETSNSFDVLKSEDAQGMDNLACEDLKPVSEEVVENPTIQKDVLECNVKTTEVVGDIILKPANNSLKITEEVGHTDLMAAYVDNSSLTIKKPNELSRVLGLKTLATHGLAAVNSVPWDTIANYAKPFLNKVVSTTTNIVTRCLNRVCTNYMPYFFTLLLQLCTFTRSTNSRIKASMPTTIAKNTVKSVCKFCLEASFNYLKSPNFSKLINIIIWFLLLSVCLGSLIYSTAALGVLMSNLGMPSYCTGYREGYLNSTNVTIATYCTGSIPCSVCLSGLDSLDTYPSLETIQITISSFKWDLTAFGLVAEWFLAYILFTRFFYVLGLAAIMQLFFSYFAVHFISNSWLMWLIINLVQMAPISAMVRMYIFFASFYYVWKSYVHVVDGCNSSTCMMCYKRNRATRVECTTIVNGVRRSFYVYANGGKGFCKLHNWNCVNCDTFCAGSTFISDEVARDLSLQFKRPINPTDQSSYIVDSVTVKNGSIHLYFDKAGQKTYERHSLSHFVNLDNLRANNTKGSLPINVIVFDGKSKCEESSAKSASVYYSQLMCQPILLLDQALVSDVGDSAEVAVKMFDAYVNTFSSTFNVPMEKLKTLVATAEAELAKNVSLDNVLSTFISAARQGFVDSDVETKDVVECLKLSHQSDIEVTGDSCNNYMLTYNKVENMTPRDLGACIDCSARHINAQVAKSHNIALIWNVKDFMSLSEQLRKQIRSAAKKNNLPFKLTCATTRQVVNVVTTKIALKGG

SEQ ID NO: 16120 - protein, 1946 aa, Artificial Sequence
  SARS-CoV-2__MT706200.1__non-structural protein 3 (NSP3)
MAPTKVTFGDDTVIEVQGYKSVNITFELDERIDKVLNEKCSAYTVELGTEVNEFACVVADAVIKTLQPVSELLTPLGIDLDEWSMATYYLFDESGEFKLASHMYCSFYPPDEDEEEGDCEEEEFEPSTQYEYGTEDDYQGKPLEFGATSAALQPEEEQEEDWLDDDSQQTVGQQDGSEDNQTTTIQTIVEVQPQLEMELTPVVQTIEVNSFSGYLKLTDNVYIKNADIVEEAKKVKPIVVVNAANVYLKHGGGVAGALNKATNNAMQVESDDYIATNGPLKVGGSCVLSGHNLAKHCLHVVGPNVNKGEDIQLLKSAYENFNQHEVLLAPLLSAGIFGADPIHSLRVCVDTVRTNVYLAVFDKNLYDKLVSSFLEMKSEKQVEQKIAEIPKEEVKPFITESKPSVEQRKQDDKKIKACVEEVTTTLEETKFLTENLLLYIDINGNLHPDSATLVSDIDITFLKKDAPYIVGDVVQEGVLTAVVIPTKKAGGTTEMLAKALRKVPTDNYITTYPGQGLNGYTVEEAKTVLKKCKSAFYILPSIISNEKQEILGTVSWNLREMLAHAEETRKLMPVCVETKAIVSTIQRKYKGIKIQEGVVDYGARFYFYTSKTTVASLINTLNDLNETLVTMPLGYVTHGLNLEEAARYMRSLKVPATVSVSSPDAVTAYNGYLTSSSKTPEEHFIETISLAGSYKDWSYSGQSTQLGIEFLKRGDKSVYYTSNPTTFHLDGEVITFDNLKTLLSLREVRTIKVFTTVDNINLHTQVVDMSMTYGQQFGPTYLDGADVTKIKPHNSHEGKTFYVLPNDDTLRVEAFEYYHTTDPSFLGRYMSALNHTKKWKYPQVNGLTSIKWADNNCYLATALLTLQQIELKFNPPALQDAYYRARAGEAANFCALILAYCNKTVGELGDVRETMSYLFQHANLDSCKRVLNVVCKTCGQQQTTLKGVEAVMYMGTLSYEQFKKGVQIPCTCGKQATKYLVQQESPFVMMSAPPAQYELKHGTFTCASEYTGNYQCGHYKHITSKETLYCIDGALLTKSSEYKGPITDVFYKENSYTTTIKPVTYKLDGVVCTEIDPKLDNYYKKDNSYFTEQPIDLVPNQPYPNASFDNFKFVCDNIKFADDLNQLTGYKKPASRELKVTFFPDLNGDVVAIDYKHYTPSFKKGAKLLHKPIVWHVNNATNKATYKPNTWCIRCLWSTKPVETSNSFDVLKSEDAQGMDNLACEDLKPVSEEVVENPTIQKDVLECNVKTTEVVGDIILKPANNSLKITEEVGHTDLMAAYVDNSSLTIKKPNELSRVLGLKTLATHGLAAVNSVPWDTIANYAKPFLNKVVSTTTNIVTRCLNRVCTNYMPYFFTLLLQLCTFTRSTNSRIKASMPTTIAKNTVKSVGKFCLEASFNYLKSPNFSKLINIIIWFLLLSVCLGSLIYSTAALGVLMSNLGMPSYCTGYREGYLNSTNVTIATYCTGSIPCSVCLSGLDSLDTYPSLETIQITISSFKWDLTAFGLVAEWFLAYILFTRFFYVLGLAAIMQLFFSYFAVHFISNSWLMWLIINLVQMAPISAMVRMYIFFASFYYVWKSYVHVVDGCNSSTCMMCYKRNRATRVECTTIVNGVRRSFYVYANGGKGFCKLHNWNCVNCDTFCAGSTFISDEVARDLSLQFKRPINPTDQSSYIVDSVTVKNGSIHLYFDKAGQKTYERHSLSHFVNLDNLRANNTKGSLPINVIVFDGKSKCEESSAKSASVYYSQLMCQPILLLDQALVSDVGDSAEVAVKMFDAYVNTFSSTFNVPMEKLKTLVATAEAELAKNVSLDNVLSTFISAARQGFVDSDVETKDVVECLKLSHQSDIEVTGDSCNNYMLTYNKVENMTPRDLGACIDCSARHINAQVAKSHNIALIWNVKDFMSLSEQLRKQIRSAAKKNNLPFKLTCATTRQVVNVVTTKIALKGG

SEQ ID NO: 16121 - protein, 1946 aa, Artificial Sequence
  SARS-CoV-2__MT706216.1__non-structural protein 3 (NSP3)
MAPTKVTFGDDTVIEVQGYKSVNITFELDERIDKVLNEKCSAYTVELGTEVNEFACVVADAVIKTLQPVSELLTPLGIDLDEWSMATYYLFDESGEFKLASHMYCSFYPPDEDEEEGDCEEEEFEPSTQYEYGTEDDYQGKPLEFGATSAALQPEEEQEEDWLDDDSQQTVGQQDGSEDNQTTTIQTIVEVQPQLEMELTPVVQTIEVNSFSGYLKLTDNVYIKNADIVEEAKKVKPTVVVNAANVYLKHGGGVAGALNKATNNAMQVESDDYIATNGPLKVGGSCVLSGHNLAKHCLHVVGPNVNKGEDIQLLKSAYENFNQHEVLLAPLLSAGIFGADPIHSLRVCVDTVRTNVYLAVFDKNLYDKLVSSFLEMKSEKQVEQKIAEIPKEEVKPFITESKPSVEQRKQDDKKIKACVEEVTTTLEETKFLTENLLLYIDINGNLHPDSATLVSDIDITFLKKDAPYIVGDVVQEGVLTAVVIPTKKAGGTTEMLAKALRKVPTDNYITTYPGQGLNGYTVEEAKTVLKKCKSAFYILPSIISNEKQEILGTVSWNLREMLAHAEETRKLMPVCVETKAIVSTIQRKYKGIKIQEGVVDYGARFYFYTSKTTVASLINTLNDLNETLVTMPLGYVTHGLNLEEAARYMRSLKVPATVSVSSPDAVTAYNGYLTSSSKTPEEHFIETISLAGSYKDWSYSGQSTQLGIEFLKRGDKSVYYTSNPTTFHLDGEVITFDNLKTLLSLREVRTIKVFTTVDNINLHTQVVDMSMTYGQQFGPTYLDGADVTKIKPHNSHEGKTFYVLPNDDTLRVEAFEYYHTTDPSFLGRYMSALNHTKKWKYPQVNGLTSIKWADNNCYLATALLTLQQIELKFNPPALQDAYYRARAGEAANFCALILAYCNKTVGELGDVRETMSYLFQHANLDSCKRVLNVVCKTCGQQQTTLKGVEAVMYMGTLSYEQFKKGVQIPCTCGKQATKYLVQQESPFVMMSAPPAQYELKHGTFTCASEYTGNYQCGHYKHITSKETLYCIDGALLTKSSEYKGPITDVFYKENSYTTTIKPVTYKLDGVVCTEIDPKLDNYYKKDNSYFTEQPIDLVPNQPYPNASFDNFKFVCDNIKFADDLNQLTGYKKPASRELKVTFFPDLNGDVVAIDYKHYTPSFKKGAKLLHKPIVWHVNNATNKATYKPNTWCIRCLWSTKPVETSNSFDVLKSEDAQGMDNLACEDLKPVSEEVVENPTIQKDVLDCNVKTTEVVGDIILKPANNSLKITEEVGHTDLMAAYVDNSSLTIKKPNELSRVLGLKTLATHGLAAVNSVPWDTIANYAKPFLNKVVSTTTNIVTRCLNRVCTNYMPYFFTLLLQLCTFTRSTNSRIKASMPTTIAKNTVKSVGKFCLEASFNYLKSPNFSKLINIIIWFLLLSVCLGSLIYSTAALGVLMSNLGMPSYCTGYREGYLNSTNVTIATYCTGSIPCSVCLSGLDSLDTYPSLETIQITISSFKWDLTAFGLVAEWFLAYILFTRFFYVLGLAAIMQLFFSYFAVHFISNSWLMWLIINLVQMAPISAMVRMYIFFASFYYVWKSYVHVVDGCNSSTCMMCYKRNRATRVECTTIVNGVRRSFYVYANGGKGFCKLHNWNCVNCDTFCAGSTFISDEVARDLSLQFKRPINPTDQSSYIVDSVTVKNGSIHLYFDKAGQKTYERHSLSHFVNLDNLRANNTKGSLPINVIVFDGKSKCEESSAKSASVYYSQLMCQPILLLDQALVSDVGDSAEVAVKMFDAYVNTFSSTFNVPMEKLKTLVATAEAELAKNVSLDNVLSTFISAARQGFVDSDVETKDVVECLKLSHQSDIEVTGDSCNNYMLTYNKVENMTPRDLGACIDCSARHINAQVAKSHNIALIWNVKDFMSLSEQLRKQIRSAAKKNNLPFKLTCATTRQVVNVVTTKIALKGG

SEQ ID NO: 16122 - protein, 1946 aa, Artificial Sequence
  SARS-CoV-2__MT706222.1__non-structural protein 3 (NSP3)
MAPTKVTFGDDTVIEVQGYKSVNITFELDERIDKVLNEKCSAYTVELGTEVNEFACVVADAVIKTLQPVSELLTPLGIDLDEWSMATYYLFDESGEFKLASHMYCSFYPPDEDEEEGDCEEEEFEPSTQYEYGTEDDYQGKPLEFGATSAALQPEEEQEEDWLDDDSQQTVGQQDGSEDNQTTTIQTIVEVQPQLEMELTPVVQTIEVNSFSGYLKLTDNVYIKNADIVEEAKKVKPTVVVNAANVYLKHGGGVAGALNKATNNAMQVESDDYIATNGPLKVGGSCVLSGHNLAKHCLHVVGPNVNKGEDIQLLKSAYENFNQHEVLLAPLLSAGIFGADPIHSLRVCVDTVRTNVYLAVFDKNLYDKLVSSFLEMKSEKQVEQKIAEIPKEEVKPFITESKPSVEQRKQDDKKIKACVEEVTTTLEETKFLTENLLLYIDINGNLHPDSATLVSDIDITFLKKDAPYIVGDVVQEGVLTAVVIPTKKAGGTTEMLAKALRKVPTDNYITTYPGQGLNGYTVEEAKTVLKKCKSAFYILPSIISNEKQEILGTVSWNLREMLAHAEETRKLMPVCVETKAIVSTIQRKYKGIKIQEGVVDYGARFYFYTSKTTVASLINTLNDLNETLVTMPLGYVTHGLNLEEAARYMRSLKVPATVSVSSPDAVTAYNGYLTSSSKTLEEHFIETISLAGSYKDWSYSGQSTQLGIEFLKRGDKSVYYTSNPTTFHLDGEVITFDNLKTLLSLREVRTIKVFTTVDNINLHTQVVDMSMTYGQQFGPTYLDGADVTKIKPHNSHEGKTFYVLPNDDTLRVEAFEYYHTTDPSFLGRYMSALNHTKKWKYPQVNGLTSIKWADNNCYLATALLTLQQIELKFNPPALQDAYYRARAGEAANFCALILAYCNKTVGELGDVRETMSYLFQHANLDSCKRVLNVVCKTCGQQQTTLKGVEAVMYMGTLSYEQFKKGVQIPCTCGKQATKYLVQQESPFVMMSAPPAQYELKHGTFTCASEYTGNYQCGHYKHITSKETLYCIDGALLTKSSEYKGPITDVFYKENSYTTTIKPVTYKLDGVVCTEIDPKLDNYYKKDNSYFTEQPIDLVPNQPYPNASFDNFKFVCDNIKFADDLNQLTGYKKPASRELKVTFFPDLNGDVVAIDYKHYTPSFKKGAKLLHKPIVWHVNNATNKATYKPNTWCIRCLWSTKPVETSNSFDVLKSEDAQGMDNLACEDLKPVSEEVVENPTIQKDVLECNVKTTEVVGDIILKPANNSLKITEEVGHTDLMAAYVDNSSLTIKKPNELSRVLGLKTLATHGLAAVNSVPWDTIANYAKPFLNKVVSTTTNIVTRCLNRVCTNYMPYFFTLLLQLCTFTRSTNSRIKASMPTTIAKNTVKSVGKFCLEASFNYLKSPNFSKLINIIIWFLLLSVCLGSLIYSTAALGVLMSNLGMPSYCTGYREGYLNSTNVTIATYCTGSIPCSVCLSGLDSLDTYPSLETIQITISSFKWDLTAFGLVAEWFLAYILFTRFFYVLGLAAIMQLFFSYFAVHFISNSWLMWLIINLVQMAPISAMVRMYIFFASFYYVWKSYVHVVDGCNSSTCMMCYKRNRATRVECTTIVNGVRRSFYVYANGGKGFCKLHNWNCVNCDTFCAGSTFISDEVARDLSLQFKRPINPTDQSSYIVDSVTVKNGSIHLYFDKAGQKTYERHSLSHFVNLDNLRANNTKGSLPINVIVFDGKSKCEESSAKSASVYYSQLMCQPILLLDQALVSDVGDSAEVAVKMFDAYVNTFSSTFNVPMEKLKTLVATAEAELAKNVSLDNVLSTFISAARQGFVDSDVETKDVVECLKLSHQSDIEVTGDSCNNYMLTYNKVENMIPRDLGACIDCSARHINAQVAKSHNIALIWNVKDFMSLSEQLRKQIRSAAKKNNLPFKLTCATTRQVVNVVTTKIALKGG

SEQ ID NO: 16123 - protein, 1946 aa, Artificial Sequence
  SARS-CoV-2__MT706287.1__non-structural protein 3 (NSP3)
MAPTKVTFGDDTVIEVQGYKSVNITFELDERIDKVLNEKCSAYTVELGTEVNEFACVVADAVIKTLQPVSELLTPLGIDLDEWSMATYYLFDESGEFKLASHMYCSFYPPDEDEEEGDCEEEEFEPSTQYEYGTEDDYQGKPLEFGATSAALQPEEEQEEDWLDDDSQQTVGQQDGSEDNQTTTIQTIVEVQPQLEMELTPVVQTIEVNSFSGYLKLTDNVYIKNADIVEEAKKVKPTVVVNAANVYLKHGGGVAGALNKATNNAMQVESDDYIATNGPLKVGGSCVLSGHNLAKHCLHVVGPNVNKGEDIQLLKSAYENFNQHEVLLAPLLSAGIFGADPIHSLRVCVDTVRTNVYLAVFDKNLYDKLVSSFLEMKSEKQVEQKIAEIPKEEVKPFITESKPSVEQRKQDDKKIKACVEEVTTTLEETKFLTENLLLYIDINGNLHPDSATLVSDIDITFLKKDAPYIVGDVVQEGVLTAVVIPTKKAGGTTEMLAKALRKVPTDNYITTYPGQGLNGYTVEEAKTVLKKCKSAFYILPSIISNEKQEILGTVSWNLREMLAHAEETRKLMPVCVETKAIVSTIQRKYKGIKIQEGVVDYGARFYFYTSKTTVASLINTLNDLNETLVTMPLGYVTHGLNLEEAARYMRSLKVPATVSVSSPDAVTAYNGYLTSSSKTPEEHFIETISLAGSYKDWSYSGQSTQLGIEFLKRGDKSVYYTSNPTTFHLDGEVITFDNLKTLLSLREVRTIKVFTTVDNINLHTQVVDMSMTYGQQFGPTYLDGADVTKIKPHNSHEGKTFYVLPNDDTLRVEAFEYYHTTDPSFLGRYMSALNHTKKWKYPQVNGLTSIKWADNNCYLATALLTLQQIELKFNPPALQDAYYRARAGEAANFCALILAYCNKTVGELGDVRETMSYLFQHANLDSCKRVLNVVCKTCGQQQTTLKGVEAVMYMGTLSYEQFKKGVQIPCTCGKQATKYLVQQESPFVMMSAPPAQYELKHGTFTCASEYTGNYQCGHYKHITSKETLYCIDGALLTKSSEYKGPITDVFYKENSYTTTIKPVTYKLDGVVCTEIDPKLDNYYKKDNSYFTEQPIDLVPNQPYPNASFDNFKFVCDNIKFADDLNQLTGYKKPASRELKVTFFPDLNGDVVAIDYKHYTPSFKKGAKLLHKPIVWHVNNATNKATYKPNTWCIRCLWSTKPVETSNSFDVLKSEDAQGMDNLACEDLKPVSEEVVENPTIQKDVLECNVKTTEVVGDIILKPANNSLKITEEVGHTDLMAAYVDNSSLTVKKPNELSRVLGLKTLATHGLAAVNSVPWDTIANYAKPFLNKVVSTTTNIVTRCLNRVCTNYMPYFFTLLLQLCTFTRSTNSRIKASMPTTIAKNTVKSVGKFCLEASFNYLKSPNFSKLINIIIWFLLLSVCLGSLIYSTAALGVLMSNLGMPSYCTGYREGYLNSTNVTIATYCTGSIPCSVCLSGLDSLDTYPSLETIQITISSFKWDLTAFGLVAEWFLAYILFTRFFYVLGLAAIMQLFFSYFAVHFISNSWLMWLIINLVQMAPISAMVRMYIFFASFYYVWKSYVHVVDGCNSSTCMMCYKRNRATRVECTTIVNGVRRSFYVYANGGKGFCKLHNWNCVNCDTFCAGSTFISDEVARDLSLQFKRPINPTDQSSYIVDSVTVKNGSIHLYFDKAGQKTYERHSLSHFVNLDNLRANNTKGSLPINVIVFDGKSKCEESSAKSASVYYSQLMCQPILLLDQALVSDVGDSAEVAVKMFDAYVNTFSSTFNVPMEKLKTLVATAEAELAKNVSLDNVLSTFISAARQGFVDSDVETKDVVECLKLSHQSDIEVTGDSCNNYMLTYNKVENMTPRDLGACIDCSARHINAQVAKSHNIALIWNVKDFMSLSEQLRKQIRSAAKKNNLPFKLTCATTRQVVNVVTTKIALKGG

SEQ ID NO: 16124 - protein, 1946 aa, Artificial Sequence
  SARS-CoV-2__MT706289.1__non-structural protein 3 (NSP3)
MAPTKVTFGDDTVIEVQGYKSVNITFELDERIDKVLNEKCSAYTVELGTEVNEFACVVADAVIKTLQPVSELLTPLGIDLDEWSMATYYLFDESGEFKLASHMYCSFYPPDEDEEEGDCEEEEFEPSTQYEYGTEDDYQGKPLEFGATSAALQPEEEQEEDWLDDDSQQTVGQQDGSEDNQTTTIQTIVEVQPQLEMELTPVVQTIEVNSFSGYLKLTDNVYIKNADIVEEAKKVKPTVVVNAANVYLKHGGGVAGALNKATNNAMQVESDDYIATNGPLKVGGSCVLSGHNLAKHCLHVVGPNVNKGEDIQLLKSAYENFNQHEVLLAPLLSAGIFGADPIHSLRVCVDTVRTNVYLAVFDKNLYDKLVSSFLEMKSEKQVEQKIAEIPKEEVKPFITESKPSVEQRKQDDKKIKACVEEVTTTLEETKFLTENLLLYIDINGNLHPDSATLVSDIDITFLKKDAPYIVGDVVQEGVLTAVVIPTKKAGGTTEMLAKALRKVPTDNYITTYPGQGLNGYTVEEAKTVLKKCKSAFYILPSIISNEKQEILGTVSWNLREMLAHAEETRKLMPVCVETKAIVSTIQRKYKGIKIQEGVVDYGARFYFYTSKTTVASLINTLNDLNETLVTMPLGYVTHGLNLEEAARYMRSLKVPATVSVSSPDAVTAYNGYLTSSSKTPEEHFIETISLAGSYKDWSYSGQSTQLGIEFLKRGDKSVYYTSNPTTFHLDGEVITFDNLKTLLSLREVRTIKVFTTVDNINLHTQVVDMSMTYGQQFGPTYLDGADVTKIKPHNSHEGKTFYVLPNDDTLRVEAFEYYHTTDPSFLGRYMSALNHTKKWKYPQVNGLTSIKWADNNCYLATALLTLQQIELKFNPPALQDAYYRARAGEAANFCALILAYCNKTVGELGDVRETMSYLFQHANLDSCKRVLNVVCKTCGQQQTTLKGVEAVMYMGTLSYEQFKKGVQIPCTCGKQATKYLVQQESPFVMMSAPPAQYELKHGTFTCASEYTGNYQCGHYKHITSKETLYCIDGALLTKSSEYKGPITDVFYKENSYTTTIKPVTYKLDGVVCTEIDPKLDNYYKKDNSYFTEQPIDLVPNQPYPNASFDNFKFVCDNIKFADDLNQLTGYKKPASRELKVTFFPDLNGDVVAIDYKHYTPSFKKGAKLLHKPIVWHVNNATNKATYKPNTWCIRCLWSTKPVETSNSFDVLKSEDAQGMDNLACEDLKPVSEEVVENPTIQKDVLECNVKTTEVVGDIILKPANNSLKITEEVGHTDLMAAYVDNSSLTIKKPNELSRVLGLKTLATHGLAAVNSVPWDTIANYAKPFLNKVVSTTTNIVTRCLNRVCTNYMPYFFTLLLQLCTFTRSTNSRIKASMPTTIAKNTVKSVGKFFLEASFNYLKSPNFSKLINIIIWFLLLSVCLGSLIYSTAALGVLMSNLGMPSYCTGYREGYLNSTNVTIATYCTGSIPCSVCLSGLDSLDTYPSLETIQITISSFKWDLTAFGLVAEWFLAYILFTRFFYVLGLAAIMQLFFSYFAVHFISNSWLMWLIINLVQMAPISAMVRMYIFFASFYYVWKSYVHVVDGCNSSTCMMCYKRNRATRVECTTIVNGVRRSFYVYANGGKGFCKLHNWNCVNCDTFCAGSTFISDEVARDLSLQFKRPINPTDQSSYIVDSVTVKNGSIHLYFDKAGQKTYERHSLSHFVNLDNLRANNTKGSLPINVIVFDGKSKCEESSAKSASVYYSQLMCQPILLLDQALVSDVGDSAEVAVKMFDAYVNTFSSTFNVPMEKLKTLVATAEAELAKNVSLDNVLSTFISAARQGFVDSDVETKDVVECLKLSHQSDIEVTGDSCNNYMLTYNKVENMTPRDLGACIDCSARHINAQVAKSHNIALIWNVKDFMSLSEQLRKQIRSAAKKNNLPFKLTCATTRQVVNVVTTKIALKGG

SEQ ID NO: 16125 - protein, 1946 aa, Artificial Sequence
  SARS-CoV-2__MT706341.1__non-structural protein 3 (NSP3)
MAPTKVTFGDDTVIEVQGYKSVNITFELDERIDKVLNEKCSAYTVELGTEVNEFACVVADAVIKTLQPVSELLTPLGIDLDEWSMATYYLFDESGEFKLASHMYCSFYPPDEDEEEGDCEEEEFEPSTQYEYGTEDDYQGKPLEFGATSAALQPEEEQEEDWLDDDSQQTVGQQDGSEDNQTTTIQTIVEVQPQLEMELTPVVQTIEVNSFSGYLKLTDNVYIKNADIVEEAKKVKPTVVVNAANVYLKHGGGVAGALNKATNNAMQVESDDYIATNGPLKVGGSCVLSGHNLAKHCLHVVGPNVNKGEDIQLLKSAYENFNQHEVLLAPLLSAGIFGADPIHSLRVCVDTVRTNVYLAVFDKNLYDKLVSSFLEMKSEKQVEQKIAEIPKEEVKPFITESKPSVEQRKQDDKKIKACVEEVTTTLEETKFLTENLLLYIDINGNLHPDSATLVSDIDITFLKKDAPYIVGDVVQEGVLTAVVIPTKKAGGTTEMLAKALRKVPTDNYITTYPGQGLNGYTVEEAKTVLKKCKSAFYILPSIISNEKQEILGTVSWNLREMLAHAEETRKLMPVCVETKAIVSTIQRKYKGIKIQEGVVDYGARFYFYTSKTTVASLINTLNDLNETLVTMPLGYVTHGLNLEEAARYMRSLKVPATVSVSSPDAVTAYNGYLTSSSKTPEEHFIETISLAGSYKDWSYSGQSTQLGIEFLKRGDKSVYYTSNPTTFHLDGEVITFDNLKTLLSLREVRTIKVFTTVDNINLHTQVVDMSMTYGQQFGPTYLDGADVTKIKPHNSHEGKTFYVLPNDDTLRVEAFEYYHTTDPSFLGRYMSALNHTKKWKYPQVNGLTSIKWADNNCYLATALLTLQQIELKFNPPALQDAYYRARAGEAANFCALILAYCNKTVGELGDVRETMSYLFQHANLDSCKRVLNVVCKTCGQQQTTLKGVEAVMYMGTLSYEQFKKGVQIPCTCGKQATKYLVQQESPFVMMSAPPAQYELKHGTFTCASEYTGNYQCGHYKHITSKETLYCIDGALLTKSSEYKGPITDVFYKENSYTTTIKPVTYKLDGVVCTEIDPKLDNYYKKDNSYFTEQPIDLVPNQPYPNASFDNFKFVCDNIKFADDLNQLTGYKKPASRELKVTFFPDLNGDVVAIDYKHYTPSFKKGAKLLHKPIVWHVNNATNKATYKPNTWCIRCLWSTKPVETSNSFNVLKSEDAQGMDNLACEDLKPVSEEVVENPTIQKDVLECNVKTTEVVGDIILKPANNSLKITEEVGHTDLMAAYVDNSSLTIKKPNELSRVLGLKTLATHGLAAVNSVPWDTIANYAKPFLNKVVSTTTNIVTRCLNRVCTNYMPYFFTLLLQLCTFTRSTNSRIKASMPTTIAKNTVKSVGKFCLEASFNYLKSPNFSKLINIIIWFLLLSVCLGSLIYSTAALGVLMSNLGMPSYCTGYREGYLNSTNVTIATYCTGSIPCSVCLSGLDSLDTYPSLETIQITISSFKWDLTAFGLVAEWFLAYILFTRFFYVLGLAAIMQLFFSYFAVHFISNSWLMWLIINLVQMAPISAMVRMYIFFASFYYVWKSYVHVVDGCNSSTCMMCYKRNRATRVECTTIVNGVRRSFYVYANGGKGFCKLHNWNCVNCDTFCAGSTFISDEVARDLSLQFKRPINPTDQSSYIVDSVTVKNGSIHLYFDKAGQKTYERHSLSHFVNLDNLRANNTKGSLPINVIVFDGKSKCEESSAKSASVYYSQLMCQPILLLDQALVSDVGDSAEVAVKMFDAYVNTFSSTFNVPMEKLKTLVATAEAELAKNVSLDNVLSTFISAARQGFVDSDVETKDVVECLKLSHQSDIEVTGDSCNNYMLTYNKVENMTPRDLGACIDCSARHINAQVAKSHNIALIWNVKDFMSLSEQLRKQIRSAAKKNNLPFKLTCATTRQVVNVVTTKIALKGG

SEQ ID NO: 16126 - protein, 1946 aa, Artificial Sequence
  SARS-CoV-2__MT706356.1__non-structural protein 3 (NSP3)
MAPTKVTFGDDTVIEVQGYKSVNITFELDERIDKVLNEKCSAYTVELGTEVNEFACVVADAVIKTLQPVSELLTPLGIDLDEWSMATYYLFDESGEFKLASHMYCSFYPPDEDEEEGDCEEEEFEPSTQYEYGTEDDYQGKPLEFGATSAALQPEEEQEEDWLDDDSQQTVGQQDGSEDNQTTTIQTIVEVQPQLEMELTPVVQTIEVNSFSGYLKLTDNVYIKNADIVEEAKKVKPTVVVNAANVYLKHGGGVAGALNKATNNAMQVESDDYIATNGPLKVGGSCVLSGHNLAKHCLHVVGPNVNKGEDIQLLKSAYENFNQHEVLLAPLLSAGIFGADPIHSLRVCVDTVRTNVYLAVFDKNLYDKLVSSFLEMKSEKQVEQKIAEIPKEEVKPFITESKPSVEQRKQDDKKIKACVEEVTTTLEETKFLTENLLLYIDINGNLHPDSATLVSDIDITFLKKDAPYIVGDVVQEGVLTAVVIPTKKAGGTTEMLAKALRKVPTDNYITTYPGQGLNGYTVEEAKTVLKKCKSAFYILPSIISNEKQEILGTVSWNLREMLAHAEETRKLMPVCVETKAIVSTIQRKYKGIKIQEGVVDYGARFYFYTSKTTVASLINTLNDLNETLVTMPLGYVTHGLNLEEAARYMRSLKVPATVSVSSPDAVTAYNGYLTSSSKTPEEHFIETISLAGSYKDWSYSGQSTQLGIEFLKRGDKSVYYTSNPTTFHLDGEVITFDNLKTLLSLREVRTIKVFTTVDNINLHTQVVDMSMTYGQQFGPTYLDGADVTKIKPHNSHEGKTFYVLPNDDTLRVEAFEYYHTTDPSFLGRYMSALNHTKKWKYPQVNGLTSIKWADNNCYLATALLTLQQIELKFNPPALQDAYYRARAGEAANFCALILAYCNKTVGELGDVRETMSYLFQHANLDSCKRVLNVVCKTCGQQQTTLKGVEAVMYMGTLSYEQFKKGVQIPCTCGKQATKYLVQQESPFVMMSAPPAQYELKHGTFTCASEYTGNYQCGHYKHITSKETLYCIDGALLTKSSEYKGPITDVFYKENSYTTTIKPVTYKLDGVVCTEIDPKLDNYYKKDNSYFTEQPIDLVPNQPYPNASFDNFKFVCDNIKFADDLNQLTGYKKPASRELKVTFFPDLNGDVVAIDYKHYTPSFKKGAKLLHKPIVWHVNNATNKATYKPNTWCIRCLWSTKPVETSNSFDVLKSEDAQGMDNLACEDLKPVSEEVVENPTIQKDVLECNVKTTEVVGDIILKPANNSLKITEEVGHTDLMAAYVDNSSLTIKKPNELSRVLGLKTLATHGLAAVNSVPWDTIANYAKPFLNKVVSTTTNIVTRCLNRVCTNYMPYFFTLLLQLCTFTRSTNSRIKASMPTTIAKNTVKSVGKFCLEASFNYLKSPNFSKLINIIIWFLLLSVCLGSLIYSTAALGVLMSNLGMPSYCTGYREGYLNSTNVTIATYCTGSIPCSVCLSGLDSLDTYPSLETIQITISSFKWDLTAFGLVAEWFLAYILFTRFFYVLGLAAIMQLFLSYFAVHFISNSWLMWLIINLVQMAPISAMVRMYIFFASFYYVWKSYVHVVDGCNSSTCMMCYKRNRATRVECTTIVNGVRRSFYVYANGGKGFCKLHNWNCVNCDTFCAGSTFISDEVARDLSLQFKRPINPTDQSSYIVDSVTVKNGSIHLYFDKAGQKTYERHSLSHFVNLDNLRANNTKGSLPINVIVFDGKSKCEESSAKSASVYYSQLMCQPILLLDQALVSDVGDSAEVAVKMFDAYVNTFSSTFNVPMEKLKTLVATAEAELAKNVSLDNVLSTFISAARQGFVDSDVETKDVVECLKLSHQSDIEVTGDSCNNYMLTYNKVENMTPRDLGACIDCSARHINAQVAKSHNIALIWNVKDFMSLSEQLRKQIRSAAKKNNLPFKLTCATTRQVVNVVTTKIALKGG

SEQ ID NO: 16127 - protein, 1946 aa, Artificial Sequence
  SARS-CoV-2__MT706369.1__non-structural protein 3 (NSP3)
MAPTKVTFGDDTVIEVQGYKSVNITFELDERIDKVLNEKCSAYTVELGTEVNEFACVVADAVIKTLQPVSELLTPLGIDLDEWSMATYYLFDESGEFKLASHMYCSFYPPDEDEEEGDCEEAEFEPSTQYEYGTEDDYQGKPLEFGATSAALQPEEEQEEDWLDDDSQQTVGQQDGSEDNQTTTIQTIVEVQPQLEMELTPVVQTIEVNSFSGYLKLTDNVYIKNADIVEEAKKVKPTVVVNAANVYLKHGGGVAGALNKATNNAMQVESDDYIATNGPLKVGGSCVLSGHNLAKHCLHVVGPNVNKGEDIQLLKSAYENFNQHEVLLAPLLSAGIFGADPIHSLRVCVDTVRTNVYLAVFDKNLYDKLVSSFLEMKSEKQVEQKIAEIPKEEVKPFITESKPSVEQRKQDDKKIKACVEEVTTTLEETKFLTENLLLYIDINGNLHPDSATLVSDIDITFLKKDAPYIVGDVVQEGVLTAVVIPTKKAGGTTEMLAKALRKVPTDNYITTYPGQGLNGYTVEEAKTVLKKCKSAFYILPSIISNEKQEILGTVSWNLREMLAHAEETRKLMPVCVETKAIVSTIQRKYKGIKIQEGVVDYGARFYFYTSKTTVASLINTLNDLNETLVTMPLGYVTHGLNLEEAARYMRSLKVPATVSVSSPDAVTAYNGYLTSSSKTPEEHFIETISLAGSYKDWSYSGQSTQLGIEFLKRGDKSVYYTSNPTTFHLDGEVITFDNLKTLLSLREVRTIKVFTTVDNINLHTQVVDMSMTYGQQFGPTYLDGADVTKIKPHNSHEGKTFYVLPNDDTLRVEAFEYYHTTDPSFLGRYMSALNHTKKWKYPQVNGLTSIKWADNNCYLATALLTLQQIELKFNPPALQDAYYRARAGEAANFCALILAYCNKTVGELGDVRETMSYLFQHANLDSCKRVLNVVCKTCGQQQTTLKGVEAVMYMGTLSYEQFKKGVQIPCTCGKQATKYLVQQESPFVMMSAPPAQYELKHGTFTCASEYTGNYQCGHYKHITSKETLYCIDGALLTKSSEYKGPITDVFYKENSYTTTIKPVTYKLDGVVCTEIDPKLDNYYKKDNSYFTEQPIDLVPNQPYPNASFDNFKFVCDNIKFADDLNQLTGYKKPASRELKVTFFPDLNGDVVAIDYKHYTPSFKKGAKLLHKPIVWHVNNATNKATYKPNTWCIRCLWSTKPVETSNSFDVLKSEDAQGMDNLACEDLKPVSEEVVENPTIQKDVLECNVKTTEVVGDIILKPANNSLKITEEVGHTDLMAAYVDNSSLTIKKPNELSRVLGLKTLATHGLAAVNSVPWDTIANYAKPFLNKVVSTTTNIVTRCLNRVCTNYMPYFFTLLLQLCTFTRSTNSRIKASMPTTIAKNTVKSVGKFCLEASFNYLKSPNFSKLINIIIWFLLLSVCLGSLIYSTAALGVLMSNLGMPSYCTGYREGYLNSTNVTIATYCTGSIPCSVCLSGLDSLDTYPSLETIQITISSFKWDLTAFGLVAEWFLAYILFTRFFYVLGLAAIMQLFFSYFAVHFISNSWLMWLIINLVQMAPISAMVRMYIFFASFYYVWKSYVHVVDGCNSSTCMMCYKRNRATRVECTTIVNGVRRSFYVYANGGKGFCKLHNWNCVNCDTFCAGSTFISDEVARDLSLQFKRPINPTDQSSYIVDSVTVKNGSIHLYFDKAGQKTYERHSLSHFVNLDNLRANNTKGSLPINVIVFDGKSKCEESSAKSASVYYSQLMCQPILLLDQALVSDVGDSAEVAVKMFDAYVNTFSSTFNVPMEKLKTLVATAEAELAKNVSLDNVLSTFISAARQGFVDSDVETKDVVECLKLSHQSDIEVTGDSCNNYMLTYNKVENMTPRDLGACIDCSARHINAQVAKSHNIALIWNVKDFMSLSEQLRKQIRSAAKKNNLPFKLTCATTRQVVNVVTTKIALKGG

SEQ ID NO: 16128 - protein, 1946 aa, Artificial Sequence
  SARS-CoV-2__MT706386.1__non-structural protein 3 (NSP3)
MAPTKVTFGDDTVIEVQGYKSVNITFELDERIDKVLNEKCSAYTVELGTEVNEFACVVADAVIKTLQPVSELLTPLGIDLDEWSMATYYLFDESGEFKLASHMYCSFYPPDEDEEEGDCEEEEFEPSTQYEYGTEDDYQGKPLEFGATSAALQPEEEQEEDWLDDDSQQTVGQQDGSEDNQTTTIQTIVEVQPQLEMELTPVVQTIEVNSFSGYLKLTDNVYIKNADIVEEAKKVKPTVVVNAANVYLKHGGGVAGALNKATNNAMQVESDDYIATNGPLKVGGSCVLSGHNLAKHCLHVVGPNVNKGEDIQLLKSAYENFNQHEVLLAPLLSAGIFGADPIHSLRVCVDTVRTNVYLAVFDKNLYDKLVSSFLEMKSEKQVEQKIAEIPKEEVKPFITESKPSVEQRKQDDKKIKACVEEVTTTLEETKFLTENLLLYIDINGNLHPDSATLVSDIDITFLKKDAPYIVGDVVQEGVLTAVVIPTKKAGGTTEMLAKALRKVPTDNYITTYPGQGLNGYTVEEAKTVLKKCKSAFYILPSIISNEKQEILGTVSWNLREMLAHAEETRKLMPVCVETKAIVSTIQRKYKGIKIQEGVVDYGARFYFYTSKTTVASLINTLNDLNETLVTMPLGYVTHGLNLEEAARYMRSLKVPATVSVSSPDAVTAYNGYLTSSSKTPEEHFIETISLAGSYKDWSYSGQSTQLGVEFLKRGDKSVYYTSNPTTFHLDGEVITFDNLKTLLSLREVRTIKVFTTVDNINLHTQVVDMSMTYGQQFGPTYLDGADVTKIKPHNSHEGKTFYVLPNDDTLRVEAFEYYHTTDPSFLGRYMSALNHTKKWKYPQVNGLTSIKWADNNCYLATALLTLQQIELKFNPPALQDAYYRARAGEAANFCALILAYCNKTVGELGDVRETMSYLFQHANLDSCKRVLNVVCKTCGQQQTTLKGVEAVMYMGTLSYEQFKKGVQIPCTCGKQATKYLVQQESPFVMMSAPPAQYELKHGTFTCASEYTGNYQCGHYKHITSKETLYCIDGALLTKSSEYKGPITDVFYKENSYTTTIKPVTYKLDGVVCTEIDPKLDNYYKKDNSYFTEQPIDLVPNQPYPNASFDNFKFVCDNIKFADDLNQLTGYKKPASRELKVTFFPDLNGDVVAIDYKHYTPSFKKGAKLLHKPIVWHVNNATNKATYKPNTWCIRCLWSTKPVETSNSFDVLKSEDAQGMDNLACEDLKPVSEEVVENPTIQKDVLECNVKTTEVVGDIILKPANNSLKITEEVGHTDLMAAYVDNSSLTIKKPNELSRVLGLKTLATHGLAAVNSVPWDTIANYAKPFLNKVVSTTTNIVTRCLNRVCTNYMPYFFTLLLQLCTFTRSTNSRIKASMPTTIAKNTVKSVGKFCLEASFNYLKSPNFSKLINIIIWFLLLSVCLGSLIYSTAALGVLMSNLGMPSYCTGYREGYLNSTNVTIATYCTGSIPCSVCLSGLDSLDTYPSLETIQITISSFKWDLTAFGLVAEWFLAYILFTRFFYVLGLAAIMQLFFSYFAVHFISNSWLMWLIINLVQMAPISAMVRMYIFFASFYYVWKSYVHVVDGCNSSTCMMCYKRNRATRVECTTIVNGVRRSFYVYANGGKGFCKLHNWNCVNCDTFCAGSTFISDEVARDLSLQFKRPINPTDQSSYIVDSVTVKNGSIHLYFDKAGQKTYERHSLSHFVNLDNLRANNTKGSLPINVIVFDGKSKCEESSAKSASVYYSQLMCQPILLLDQALVSDVGDSAEVAVKMFDAYVNTFSSTFNVPMEKLKTLVATAEAELAKNVSLDNVLSTFISAARQGFVDSDVETKDVVECLKLSHQSDIEVTGDSCNNYMLTYNKVENMTPRDLGACIDCSARHINAQVAKSHNIALIWNVKDFMSLSEQLRKQIRSAAKKNNLPFKLTCATTRQVVNVVTTKIALKGG

SEQ ID NO: 16129 - protein, 1946 aa, Artificial Sequence
  SARS-CoV-2__MT706389.1__non-structural protein 3 (NSP3)
MAPTKVTFGDDTVIEVQGYKSVNITFELDERIDKVLNEKCSAYTVELGTEVNEFACVVADAVIKTLQPVSELLTPLGIDLDEWSMATYYLFDESGEFKLASHMYCSFYPPDEDEEEGDCEEEEFEPSTQYEYGTEDDYQGKPLEFGATSAALQPEEEQEEDWLDDDSQQTVGQQDGSEDNQTTTIQTIVEVQPQLEMELTPVVQTIEVNSFSGYLKLTDNVYIKNADIVEEAKKVKPTVVVNAANVYLKHGGGVAGALNKATNNAMQVESDDYIATNGPLKVGGSCVLSGHNLAKHCLHVVGPNVNKGEDIQLLKSAYENFNQHEVLLAPLLSAGIFGADPIHSLRVCVDTVRTNVYLAVFDKNLYDKLVSSFLEMKSEKQVEQKIAEIPKEEVKPFITESKPSVEQRKQDDKKIKACVEEVTTTLEETKFLTENLLLYIDINGNLHPDSATLVSDIDITFLKKDAPYIVGDVVQEGVLTAVVIPTKKAGGTTEMLAKALRKVPTDNYITTYPGQGLNGYTVEEAKTVLKKCKSAFYILPSIISNEKQEILGTVSWNLREMLAHAEETRKLMPVCVETKAIVSTIQRKYKGIKIQEGVVDYGARFYFYTSKTTVASLINTLNDLNETLVTMPLGYVTHGLNLEEAARYMRSLKVPATVSVSSPDAVTAYNGYLTSSSKTPEEHFIETISLAGSYKDWSYSGQSTQLGVEFLKRGDKSVYYTSNPTTFHLDGEVITFDNLKTLLSLREVRTIKVFTTVDNINLHTQVVDMSMTYGQQFGPTYLDGADVTKIKPHNSHEGKTFYVLPNDDTLRVEAFEYYHTTDPSFLGRYMSALNHTKKWKYPQVNGLTSIKWADNNCYLATALLTLQQIELKFNPPALQDAYYRARAGEAANFCALILAYCNKTVGELGDVRETMSYLFQHANLDSCKRVLNVVCKTCGQQQTTLKGVEAVMYMGTLSYEQFKKGVQIPCTCGKQATKYLVQQESPFVMMSAPPAQYELKHGTFTCASEYTGNYQCGHYKHITSKETLYCIDGALLTKSSEYKGPITDVFYKENSYTTTIKPVTYKLDGVVCTEIDPKLDNYYKKDNSYFTEQPIDLVPNQPYPNASFDNFKFVCDNIKFADDLNQLTGYKKPASRELKVTFFPDLNGDVVAIDYKHYTPSFKKGAKLLHKPIVWHVNNATNKATYKPNTWCIRCLWSTKPVETSNSFDVLKSEDAQGMDNLACEDLKPVSEEVVENPTIQKDVLECNVKTTEVVGDIILKPANNSLKITEEVGHTDLMAAYVDNSSLTIKKPNELSRVLGLKTLATHGLAAVNSVPWDTIANYAKPFLNKVVSTTTNIVTRCLNRVCTNYMPYFFTLLLQLCTFTRSTNSRIKASMPTTIAKNTVKSVGKFCLEASFNYLKSPNFSKLINIIIWFLLLSVCLGSLIYSTAALGVLMSNLGMPSYCTGYREGYLNSTNVTIATYCTGSIPCSVCLSGLDSLDTYPSLETIQITISSFKWDLTAFGLVAEWFLAYILFTRFFYVLGLAAIMQLFFSYFAVHFISNSWLMWLIINLVQMAPISAMVRMYIFFASFYYVWKSYVHVVDGCNSSTCMMCYKRNRATRVECTTIVNGVRRSFYVYANGGKGFCKLHNWNCVNCDTFCAGSTFISDEVARDLSLQFKRPINPTDQSSYIVDSVTVKNGSIHLYFDKAGQKTYERHSLSHFVNLDNLRANNTKGSLPINVIVFDGKSKCEESSAKSASVYYSQLMCQPILLLDQALVSDVGDSAEVAVKMFDAYVNTFSSTFNVPMEKLKTLVATAEAELAKNVSLDNVLSTFISAARQGFVDSDVETKDVVECLKLSHQSDIEVTGDSCNNYMLTYNKVENMTPRDLGACIDCSARHINAQVAKSHNTALIWNVKDFMSLSEQLRKQIRSAAKKNNLPFKLTCATTRQVVNVVTTKIALKGG

SEQ ID NO: 16130 - protein, 1946 aa, Artificial Sequence
  SARS-CoV-2__MT706390.1__non-structural protein 3 (NSP3)
MAPTKVTFGDDTVIEVQGYKSVNITFELDERIDKVLNEKCSAYTVELGTEVNEFACVVADAVIKTLQPVSELLTPLGIDLDEWSMATYYLFDESGEFKLASHMYCSFYPPDEDEEEGDCEEEEFEPSTQYEYGTEDDYQGKPLEFGATSAALQPEEEQEEDWLDDDSQQTVGQQDGSEDNQTTTIQTIVEVQPQLEMELTPVVQTIEVNSFSGYLKLTDNVYIKNADIVEEAKKVKPTVVVNAANVYLKHGGGVAGALNKATNNAMQVESDDYIATNGPLKVGGSCVLSGHNLAKHCLHVVGPNVNKGEDIQLLKSAYENFNQHEFLLAPLLSAGIFGADPIHSLRVCVDTVRTNVYLAVFDKNLYDKLVSSFLEMKSEKQVEQKIAEIPKEEVKPFITESKPSVEQRKQDDKKIKACVEEVTTTLEETKFLTENLLLYIDINGNLHPDSATLVSDIDITFLKKDAPYIVGDVVQEGVLTAVVIPTKKAGGTTEMLAKALRKVPTDNYITTYPGQGLNGYTVEEAKTVLKKCKSAFYILPSIISNEKQEILGTVSWNLREMLAHAEETRKLMPVCVETKAIVSTIQRKYKGIKIQEGVVDYGARFYFYTSKTTVASLINTLNDLNETLVTMPLGYVTHGLNLEEAARYMRSLKVPATVSVSSPDAVTAYNGYLTSSSKTPEEHFIETISLAGSYKDWSYSGQSTQLGVEFLKRGDKSVYYTSNPTTFHLDGEVITFDNLKTLLSLREVRTIKVFTTVDNINLHTQVVDMSMTYGQQFGPTYLDGADVTKIKPHNSHEGKTFYVLPNDDTLRVEAFEYYHTTDPSFLGRYMSALNHTKKWKYPQVNGLTSIKWADNNCYLATALLTLQQIELKFNPPALQDAYYRARAGEAANFCALILAYCNKTVGELGDVRETMSYLFQHANLDSCKRVLNVVCKTCGQQQTTLKGVEAVMYMGTLSYEQFKKGVQIPCTCGKQATKYLVQQESPFVMMSAPPAQYELKHGTFTCASEYTGNYQCGHYKHITSKETLYCIDGALLTKSSEYKGPITDVFYKENSYTTTIKPVTYKLDGVVCTEIDPKLDNYYKKDNSYFTEQPIDLVPNQPYPNASFDNFKFVCDNIKFADDLNQLTGYKKPASRELKVTFFPDLNGDVVAIDYKHYTPSFKKGAKLLHKPIVWHVNNATNKATYKPNTWCIRCLWSTKPVETSNSFDVLKSEDAQGMDNLACEDLKPVSEEVVENPTIQKDVLECNVKTTEVVGDIILKPANNSLKITEEVGHTDLMAAYVDNSSLTIKKPNELSRVLGLKTLATHGLAAVNSVPWDTIANYAKPFLNKVVSTTTNIVTRCLNRVCTNYMPYFFTLLLQLCTFTRSTNSRIKASMPTTIAKNTVKSVGKFCLEASFNYLKSPNFSKLINIIIWFLLLSVCLGSLIYSTAALGVLMSNLGMPSYCTGYREGYLNSTNVTIATYCTGSIPCSVCLSGLDSLDTYPSLETIQITISSFKWDLTAFGLVAEWFLAYILFTRFFYVLGLAAIMQLFFSYFAVHFISNSWLMWLIINLVQMAPISAMVRMYIFFASFYYVWKSYVHVVDGCNSSTCMMCYKRNRATRVECTTIVNGVRRSFYVYANGGKGFCKLHNWNCVNCDTFCAGSTFISDEVARDLSLQFKRPINPTDQSSYIVDSVTVKNGSIHLYFDKAGQKTYERHSLSHFVNLDNLRANNTKGSLPINVIVFDGKSKCEESSAKSASVYYSQLMCQPILLLDQALVSDVGDSAEVAVKMFDAYVNTFSSTFNVPMEKLKTLVATAEAELAKNVSLDNVLSTFISAARQGFVDSDVETKDVVECLKLSHQSDIEVTGDSCNNYMLTYNKVENMTPRDLGACIDCSARHINAQVAKSHNIALIWNVKDFMSLSEQLRKQIRSAAKKNNLPFKLTCATTRQVVNVVTTKIALKGG

SEQ ID NO: 16131 - protein, 1946 aa, Artificial Sequence
  SARS-CoV-2__MT706403.1__non-structural protein 3 (NSP3)
MAPTKVTFGDDTVIEVQGYKSVNITFELDERIDKVLNEKCSAYTVELGTEVNEFACVVADAVIKTLQPVSELLTPLGIDLDEWSMATYYLFDESGEFKLASHMYCSFYPPDEDEEEGDCEEEEFEPSTQYEYGTEDDYQGKPLEFGATSAALQPEEEQEEDWLDDDSQQTVGQQDGSEDNQTTTIQTIVEVQPQLEMELTPVVQTIEVNSFSGYLKLTDNVYIKNADIVEEAKKVKPTVVVNAANVYLKHGGGVAGALNKATNNAMQVESDDYIATNGPLKVGGSCVLSGHNLAKHCLHVVGPNVNKGEDIQFLKSAYENFNQHEVLLAPLLSAGIFGADPIHSLRVCVDTVRTNVYLAVFDKNLYDKLVSSFLEMKSEKQVEQKIAEIPKEEVKPFITESKPSVEQRKQDDKKIKACVEEVTTTLEETKFLTENLLLYIDINGNLHPDSATLVSDIDITFLKKDAPYIVGDVVQEGVLTAVVIPTKKAGGTTEMLAKALRKVPTDNYITTYPGQGLNGYTVEEAKTVLKKCKSAFYILPSIISNEKQEILGTVSWNLREMLAHAEETRKLMPVCVETKAIVSTIQRKYKGIKIQEGVVDYGARFYFYTSKTTVASLINTLNDLNETLVTMPLGYVTHGLNLEEAARYMRSLKVPATVSVSSPDAVTAYNGYLTSSSKTPEEHFIETISLAGSYKDWSYSGQSTQLGIEFLKRGDKSVYYTSNPTTFHLDGEVITFDNLKTLLSLREVRTIKVFTTVDNINLHTQVVDMSMTYGQQFGPTYLDGADVTKIKPHNSHEGKTFYVLPNDDTLRVEAFEYYHTTDPSFLGRYMSALNHTKKWKYPQVNGLTSIKWADNNCYLATALLTLQQIELKFNPPALQDAYYRARAGEAANFCALILAYCNKTVGELGDVRETMSYLFQHANLDSCKRVLNVVCKTCGQQQTTLKGVEAVMYMGTLSYEQFKKGVQIPCTCGKQATKYLVQQESPFVMMSAPPAQYELKHGTFTCASEYTGNYQCGHYKHITSKETLYCIDGALLTKSSEYKGPITDVFYKENSYTTTIKPVTYKLDGVVCTEIDPKLDNYYKKDNSYFTEQPIDLVPNQPYPNASFDNFKFVCDNIKFADDLNQLTGYKKPASRELKVTFFPDLNGDVVAIDYKHYTPSFKKGAKLLHKPIVWHVNNATNKATYKPNTWCIRCLWSTKPVETSNSFDVLKSEDAQGMDNLACEDLKPVSEEVVENPTIQKDVLECNVKTTEVVGDIILKPANNSLKITEEVGHTDLMAAYVDNSSLTIKKPNELSRVLGLKTLATHGLAAVNSVPWDTIANYAKPFLNKVVSTTTNIVTRCLNRVCTNYMPYFFTLLLQLCTFTRSTNSRIKASMPTTIAKNTVKSVGKFCLEASFNYLKSPNFSKLINIIIWFLLLSVCLGSLIYSTAALGVLMSNLGMPSYCTGYREGYLNSTNVTIATYCTGSIPCSVCLSGLDSLDTYPSLETIQITISSFKWDLTAFGLVAEWFLAYILFTRFFYVLGLAAIMQLFFSYFAVHFISNSWLMWLIINLVQMAPISAMVRMYIFFASFYYVWKSYVHVVDGCNSSTCMMCYKRNRATRVECTTIVNGVRRSFYVYANGGKGFCKLHNWNCVNCDTFCAGSTFISDEVARDLSLQFKRPINPTDQSSYIVDSVTVKNGSIHLYFDKAGQKTYERHSLSHFVNLDNLRANNTKGSLPINVIVFDGKSKCEESSAKSASVYYSQLMCQPILLLDQALVSDVGDSAEVAVKMFDAYVNTFSSTFNVPMEKLKTLVATAEAELAKNVSLDNVLSTFISAARQGFVDSDVETKDVVECLKLSHQSDIEVTGDSCNNYMLTYNKVENMTPRDLGACIDCSARHINAQVAKSHNIALIWNVKDFMSLSEQLRKQIRSAAKKNNLPFKLTCATTRQVVNVVTTKIALKGG

SEQ ID NO: 16132 - protein, 1946 aa, Artificial Sequence
  SARS-CoV-2__MT706406.1__non-structural protein 3 (NSP3)
MAPTKVTFGDDTVIEVQGYKSVNITFELDERIDKVLNEKCSAYTVELGTEVNEFACVVADAVIKTLQPVSELLTPLGIDLDEWSMATYYLFDESGEFKLASHMYCSFYPPDEDEEEGDCEEEEFEPSTQYEYGTEDDYQGKPLEFGATSAALQPEEEQEEDWLDDDSQQTVGQQDGSEDNQTTTIQTIVEVQPQLEMELTPVVQTIEVNSFSGYLKLTDNVYIKNADIVEEAKKVKPTVVVNAANVYLKHGGGVAGALNKATNNAMQVESDDYIATNGPLKVGGSCVLSGHNLAKHCLHVVGPNVNKGEDIQLLKSAYENFNQHEVLLAPLLSAGIFGADPIHSLRVCVDTVRTNVYLAVFDKNLYDKLVSSFLEMKSEKQVEQKIAEIPKEEVKPFITESKPSVEQRKQDDKKIKACVEEVTTTLEETKFLTENLLLYIDINGNLHPDSATLVSDIDITFLKKDAPYIVGDVVQEGVLTAVVIPTKKAGGTTEMLAKALRKVPTDNYITTYPGQGLNGYTVEEAKTVLKKCKSAFYILPSIISNEKQEILGTVSWNLREMLAHAEETRKLMPVCVETKAIVSTIQRKYKGIKIQEGVVDYGARFYFYTSKTTVASLINTLNDLNETLVTMPLGYVTHGLNLEEAARYMRSLKVPATVSVSSPDAVTAYNGYLTSSSKTPEEHFIETISLAGSYKDWSYSGQSTQLGVEFLKRGDKSVYYTSNPTTFHLDGEVITFDNLKTLLSLREVRTIKVFTTVDNINLHTQVVDMSMTYGQQFGPTYLDGADVTKIKPHNSHEGKTFYVLPNDDTLRVEAFEYYHTTDPSFLGRYMSALNHTKKWKYPQVNGLTSIKWADNNCYLATALLTLQQIELKFNPPALQDAYYRARAGEAANFCALILAYCNKTVGELGDVRETMSYLFQHANLDSCKRVLNVVCKTCGQQQTTLKGVEAVMYMGTLSYEQFKKGVQIPCTCGKQATKYLVQQESPFVMMSAPPAQYELKHGTFTCASEYTGNYQCGHYKHITSKETLYCIDGALLTKSSEYKGPITDVFYKENSYTTTIKPVTYKLDGVVCTEIDPKLDNYYKKDNSYFTEQPIDLVPNQPYPNASFDNFKFVCDNIKFADDLNQLTGYKKPASRELKVTFFPDLNGDVVAIDYKHYTPSFKKGAKLLHKPIVWHVNNATNKATYKPNTWCIRCLWSTKPVETSNSFDVLKSEDAQGMDNLACEDLKPVSEEVVENPTIQKDVLECNVKTTEVVGDIILKPANNSLKITEEVGHTDLMAAYVDNSSLTIKKPNELSRVLGLKTLATHGLAAVNSVPWDTIANYAKPFLNKVVSTTTNIVTRCLNRVCTNYMPYFFTLLLQLCTFTRSTNSRIKASMPTTIAKNTVKSVGKFCLEASFNYLKSPNFSKLINIIIWFLLLSVCLGSLIYSTAALGVLMSNLGMPSYCTGYREGYLNSTNVTIATYCTGSIPCSVCLSGLDSLDTYPSLETIQITISSFKWDLTAFGLVAEWFLAYILFTRFFYVLGLAAIMQLFFSYFAVHFISNSWLMWLIINLVQMAPISAMVRMYIFFASFYYVWKSYVHVVDGCNSSTCMMCYKRNRATRVECTTIVNGVRRSFYVYANGGKGFCKLHNWNCVNCDTFCAGSTFISDEVARDLSLQFKRPINPTDQSFYIVDSVTVKNGSIHLYFDKAGQKTYERHSLSHFVNLDNLRANNTKGSLPINVIVFDGKSKCEESSAKSASVYYSQLMCQPILLLDQALVSDVGDSAEVAVKMFDAYVNTFSSTFNVPMEKLKTLVATAEAELAKNVSLDNVLSTFISAARQGFVDSDVETKDVVECLKLSHQSDIEVTGDSCNNYMLTYNKVENMTPRDLGACIDCSARHINAQVAKSHNIALIWNVKDFMSLSEQLRKQIRSAAKKNNLPFKLTCATTRQVVNVVTTKIALKGG

SEQ ID NO: 16133 - protein, 1946 aa, Artificial Sequence
  SARS-CoV-2__MT706427.1__non-structural protein 3 (NSP3)
MAPTKVTFGDDTVIEVQGYKSVNITFELDERIDKVLNEKCSAYTVELGTEVNEFACVVADAVIKTLQPVSELLTPLGIDLDEWSMATYYLFDESGEFKLASHMYCSFYPPDEDEEEGDCEEEEFEPSTQYEYGTEDDYQGKPLEFGATSAALQPEEEQEEDWLDDDSQQTVGQQDGSEDNQTTTIQTIVEVQPQLEMELTPVVQTIEVNSFSGYLKLTDNVYIKNADIVEEAKKVKPTVVVNAANVYLKHGGGVAGALNKATNNAMQVESDDYIATNGPLKVGGSCVLSGHNLAKHCLHVVGPNVNKGEDIQLLKSAYENFNQHEVLLAPLLSAGIFGADPIHSLRVCVDTVRTNVYLAVFDKNLYDKLVSSFLEMKSEKQVEQNIAEIPKEEVKPFITESKPSVEQRKQDDKKIKACVEEVTTTLEETKFLTENLLLYIDINGNLHPDSATLVSDIDITFLKKDAPYIVGDVVQEGVLTAVVIPTKKAGGTTEMLAKALRKVSTDNYITTYPGQGLNGYTVEEAKTVLKKCKSAFYILPSIISNEKQEILGTVSWNLREMLAHAEETRKLMPVCVETKAIVSTIQRKYKGIKIQEGVVDYGARFYFYTSKTTVASLINTLNDLNETLVTMPLGYVTHGLNLEEAARYMRSLKVPATVSVSSPDAVTAYNGYLTSSSKTPEEHFIETISLAGSYKDWSYSGQSTQLGIEFLKRGDKSVYYTSNPTTFHLDGEVITFDNLKTLLSLREVRTIKVFTTVDNINLHTQVVDMSMTYGQQFGPTYLDGADVTKIKPHNSHEGKTFYVLPNDDTLRVEAFEYYHTTDPSFLGRYMSALNHTKKWKYPQVNGLTSIKWADNNCYLATALLTLQQIELKFNPPALQDAYYRARAGEAANFCALILAYCNKTVGELGDVRETMSYLFQHANLDSCKRVLNVVCKTCGQQQTTLKGVEAVMYMGTLSYEQFKKGVQIPCTCGKQATKYLVQQESPFVMMSAPPAQYELKHGTFTCASEYTGNYQCGHYKHITSKETLYCIDGALLTKSSEYKGPITDVFYKENSYTTTIKPVTYKLDGVVCTEIDPKLDNYYKKDNSYFTEQPIDLVPNQPYPNASFDNFKFVCDNIKFADDLNQLTGYKKPASRELKVTFFPDLNGDVVAIDYKHYTPSFKKGAKLLHKPIVWHVNNATNKATYKPNTWCIRCLWSTKPVETSNSFDVLKSEDAQGMDNLACEDLKPVSEEVVENPTIQKDVLECNVKTTEVVGDIILKPANNSLKITEEVGHTDLMAAYVDNSSLTIKKPNELSRVLGLKTLATHGLAAVNSVPWDTIANYAKPFLNKVVSTTTNIVTRCLNRVCTNYMPYFFTLLLQLCTFTRSTNSRIKASMPTTIAKNTVKSVGKFCLEASFNYLKSPNFSKLINIIIWFLLLSVCLGSLIYSTAALGVLMSNLGMPSYCTGYREGYLNSTNVTIATYCTGSIPCSVCLSGLDSLDTYPSLETIQITISSFKWDLTAFGLVAEWFLAYILFTRFFYVLGLAAIMQLFFSYFAVHFISNSWLMWLIINLVQMAPISAMVRMYIFFASFYYVWKSYVHVVDGCNSSTCMMCYKRNRATRVECTTIVNGVRRSFYVYANGGKGFCKLHNWNCVNCDTFCAGSTFISDEVARDLSLQFKRPINPTDQSSYIVDSVTVKNGSIHLYFDKAGQKTYERHSLSHFVNFDNLRANNTKGSLPINVIVFDGKSKCEESSAKSASVYYSQLMCQPILLLDQALVSDVGDSAEVAVKMFDAYVNTFSSTFNVPMEKLKTLVATAEAELAKNVSLDNVLSTFISAARQGFVDSDVETKDVVECLKLSHQSDIEVTGDSCNNYMLTYNKVENMTPRDLGACIDCSARHINAQVAKSHNIALIWNVKDFMSLSEQLRKQIRSAAKKNNLPFKLTCATTRQVVNVVTTKIALKGG

SEQ ID NO: 16134 - protein, 1946 aa, Artificial Sequence
  SARS-CoV-2__MT709104.1__non-structural protein 3 (NSP3)
MAPTKVTFGDDTVIEVQGYKSVNITFELDERIDKVLNEKCSAYTVELGTEVNEFACVVADAVIKTLQPVSELLTPLGIDLDEWSMATYYLFDESGEFKLASHMYCSFYPPDEDEEEGDCEEEEFEPSTQYEYGTEDDYQGKPLEFGATSAALQPEEEQEEDWLDDDSQQTVGQQDGSEDNQTTTIQTIVEVQPQLEMELTPVVQTIEVNSFSGYLKLTDNVYIKNADIVEEAKKIKPTVVVNAANVYLKHGGGVAGALNKATNNAMQVESDDYIATNGPLKVGGSCVLSGHNLAKHCLHVVGPNVNKGEDIQLLKSAYENFNQHEVLLAPLLSAGIFGADPIHSLRVCVDTVRTNVYLAVFDKNLYDKLVSSFLEMKSEKQVEQNIAEIPKEEVKPFITESKPSVEQRKQDDKKIKACVEEVTTTLEETKFLTENLLLYIDINGNLHPDSATLVSDIDITFLKKDAPYIVGDVVQEGVLTAVVIPTKKAGGTTEMLAKALRKVPTDNYITTYPGQGLNGYTVEEAKTVLKKCKSAFYILPSIISNEKQEILGTVSWNLREMLAHAEETRKLMPVCVETKAIVSTIQRKYKGIKIQEGVVDYGARFYFYTSKTTVASLINTLNDLNETLVTMPLGYVTHGLNLEEAARYMRSLKVPATVSVSSPDAVTAYNGYLTSSSKTPEEHFIETISLAGSYKDWSYSGQSTQLGIEFLKRGDKSVYYTSNPTTFHLDGEVITFDNLKTLLSLREVRTIKVFTTVDNINLHTQVVDMSMTYGQQFGPTYLDGADVTKIKPHNSHEGKTFYVLPNDDTLRVEAFEYYHTTDPSFLGRYMSALNHTKKWKYPQVNGLTSIKWADNNCYLATALLTLQQIELKFNPPALQDAYYRARAGEAANFCALILAYCNKTVGELGDVRETMSYLFQHANLDSCKRVLNVVCKTCGQQQTTLKGVEAVMYMGTLSYEQFKKGVQIPCTCGKQATKYLVQQESPFVMMSAPPAQYELKHGTFTCASEYTGNYQCGHYKHITSKETLYCIDGALLTKSSEYKGPITDVFYKENSYTTTIKPVTYKLDGVVCTEIDPKLDNYYKKDNSYFTEQPIDLVPNQPYPNASFDNFKFVCDNIKFADDLNQLTGYKKPASRELKVTFFPDLNGDVVAIDYKHYTPSFKKGAKLLHKPIVWHVNNATNKATYKPNTWCIRCLWSTKPVETSNSFDVLKSEDAQGMDNLACEDLKPVSEEVVENPTIQKDVLECNVKTTEVVGDIILKPANNSLKITEEVGHTDLMAAYVDNSSLTIKKPNELSRVLGLKTLATHGLAAVNSVPWDTIANYAKPFLNKVVSTTTNIVTRCLNRVCTNYMPYFFTLLLQLCTFTRSTNSRIKASMPTTIAKNTVKSVGKFCLEASFNYLKSPNFSKLINIIIWFLLLSVCLGSLIYSTAALGVLMSNLGMPSYCTGYREGYLNSTNVTIATYCTGSIPCSVCLSGLDSLDTYPSLETIQITISSFKWDLTAFGLVAEWFLAYILFTRFFYVLGLAAIMQLFFSYFAVHFISNSWLMWLIINLVQMAPISAMVRMYIFFASFYYVWKSYVHVVDGCNSSTCMMCYKRNRATRVECTTIVNGVRRSFYVYANGGKGFCKLHNWNCVNCDTFCAGSTFISDEVARDLSLQFKRPINPTDQSSYIVDSVTVKNGSIHLYFDKAGQKTYERHSLSHFVNLDNLRANNTKGSLPINVIVFDGKSKCEESSAKSASVYYSQLMCQPILLLDQALVSDVGDSAEVAVKMFDAYVNTFSSTFNVPMEKLKTLVATAEAELAKNVSLDNVLSTFISAARQGFVDSDVETKDVVECLKLSHQSDIEVTGDSCNNYMLTYNKVENMTPRDLGACIDCSARHINAQVAKSHNIALIWNVKDFMSLSEQLRKQIRSAAKKNNLPFKLTCATTRQVVNVVTTKIALKGG

SEQ ID NO: 16135 - protein, 1946 aa, Artificial Sequence
  SARS-CoV-2__MT704012.1__non-structural protein 3 (NSP3)
MAPTKVTFGDDTVIEVQGYKSVNITFELDERIDKVLNEKCSAYTVELGTEVNEFACVVADAVIKTLQPVSELLTPLGIDLDEWSMATYYLFDESGEFKLASHMYCSFYPPDEDEEEGDCEEEEFEPSTQYEYGTEDDYQGKPLEFGATSAALQPEEEQEEDWLDDDSQQTVGQQDGSEDNQTTTIQTIVEVQPQLEMELTPVVQTIEVNSFSGYLKLTDNVYIKNADIVEEAKKVKPTVVVNAANVYLKHGGGVAGALNKATNNAMQVESDDYIATNGPLKVGGSCVLSGHNLAKHCLHVVGPNVNKGEDIQLLKSAYENFNQHEVLLAPLLSAGIFGADPIHSLRVCVDTVRTNVYLAVFDKNLYDKLVSSFLEMKSEKQVEQKIAEIPKEEVKPFITESKPSVEQRKQDDKKIKACVEEVTTTLEETKFLTENLLLYIDINGNLHPDSATLVSDIDITFLKKDAPYIVGDVVQEGVLTAVVIPTKKAGGTTEMLAKALRKVPTDNYITTYPGQGLNGYTVEEAKTVLKKCKSAFYILPSIISNEKQEILGTVSWNLREMLAHAEETRKLMPVCVETKAIVSTIQRKYKGIKIQEGVVDYGARFYFYTSKTTVASLINTLNDLNETLVTMPLGYVTHGLNLEEAARYMRSLKVPATVSVSSPDAVTAYNGYLTSSSKTPEEHFIETISLAGSYKDWSYSGQSTQLGIEFLKRGDKSVYYTSNPTTFHLDGEVITFDNLKTLLSLREVRTIKVFTTVDNINLHTQVVDMSMTYGQQFGPTYLDGADVTKIKPHNSHEGKTFYVLPNDDTLRVEAFEYYHTTDPSFLGRYMSALNHTKKWKYPQVNGLTSIKWADNNCYLATALLTLQQIELKFNPPALQDAYYRARAGEAANFCALILAYCNKTVGELGDVRETMSYLFQHANLDSCKRVLNVVCKTCGQQQTTLKGVEAVMYMGTLSYEQFKKGVQIPCTCGKQATKYLVQQESPFVMMSAPPAQYELKHGTFTCASEYTGNYQCGHYKHITSKETLYCIDGALLTKSSEYKGPITDVFYKENSYTTTIKPVTYKLDGVVCTEIDPKLDNYYKKDNSYFTEQPIDLVPNQPYPNASFDNFKFVCDNIKFADDLNQLTGYKKPASRELKVTFFPDLNGDVVAIDYKHYTPSFKKGAKLLHKPIVWHVNNATNKATYKPNTWCIRCLWSTKPVETSNSFDVLKSEDAQGMDNLACEDLKPVSEEVVENPTIQKDVLECNVKTTEVVGDIILKPANNSLKITEEVGHTDLMAAYVDNSSLTIKKPNELSRVLGLKTLATHGLAAVNSVPWDTIANYAKPFLNKVVSTTTNIVTRCLNRVCTNYMPYFFTLLLQLCTFTRSTNSRIKASMPTTIAKNTVKSVGKFCLEASFNYLKSPNFSKLINIIIWFLLLSVCLGSLIYSTAALGVLMSNLGMPSYCTGYREGYLNSTNVTIATYCTGSIPCSVCLSGLDSLDTYPSLETIQITISSFKWDLTAFGLVAEWFLAYILFTRFFYVLGLAAIMQLFFSYFAVHFISNSWLMWLIINLVQMAPISAMVRMYIFFASFYYVWKSYVHVVDGCNSSTCMMCYKRNRATRVECTTIVNGVRRSFYVYANGGKGFCKLHNWNCVNCDTFCAGSTFISDEVARDLSLQFKRPINPTDQSSYIVDSVTVKNGSIHLYFDKAGQKTYERHSLSHFVNLDNLRANNTKGSLPINVIVFDGKSKCEESSAKSASVYYSQLMCQPILLLDQALVSDVGDSAEVAVKMFDAYVNTFSSTFNVPMEKLKTLVAIAEAELAKNVSLDNVLSTFISAARQGFVDSDVETKDVVECLKLSHQSDIEVTGDSCNNYMLTYNKVENMTPRDLGACIDCSARHINAQVAKSHNIALIWNVKDFMSLSEQLRKQIRSAAKKNNLPFKLTCATTRQVVNVVTTKIALKGG

SEQ ID NO: 16136 - protein, 1946 aa, Artificial Sequence
  SARS-CoV-2__MT704014.1__non-structural protein 3 (NSP3)
MAPTKVTFGDDTVIEVQGYKSVNITFELDERIDKVLNEKCSAYTVELGTEVNEFACVVADAVIKTLQPVSELLTPLGIDLDEWSMATYYLFDESGEFKLASHMYCSFYPPDEDEEEGDCEEEEFEPSTQYEYGTEDDYQGKPLEFGATSAALQPEEEQEEDWLDDDSQQTVGQQDGSEDNQTTTIQTIVEVQPQLEMELTPVVQTIEVNSFSGYLKLTDNVYIKNADIVEEAKKVKPTVVVNAANVYLKHGGGVAGALNKATNNAMQVESDDYIATNGPLKVGGSCVLSGHNLAKHCLHVVGPNVNKGEDIQLLKSAYENFNQHEVLLAPLLSAGIFGADPIHSLRVCVDTVRTNVYLAVFDKNLYDKLVSSFLEMKSEKQVEQKIAEIPKEEVKPFITESKPSVEQRKQDDKKIKACVEEVTTTLEETKFLTENLLLYIDINGNLHPDSATLVSDIDITFLKKDAPYIVGDVFQEGVLTAVVIPTKKAGGTTEMLAKALRKVPTDNYITTYPGQGLNGYTVEEAKTVLKKCKSAFYILPSIISNEKQEILGTVSWNLREMLAHAEETRKLMPVCVETKAIVSTIQRKYKGIKIQEGVVDYGARFYFYTSKTTVASLINTLNDLNETLVTMPLGYVTHGLNLEEAARYMRSLKVPATVSVSSPDAVTAYNGYLTSSSKTPEEHFIETISLAGSYKDWSYSGQSTQLGIEFLKRGDKSVYYTSNPTTFHLDGEVITFDNLKTLLSLREVRTIKVFTTVDNINLHTQVVDMSMTYGQQFGPTYLDGADVTKIKPHNSHEGKTFYVLPNDDTLRVEAFEYYHTTDPSFLGRYMSALNHTKKWKYPQVNGLTSIKWADNNCYLATALLTLQQIELKFNPPALQDAYYRARAGEAANFCALILAYCNKTVGELGDVRETMSYLFQHANLDSCKRVLNVVCKTCGQQQTTLKGVEAVMYMGTLSYEQFKKGVQIPCTCGKQATKYLVQQESPFVMMSAPPAQYELKHGTFTCASEYTGNYQCGHYKHITSKETLYCIDGALLTKSSEYKGPITDVFYKENSYTTTIKPVTYKLDGVVCTEIDPKLDNYYKKDNSYFTEQPIDLVPNQPYPNASFDNFKFVCDNIKFADDLNQLTGYKKPASRELKVTFFPDLNGDVVAIDYKHYTPSFKKGAKLLHKPIVWHVNNATNKATYKPNTWCIRCLWSTKPVETSNSFDVLKSEDAQGMDNLACEDLKPVSEEVVENPTIQKDVLECNVKTTEVVGDIILKPANNSLKITEEVGHTDLMAAYVDNSSLTIKKPNELSRVLGLKTLATHGLAAVNSVPWDTIANYAKPFLNKVVSTTTNIVTRCLNRVCTNYMPYFFTLLLQLCTFTRSTNSRIKASMPTTIAKNTVKSVGKFCLEASFNYLKSPNFSKLINIIIWFLLLSVCLGSLIYSTAALGVLMSNLGMPSYCTGYREGYLNSTNVTIATYCTGSIPCSVCLSGLDSLDTYPSLETIQITISSFKWDLTAFGLVAEWFLAYILFTRFFYVLGLAAIMQLFFSYFAVHFISNSWLMWLIINLVQMAPISAMVRMYIFFASFYYVWKSYVHVVDGCNSSTCMMCYKRNRATRVECTTIVNGVRRSFYVYANGGKGFCKLHNWNCVNCDTFCAGSTFISDEVARDLSLQFKRPINPTDQSSYIVDSVTVKNGSIHLYFDKAGQKTYERHSLSHFVNLDNLRANNTKGSLPINVIVFDGKSKCEESSAKSASVYYSQLMCQPILLLDQALVSDVGDSAEVAVKMFDAYVNTFSSTFNVPMEKLKTLVATAEAELAKNVSLDNVLSTFISAARQGFVDSDVETKDVVECLKLSHQSDIEVTGDSCNNYMLTYNKVENMTPRDLGACIDCSARHINAQVAKSHNIALIWNVKDFMSLSEQLRKQIRSAAKKNNLPFKLTCATTRQVVNVVTTKIALKGG

SEQ ID NO: 16137 - protein, 1946 aa, Artificial Sequence
  SARS-CoV-2__MT704041.1__non-structural protein 3 (NSP3)
MAPTKVTFGDDTVIEVQGYKSVNITFELDERIDKVLNEKCSAYTVELGTEVNEFACVVADAVIKTLQPVSELLTPLGIDLDEWSMATYYLFDESGEFKLASHMYCSFYPPDEDEEEGDCEEEEFEPSTQYEYGTEDDYQGKPLEFGATSAALQPEEEQEEDWLDDDSQQTVGQQDGSEDNQTTTIQTIVEVQPQLEMELTPVVQTIEVNSFSGYLKLTDNVYIKNADIVEEAKKVKPTVVVNAANVYLKHGGGVAGALNKATNNAMQVESDDYIATNGPLKVGGSCVLSGHNLAKHCLHVVGPNVNKGEDIQLLKSAYENFNQHEVLLAPLLSAGIFGADPIHSLRVCVDTVRTNVYLAVFDKNLYDKLVSSFLEMKSEKQVEQKIAEIPKEEVKPFITESKPSVEQRKQDDKKIKACVEEVTTTLEETKFLTENLLLYIDINGNLHPDSATLVSDIDITFLKKDAPYIVGDVVQEGVLTAVVIPTKKAGGTTEMLAKALRKVPTDNYITTYPGQGLNGYTVEEAKTVLKKCKSAFYILPSIISNEKQEILGTVSWNLREMLAHAEETRKLMPVCVETKAIVSTIQRKYKGIKIQEGVVDYGARFYFYTSKTTVASLINTLNDLNETLVTMPLGYVTHGLNLEEAARYMRSLKVPATVSVSSPDAVTAYNGYLTSSSKTPEEHFIETISLAGSYKDWSYSGQSTQLGIEFLKRGDKSVYYTSNPTTFHLDGEVITFDNLKTLLSLREVRTIKVFTTVDNINLHTQVVDMSMTYGQQFGPTYLDGADVTKIKPHNSHEGKTFYVLPNDDTLRVEAFEYYHTTDPSFLGRYMSALNHTKKWKYPQVNGLTSIKWADNNCYLATALLTLQQIELKFNPPALQDAYYRARAGEAANFCALILAYCNKTVGELGDVRETMSYLFQHANLDSCKRVLNVVCKTCGQQQTTLKGVEAVMYMGTLSYEQFKKGVQIPCTCGKQATKYLVQQESPFVMMSAPPAQYELKHGTFTCASEYTGNYQCGHYKHITSKETLYCIDGALLTKSSEYKGPITDVFYKENSYTTTIKPVTYKLDGVVCTEIDPKLDNYYKKDNSYFTEQPIDLVPNQPYPNASFDNFKFVCDNIKFADDLNQLTGYKKPASRELKVTFFPDLNGDVVAIDYKHYTPSFKKGAKLLHKPIVWHVNNATNKATYKPNTWCIRCLWSTKPVETSNSFDVLKSEDAQGMDNLACEDLKPVSEEVVENPTIQKDVLECNVKTTEVVGDIILKPANNSLKITEEVGHTDLMAAYVDNSSLTIKKPNELSRVLGLKTLATHGLAAVNSVPWDTIANYAKPFLNKVVSTTTNIVTRCLNRVCTNYMPYFFTLLLQLCTFTRSTNSRIKASMPTTIAKNTVKSVGKFCLEASFNYLKSPNFSKLINIIIWFLLLSVCLGSLIYSTAALGVLMSNLGMPSYCTGYREGYLNSTNVTIATYCTGSIPCSVCLSGLDSLDTYPSLETIQITISSFKWDLTAFGLVAEWFLAYILFTRFFYVLGLAAIMQLFFSYFAVHFISNSWLMWLIINLVQMAPISAMVRMYIFFASFYYVWKSYVHVVDGCNSSTCMMCYKRNRATRVECTTIVNGVRRSFYVYANGGKGFCKLHNWNCVNCDTFCAGSTFISDEVARDLSLQFKRPINPTDQSSYIVDSVTVKNGSIHLYFDKAGQKTYERHSLSHFVNLDNLRANNTKGSLPINVIVFDGKSKCEESSAKSASVYYSQLMCQPILLLDQALVSDVGDSAEVVVKMFDAYVNTFSSTFNVPMEKLKTLVATAEAELAKNVSLDNVLSTFISAARQGFVDSDVETKDVVECLKLSHQSDIEVTGDSCNNYMLTYNKVENMTPRDLGACIDCSARHINAQVAKSHNIALIWNVKDFMSLSEQLRKQIRSAAKKNNLPFKLTCATTRQVVNVVTTKIALKGG

SEQ ID NO: 16138 - protein, 1946 aa, Artificial Sequence
  SARS-CoV-2__MT704066.1__non-structural protein 3 (NSP3)
MAPTKVTFGDDTVIEVQGYKSVNITFELDERIDKVLNEKCSAYTVELGTEVNEFACVVADAVIKTLQPVSELLTPLGIDLDEWSMATYYLFDESGEFKLASHMYCSFYPPDEDEEEGDCEEEEFEPSTQYEYGTEDDYQGKPLEFGATSAALQPEEEQEEDWLDDDSQQTVGQQDGSEDNQTTTIQTIVEVQPQLEMELTPVVQTIEVNSFSGYLKLTDNVYIKNADIVEEAKKVKPTVVVNAANVYLKHGGGVAGALNKATNNAMQVESDDYIATNGPLKVGGSCVLSGHNLAKHCLHVVGPNVNKGEDIQLLKSAYENFNQHEVLLAPLLSAGIFGADPIHSLRVCVDTVRTNVYLAVFDKNLYDKLVSSFLEMKSEKQVEQKIAEIPKEEVKPFITESKPSVEQRKQDDKKIKACVEEVTTTLEETKFLTENLLLYIDINGNLHPDSATLVSDIDITFLKKDAPYMVGDVVQEGVLTAVVIPTKKAGGTTEMLAKALRKVPTDNYITTYPGQGLNGYTVEEAKTVLKKCKSAFYILPSIISNEKQEILGTVSWNLREMLAHAEETRKLMPVCVETKAIVSTIQRKYKGIKIQEGVVDYGARFYFYTSKTTVASLINTLNDLNETLVTMPLGYVTHGLNLEEAARYMRSLKVPATVSVSSPDAVTAYNGYLTSSSKTPEEHFIETISLAGSYKDWSYSGQSTQLGIEFLKRGDKSVYYTSNPTTFHLDGEVITFDNLKTLLSLREVRTIKVFTTVDNINLHTQVVDMSMTYGQQFGPTYLDGADVTKIKPHNSHEGKTFYVLPNDDTLRVEAFEYYHTTDPSFLGRYMSALNHTKKWKYPQVNGLTSIKWADNNCYLATALLTLQQIELKFNPPALQDAYYRARAGEAANFCALILAYCNKTVGELGDVRETMSYLFQHANLDSCKRVLNVVCKTCGQQQTTLKGVEAVMYMGTLSYEQFKKGVQIPCTCGKQATKYLVQQESPFVMMSAPPAQYELKHGTFTCASEYTGNYQCGHYKHITSKETLYCIDGALLTKSSEYKGPITDVFYKENSYTTTIKPVTYKLDGVVCTEIDPKLDNYYKKDNSYFTEQPIDLVPNQPYPNASFDNFKFVCDNIKFADDLNQLTGYKKPASRELKVTFFPDLNGDVVAIDYKHYTPSFKKGAKLLHKPIVWHVNNATNKATYKPNTWCIRCLWSTKPVETSNSFDVLKSEDAQGMDNLACEDLKPVSEEVVENPTIQKDVLECNVKTTEVVGDIILKPANNSLKITEEVGHTDLMAAYVDNSSLTIKKPNELSRVLGLKTLATHGLAAVNSVPWDTIANYAKPFLNKVVSTTTNIVTRCLNRVCTNYMPYFFTLLLQLCTFTRSTNSRIKASMPTTIAKNTVKSVGKFCLEASFNYLKSPNFSKLINIIIWFLLLSVCLGSLIYSTAALGVLMSNLGMPSYCTGYREGYLNSTNVTIATYCTGSIPCSVCLSGLDSLDTYPSLETIQITISSFKWDLTAFGLVAEWFLAYILFTRFFYVLGLAAIMQLFFSYFAVHFISNSWLMWLIINLVQMAPISAMVRMYIFFASFYYVWKSYVHVVDGCNSSTCMMCYKRNRATRVECTTIVNGVRRSFYVYANGGKGFCKLHNWNCVNCDTFCAGSTFISDEVARDLSLQFKRPINPTDQSSYIVDSVTVKNGSIHLYFDKAGQKTYERHSLSHFVNLDNLRANNTKGSLPINVIVFDGKSKCEESSAKSASVYYSQLMCQPILLLDQALVSDVGDSAEVAVKMFDAYVNTFSSTFNVPMEKLKTLVATAEAELAKNVSLDNVLSTFISAARQGFVDSDVETKDVVECLKLSHQSDIEVTGDSCNNYMLTYNKVENMTPRDLGACIDCSARHINAQVAKSHNIALIWNVKDFMSLSEQLRKQIRSAAKKNNLPFKLTCATTRQVVNVVTTKIALKGG

SEQ ID NO: 16139 - protein, 1946 aa, Artificial Sequence
  SARS-CoV-2__MT704088.1__non-structural protein 3 (NSP3)
MAPTKVTFGDDTVIEVQGYKSVNITFELDERIDKVLNEKCSAYTVELGTEVNEFACVVADAVIKTLQPVSELLTPLGIDLDEWSMATYYLFDESGEFKLASHMYCSFYPPDEDEEEGDCEEEEFEPSTQYEYGTEDDYQGKPLEFGATSAALQPEEEQEEDWLDDDSQQTVGQQDGSEDNQTTTIQTIVEVQPQLEMELTPVVQTIEVNSFSGYLKLTDNVYIKNADIVEEAKKVKPTVVVNAANVYLKHGGGVAGALNKATNNAMQVESDDYIATNGPLKVGGSCVLSGHNLAKHCLHVVGPNVNKGEDIQLLKSAYENFNQHEVLLAPLLSAGIFGADPIHSLRVCVDTVRTNVYLAVFDKNLYDKLVSSFLEMKSEKQVEQKIAEIPKEEVKPFITESKPSVEQRKQDDKKIKACVEEVTTTLEETKFLTENLLLYIDINGNLHPDSATLVSDIDITFLKKDAPYIVGDVVQEGVLTAVVIPTKKAGGTTEMLAKALRKVPTDNYITTYPGQGLNGYTVEEAKTVLKKCKSAFYILPSIISNEKQEILGTVSWNLREMLAHAEETRKLMPVCVETKAIVSTIQRKYKGIKIQEGVVDYGARFYFYTSKTTVASLINTLNDLNETLVTMPLGYVTHGLNLEEAARYMRSLKVPATVSVSSPDAVTAYNGYLTSSSKTPEEHFIETISLAGSYKDWSYSGQSTQLGIEFLKRGDKSVYYTSNPTTFHLDGEVITFDNLKTLLSLREVRTIKVFTTVDNINLHTQVVDMSMTYGQQFGPTYLDGADVTKIKPHNSHEGKTFYVLPNDDTLRVEAFEYYHTTDSSFLGRYMSALNHTKKWKYPQVNGLTSIKWADNNCYLATALLTLQQIELKFNPPALQDAYYRARAGEAANFCALILAYCNKTVGELGDVRETMSYLFQHANLDSCKRVLNVVCKTCGQQQTTLKGVEAVMYMGTLSYEQFKKGVQIPCTCGKQATKYLVQQESPFVMMSAPPAQYELKHGTFTCASEYTGNYQCGHYKHITSKETLYCIDGALLTKSSEYKGPITDVFYKENSYTTTIKPVTYKLDGVVCTEIDPKLDNYYKKDNSYFTEQPIDLVPNQPYPNASFDNFKFVCDNIKFADDLNQLTGYKKPASRELKVTFFPDLNGDVVAIDYKHYTPSFKKGAKLLHKPIVWHVNNATNKATYKPNTWCIRCLWSTKPVETSNSFDVLKSEDAQGMDNLACEDLKPVSEEVVENPTIQKDVLECNVKTTEVVGDIILKPANNSLKITEEVGHTDLMAAYVDNSSLTIKKPNELSRVLGLKTLATHGLAAVNSVPWDTIANYAKPFLNKVVSTTTNIVTRCLNRVCTNYMPYFFTLLLQLCTFTRSTNSRIKASMPTTIAKNTVKSVGKFCLEASFNYLKSPNFSKLINIIIWFLLLSVCLGSLLYSTAALGVLMSNLGMPSYCTGYREGYLNSTNVTIATYCTGSIPCSVCLSGLDSLDTYPSLETIQITISSFKWDLTAFGLVAEWFLAYILFTRFFYVLGLAAIMQLFFSYFAVHFISNSWLMWLIINLVQMAPISAMVRMYIFFASFYYVWKSYVHVVDGCNSSTCMMCYKRNRATRVECTTIVNGVRRSFYVYANGGKGFCKLHNWNCVNCDTFCAGSTFISDEVARDLSLQFKRPINPTDQSSYIVDSVTVKNGSIHLYFDKAGQKTYERHSLSHFVNLDNLRANNTKGSLPINVIVFDGKSKCEESSAKSASVYYSQLMCQPILLLDQALVSDVGDSAEVAVKMFDAYVNTFSSTFNVPMEKLKTLVATAEAELAKNVSLDNVLSTFISAARQGFVDSDVETKDVVECLKLSHQSDIEVTGDSCNNYMLTYNKVENMTPRDLGACIDCSARHINAQVAKSHNIALIWNVKDFMSLSEQLRKQIRSAAKKNNLPFKLTCATTRQVVNVVTTKIALKGG

SEQ ID NO: 16140 - protein, 1946 aa, Artificial Sequence
  SARS-CoV-2__MT704100.1__non-structural protein 3 (NSP3)
MAPTKVTFGDDTVIEVQGYKSVNITFELDERIDKVLNEKCSAYTVELGTEVNEFACVVADAVIKTLQPVSELLTPLGIDLDEWSMATYYLFDESGEFKLASHMYCSFYPPDEDEEEGDCEEEEFEPSTQYEYGTEDDYQGKPLEFGATSAALQPEEEQEEDWLDDDSQQTVGQQDGSEDNQTTTIQTIVEVQPQLEMELTPVVQTIEVNSFSGYLKLTDNVYIKNADIVEEAKKVKPTVVVNAANVYLKHGGGVAGALNKATNNAMQVESDDYIATNGPLKVGGSCVLSGHNLAKHCLHVVGPNVNKGEDIQLLKSAYENFNQHEVLLAPLLSAGIFGADPIHSLRVCVDTVRTNVYLAVFDKNLYDKLVSSFLEMKSEKQVEQKIAEIPKEEVKPFITESKPSVEQRKQDDKKIKACVEEVTTTLEETKFLTENLLLYIDINGNLHPDSATLVSDIDITFLKKDAPYIVGDVVQEGVLTAVVIPTKKAGGTTEMLAKALRKVPTDNYITTYPGQGLNGYTVEEAKTVLKKCKSAFYILPSIISNEKQEILGTVSWNLREMLAHAEETRKLMPVCVETKAIVSTIQRKYKGIKIQEGVVDYGARFYFYTSKTTVASLINTLNDLNETLVTMPLGYVTHGLNLEEAARYMRSLKVPATVSVSSPDAVTAYNGYLTSSSKTPEEHFIETISLAGSYKDWSYSGQSTQLGIEFLKRGDKSVYYTSNPTTFHLDGEVITFDNLKTLLSLREVRTIKVFTTVDNINLHTQVVDMSMTYGQQFGPTYLDGADVTKIKPHNSHEGKTFYVLPNDDTLRVEAFEYYHTTDPSFLGRYMSALNHTKKWKYPQVNGLTSIKWADNNCYLATALLTLQQIELKFNPPALQDAYYRARAGEAANFCALILAYCNKTVGELGDVRETMSYLFQHANLDSCKRVLNVVCKTCGQQQTTLKGVEAVMYMGTLSYEQFKKGVQIPCTCGKQATKYLVQQESPFVMMSAPPAQYELKHGTFTCASEYTGNYQCGHYKHITSKETLYCIDGALLTKSSEYKGPITDVFYKENSYTTTIKPVTYKLDGVVCTEIDPKLDNYYKKDNSYFTEQPIDLVPNQPYPNASFDNFKFVCDNIKFADDLNQLTGYKKPASRELKVTFFPDLNGDVVAIDYKHYTPSFKKGAKLLHKPIVWHVNNATNKATYKPNTWCIRCLWSTKPVETSNSFDVLKSEDAQGMDNLACEDLKPVSEEVVENPTIQKDVLECNVKTTEVVGDIILKPANNSLKITEEVGHTDLMAAYVDNSSLTIKKPNELSRVLGLKTLATHGLAAVNSVPWDTIANYAKPFLNKVVSTTTNIVTRCLNRVCTNYMPYFFTLLLQLCTFTRSTNSRIKASMPTTIAKNTVKSVGKFCLEASFNYLKSPNFSKLINIIIWFLLLSVCLGSLIYSTAALGVLMSNLGMPSYCTGYREGYLNSTNVTIATYCTGSIPCSVCLSGLDSLDTYPSLETIQITISSFKWDLTAFGLVAEWFLAYILFTRFFYVLGLAAIMQLFFSYFAVHFISNSWLMWLIINLVQMAPISAMVRMYIFFASFYYVWKSYVHVVDGCNSSTCMMCYKRNRATRVECTTIVNGVRRSFYVYANGGKGFCKLHNWNCVNCDTFCAGSTFISDEVARDLSLQFKRPINPTDQSSYIVDSVTVKNGSIHLYFDKAGQKTYERHSLSHFVNLDNLRANNTKGSLPINVIVFDGKSKCEESSAKSASVYYSQLMCQPILLLDQALVSDVGDSAEVAVKMFDAYVNTFSSTFNVPMEKLKTLVATAEAELAKNVSLDNVLSTFISAARQGFVDSDVETKDVVECLKLSHQSDIEVTGDSCNNYMLTYNKVENMTPRDLGACIDCSARHINTQVAKSHNIALIWNVKDFMSLSEQLRKQIRSAAKKNNLPFKLTCATTRQVVNVVTTKIALKGG

SEQ ID NO: 16141 - protein, 1946 aa, Artificial Sequence
  SARS-CoV-2__MT683408.1__non-structural protein 3 (NSP3)
MAPTKVTFGDDTVIEVQGYKSVNITFELDERIDKVLNEKCSAYTVELGTEVNEFACVVADAVIKTLQPVSELLTPLGIDLDEWSMATYYLFDESGEFKLASHMYCSFYPPDEDEEEGDCEEEEFEPSTQYEYGTEDDYQGKPLEFGATSAALQPEEEQEEDWLDDDSQQTVGQQDGSEDNQTTTIQTIVEVQPQLEMELTPVVQTIEVNSFSGYLKLTDNVYIKNADIVEEAKKVKPTVVVNAANVYLKHGGGVAGALNKATNNAMQVESDDYIATNGPLKVGGSCVLSGHNLAKHCLHVVGPNVNKGEDIQLLKSAYENFNQHEVLLAPLLSAGIFGADPIHSLRVCVDTVRTNVYLAVFDKNLYDKLVSSFLEMKSEKQVEQKIAEIPKEEVKPFITESKPSVEQRKQDDKKIKACVEEVTTTLEETKFLTENLLLYIDINGNLHPDSATLVSDIDITFLKKDAPYIVGDVVQEGVLTAVVIPTKKAGGTTEMLAKALRKVPTDNYITTYPGQGLNGYTVEEAKTVLKKCKSAFYILPSIISNEKQEILGTVSWNLREMLAHAEETRKLMPVCVETKAIVSTIQRKYKGIKIQEGVVDYGARFYFYTSKTTVASLINTLNDLNETLVTMPLGYVTHGLNLEEAARYMRSLKVPATVSVSSPDAVTAYNGYLTSSSKTPEEHFIETISLAGSYKDWSYSGQSTQLGIEFLKRGDKSVYYTSNPTTFHLDGEVITFDNLKTLLSLREVRTIKVFTTVDNINLHTQVVDMSMTYGQQFGPTYLDGADVTKIKPHNSHEGKTFYVLPNDDTLRVEAFEYYHTTDPSFLGRYMSALNHTKKWKYPQVNGLTSIKWADNNCYLATALLTLQQIELKFNPPALQDAYYRARAGEAANFCALILAYCNKTVGELGDVRETMSYLFQHANLDSCKRVLNVVCKTCGQQQTTLKGVEAVMYMGTLSYEQFKKGVQIPCTCGKQATKYLVQQESPFVMMSAPPAQYELKHGTFTCASEYTGNYQCGHYKHITSKETLYCIDGALLTKSSEYKGPITDVFYKENSYTTTIKPVTYKLDGVVCTEIDPKLDNYYKKDNSYFTEQPIDLVPNQPYPNASFDNFKFVCDNIKFADDLNQLTGYKKPASRELKVTFFPDLNGDVVAIDYKHYTPSFKKGAKLLHKPIVWHVNNATNKATYKPNTWCIRCLWSTKPVETSNSFDVLKSEDAQGMDNLACEDLKPVSEEVVENPTIQKDVLECNVKTTEVVGDIILKPANNSLKITEEVGHTDLMAAYVDNSSLTIKKPNELSRVLGLKTLATHGLAAVNSVPWDTIANYARPFLNKVVSTTTNIVTRCLNRVCTNYMPYFFTLLLQLCTFTRSTNSRIKASMPTTIAKNTVKSVGKFCLEASFNYLKSPNFSKLINIIIWFLLLSVCLGSLIYSTAALGVLMSNLGMPSYCTGYREGYLNSTNVTIATYCTGSIPCSVCLSGLDSLDTYPSLETIQITISSFKWDLTAFGLVAEWFLAYILFTRFFYVLGLAAIMQLFFSYFAVHFISNSWLMWLIINLVQMAPISAMVRMYIFFASFYYVWKSYVHVVDGCNSSTCMMCYKRNRATRVECTTIVNGVRRSFYVYANGGKGFCKLHNWNCVNCDTFCAGSTFISDEVARDLSLQFKRPINPTDQSSYIVDSVTVKNGSIHLYFDKAGQKTYERHSLSHFVNLDNLRANNTKGSLPINVIVFDGKSKCEESSAKSASVYYSQLMCQPILLLDQALVSDVGDSAEVAVKMFDAYVNTFSSTFNVPMEKLKTLVATAEAELAKNVSLDNVLSTFISAARQGFVDSDVETKDVVECLKLSHQSDIEVTGDSCNNYMLTYNKVENMTPRDLGACIDCSARHINAQVAKSHNIALIWNVKDFMSLSEQLRKQIRSAAKKNNLPFKLTCATTRQVVNVVTTKIALKGG

SEQ ID NO: 16142 - protein, 1946 aa, Artificial Sequence
  SARS-CoV-2__MT627391.1__non-structural protein 3 (NSP3)
MAPTKVTFGDDTVIEVQGYKSVNITFELDERIDKVLNEKCSAYTVELGTEVNEFACVVADAVIKTLQPVSELLTPLGIDLDEWSMATYYLFDESGEFKLASHMYCSFYPPDEDEEEGDCEEEEFEPSTQYEYGTEDDYQGKPLEFGATSAALQPEEEQEEDWLDDDSQQTVGQQDGSEDNQTTTIQTIVEVQPQLEMELTPVVQTIEVNSFSGYLKLTDNVYIKNADIVEEAKKVKPTVVVNAANVYLKHGGGVAGALNKATNNAMQVESDDYIATNGPLKVGGSCVLSGHNLAKHCLHVVGPNVNKGEDIQLLKSAYENFNQHEVLLAPLLSAGIFGADPIHSLRVCVDTVRTNVYLAVFDKNLYDKLVSSFLEMKSEKQVEQKIAEIPKEEVKPFITESKPSVEQRKQDDKKIKACVEEVTTTLEETKFLTENLLLYIDINGNLHPDSATLVSDIDITFLKKDAPYIVGDVVQEGVLTAVVIPTKKAGGTTEMLAKALRKVPTDNYITTYPGQGLNGYTVEEAKTVLKKCKSAFYILPSIISNDKQEILGTVSWNLREMLAHAEETRKLMPVCVETKAIVSTIQRKYKGIKIQEGVVDYGARFYFYTSKTTVASLINTLNDLNETLVTMPLGYVTHGLNLEEAARYMRSLKVPATVSVSSPDAVTAYNGYLTSSSKTPEEHFIETISLAGSYKDWSYSGQSTQLGIEFLKRGDKSVYYTSNPTTFHLDGEVITFDNLKTLLSLREVRTIKVFTTVDNINLHTQVVDMSMTYGQQFGPTYLDGADVTKIKPHNSHEGKTFYVLPNDDTLRVEAFEYYHTTDPSFLGRYMSALNHTKKWKYPQVNGLTSIKWADNNCYLATALLTLQQIELKFNPPALQDAYYRARAGEAANFCALILAYCNKTVGELGDVRETMSYLFQHANLDSCKRVLNVVCKTCGQQQTTLKGVEAVMYMGTLSYEQFKKGVQIPCTCGKQATKYLVQQESPFVMMSAPPAQYELKHGTFTCASEYTGNYQCGHYKHITSKETLYCIDGALLTKSSEYKGPITDVFYKENSYTTTIKPVTYKLDGVVCTEIDPKLDNYYKKDNSYFTEQPIDLVPNQPYPNASFDNFKFVCDNIKFADDLNQLTGYKKPASRELKVTFFPDLNGDVVAIDYKHYTPSFKKGAKLLHKPIVWHVNNATNKATYKPNTWCIRCLWSTKPVETSNSFDVLKSEDAQGMDNLACEDLKPVSEEVVENPTIQKDVLECNVKTTEVVGDIILKPANNSLKITEEVGHTDLMAAYVDNSSLTIKKPNELSRVLGLKTLATHGLAAVNSVPWDTIANYAKPFLNKVVSTTTNIVTRCLNRVCTNYMPYFFTLLLQLCTFTRSTNSRIKASMPTTIAKNTVKSVGKFCLEASFNYLKSPNFSKLINIIIWFLLLSVCLGSLIYSTAALGVLMSNLGMPSYCTGYREGYLNSTNVTIATYCTGSIPCSVCLSGLDSLDTYPSLETIQITISSFKWDLTAFGLVAEWFLAYILFTRFFYVLGLAAIMQLFFSYFAVHFISNSWLMWLIINLVQMAPISAMVRMYIFFASFYYVWKSYVHVVDGCNSSTCMMCYKRNRATRVECTTIVNGVRRSFYVYANGGKGFCKLHNWNCVNCDTFCAGSTFISDEVARDLSLQFKRPINPTDQSSYIVDSVTVKNGSIHLYFDKAGQKTYERHSLSHFVNLDNLRANNTKGSLPINVIVFDGKSKCEESSAKSASVYYSQLMCQPILLLDQALVSDVGDSAEVAVKMFDAYVNTFSSTFNVPMEKLKTLVATAEAELAKNVSLDNVLSTFISAARQGFVDSDVETKDVVECLKLSHQSDIEVTGDSCNNYMLTYNKVENMTPRDLGACIDCSARHINAQVAKSHNIALIWNVKDFMSLSEQLRKQIRSAAKKNNLPFKLTCATTRQVVNVVTTKIALKGG

SEQ ID NO: 16143 - protein, 1946 aa, Artificial Sequence
  SARS-CoV-2__MT627395.1__non-structural protein 3 (NSP3)
MAPTKVTFGDDTVIEVQGYKSVNITFELDERIDKVLNEKCSAYTVELGTEVNEFACVVADAVIKTLQPVSELLTLLGIDLDEWSMATYYLFDESGEFKLASHMYCSFYPPDEDEEEGDCEEEEFEPSTQYEYGTEDDYQGKPLEFGATSAALQPEEEQEEDWLDDDSQQTVGQQDGSEDNQTTTIQTIVEVQPQLEMELTPVVQTIEVNSFSGYLKLTDNVYIKNADIVEEAKKVKPTVVVNAANVYLKHGGGVAGALNKATNNAMQVESDDYIATNGPLKVGGSCVLSGHNLAKHCLHVVGPNVNKGEDIQLLKSAYENFNQHEVLLAPLLSAGIFGADPIHSLRVCVDTVRTNVYLAVFDKNLYDKLVSSFLEMKSEKQVEQKIAEIPKEEVKPFITESKPSVEQRKQDDKKIKACVEEVTTTLEETKFLTENLLLYIDINGNLHPDSATLVSDIDITFLKKDAPYIVGDVVQEGVLTAVVIPTKKAGGTTEMLAKALRKVPTDNYITTYPGQGLNGYTVEEAKTVLKKCKSAFYILPSIISNEKQEILGTVSWNLREMLAHAEETRKLMPVCVETKAIVSTIQRKYKGIKIQEGVVDYGARFYFYTSKTTVASLINTLNDLNETLVTMPLGYVTHGLNLEEAARYMRSLKVPATVSVSSPDAVTAYNGYLTSSSKTPEEHFIETISLAGSYKDWSYSGQSTQLGIEFLKRGDKSVYYTSNPTTFHLDGEVITFDNLKTLLSLREVRTIKVFTTVDNINLHTQVVDMSMTYGQQFGPTYLDGADVTKIKPHNSHEGKTFYVLPNDDTLRVEAFEYYHTTDPSFLGRYMSALNHTKKWKYPQVNGLTSIKWADNNCYLATALLTLQQIELKFNPPALQDAYYRARAGEAANFCALILAYCNKTVGELGDVRETMSYLFQHANLDSCKRVLNVVCKTCGQQQTTLKGVEAVMYMGTLSYEQFKKGVQIPCTCGKQATKYLVQQESPFVMMSAPPAQYELKHGTFTCASEYTGNYQCGHYKHITSKETLYCIDGALLTKSSEYKGPITDVFYKENSYTTTIKPVTYKLDGVVCTEIDPKLDNYYKKDNSYFTEQPIDLVPNQPYPNASFDNFKFVCDNIKFADDLNQLTGYKKPASRELKVTFFPDLNGDVVAIDYKHYTPSFKKGAKLLHKPIVWHVNNATNKATYKPNTWCIRCLWSTKPVETSNSFDVLKSEDAQGMDNLACEDLKPVSEEVVENPTIQKDVLECNVKTTEVVGDIILKPANNSLKITEEVGHTDLMAAYVDNSSLTIKKPNELSRVLGLKTLATHGLAAVNSVPWDTIANYAKPFLNKVVSTTTNIVTRCLNRVCTNYMPYFFTLLLQLCTFTRSTNSRIKASMPTTIAKNTVKSVGKFCLEASFNYLKSPNFSKLINIIIWFLLLSVCLGSLIYSTAALGVLMSNLGMPSYCTGYREGYLNSTNVTIATYCIGSIPCSVCLSGLDSLDTYPSLETIQITISSFKWDLTAFGLVAEWFLAYILFTRFFYVLGLAAIMQLFFSYFAVHFISNSWLMWLIINLVQMAPISAMVRMYIFFASFYYVWKSYVHVVDGCNSSTCMMCYKRNRATRVECTTIVNGVRRSFYVYANGGKGFCKLHNWNCVNCDTFCAGSTFISDEVARDLSLQFKRPINPTDQSSYIVDSVTVKNGSIHLYFDKAGQKTYERHSLSHFVNLDNLRANNTKGSLPINVIVFDGKSKCEESSAKSASVYYSQLMCQPILLLDQALVSDVGDSAEVAVKMFDAYVNTFSSTFNVPMEKLKTLVATAEAELAKNVSLDNVLSTFISAARQGFVDSDVETKDVVECLKLSHQSDIEVTGDSCNNYMLTYNKVENMTPRDLGACIDCSARHINAQVAKSHNIALIWNVKDFMSLSEQLRKQIRSAAKKNNLPFKLTCATTRQVVNVVTTKIALKGG

SEQ ID NO: 16144 - protein, 1946 aa, Artificial Sequence
  SARS-CoV-2__MT678839.1__non-structural protein 3 (NSP3)
MAPTKVTFGDDTVIEVQGYKSVNITFELDERIDKVLNEKCSAYTVELGTEVNEFACVVADAVIKTLQPVSELLTPLGIDLDEWSMATYYLFDESGEFKLASHMYCSFYPPDEDEEEGDCEEEEFEPSTQYEYGTEDDYQGKPLEFGATSAALQPEEEQEEDWLDDDSQQTVGQQDGSEDNQTTTIQTIVEVQPQLEMELTPVVQTIEVNSFSGYLKLTDNVYIKNADIVEEAKKVKPTVVVNAANVYLKHGGGVAGALNKATNNAMQVESDDYIATNGPLKVGGSCVLSGHNLAKHCLHVVGPNVNKGEDIQLLKSAYENFNQHEVLLAPLLSAGIFGADPIHSLRVCVDTVRTNVYLAVFDKNLYNKLVSSFLEMKSEKQVEQKIAEIPKEEVKPFITESKPSVEQRKQDDKKIKACVEEVTTTLEETKFLTENLLLYIDINGNLHPDSATLVSDIDITFLKKDAPYIVGDVVQEGVLTAVVIPTKKAGGTTEMLAKALRKVPTDNYITTYPGQGLNGYTVEEAKTVLKKCKSAFYILPSIISNEKQEILGTVSWNLREMLAHAEETRKLMPVCVETKAIVSTIQRKYKGIKIQEGVVDYGARFYFYTSKTTVASLINTLNDLNETLVTMPLGYVTHGLNLEEAARYMRSLKVPATVSVSSPDAVTAYNGYLTSSSKTPEEHFIETISLAGSYKDWSYSGQSTQLGIEFLKRGDKSVYYTSNPTTFHLDGEVITFDNLKTLLSLREVRTIKVFTTVDNINLHTQVVGMSMTYGQQFGPTYFDGADVTKIKPHNSHEGKTFYVLPNDDTLRVEAFEYYHTTDPSFLGRYMSALNHTKKWKYPQVNGLTSIKWADNNCYLATALLTLQQIELKFNPPALQDAYYRARAGEAANFCALILAYCNKTVGELGDVRETMSYLFQHANLDSCKRVLNVVCKTCGQQQTTLKGVEAVMYMGTLSYEQFKKGVQIPCTCGKQATKYLVQQESPFVMMSAPPAQYELKHGTFTCASEYTGNYQCGHYKHITSKETLYCIDGALLTKSSEYKGPITDVFYKENSYTTTIKPVTYKLDGVVCTEIDPKLDNYYKKDNSYFTEQPIDLVPNQPYPSASFDNFKFVCDNIKFADDLNQLTGYKKPASRELKVTFFPDLNGDVVAIDYKHYTPSFKKGAKLLHKPIVWHVNNATNKATYKPNTWCIRCLWSTKPVETSNSFDVLKSEDAQGMDNLACEDLKPVSEEVVENPTIQKDVLECNVKTTEVVGDIILKPANNSLKITEEVGHTDLMAAYVDNSSLTIKKPNELSRVLGLKTLATHGLAAVNSVPWDTIANYAKPFLNKVVSTTTNIVTRCLNRVCTNYMPYFFTLLLQLCTFTRSTNSRIKASMPTTIAKNTVKSVGKFCLEASFNYLKSPNFSKLINIIIWFLLLSVCLGSLIYSTAALGVLMSNLGMPSYCTGYREGYLNSTNVTIATYCTGSIPCSVCLSGLDSLDTYPSLETIQITISSFKWDLTAFGLVAEWFLAYILFTRFFYVLGLAAIMQLFFSYFAVHFISNSWLMWLIINLAQMAPISAMVRMYIFFASFYYVWKSYVHVVDGCNSSTCMMCYKRNRATRVECTTIVNGVRRSFYVYANGGKGFCKLHNWNCVNCDTFCAGSTFISDEVARDLSLQFKRPINPTDQSSYIVDSVTVKNGSIHLYFDKAGQKTYERHSLSHFVNLDNLRANNTKGSLPINVIVFDGKSKCEESSAKSASVYYSQLMCQPILLLDQALVSDVGDSAEVAVKMFDAYVNTFSSTFNVPMEKLKTLVATAEAELAKNVSLDNVLSTFISAARQGFVDSDVETKDVVECLKLSHQSDIEVTGDSCNNYMLTYNKVENMTPRDLGACIDCSARHINAQVAKSHNIALIWNVKDFMSLSEQPRKQIRSAAKKNNLPFKLTCATTRQVVNAVTTKIALKGG

SEQ ID NO: 16145 - protein, 1946 aa, Artificial Sequence
  SARS-CoV-2__MT679161.1__non-structural protein 3 (NSP3)
MAPTKVTFGDDTVIEVQGYKSVNITFELDERIDKVLNEKCFAYTVELGTEVNEFACVVADAVIKTLQPVSELLTPLGIDLDEWSMATYYLFDESGEFKLASHMYCSFYPPDEDEEEGDCEEEEFEPSTQYEYGTEDDYQGKPLEFGATSAALQPEEEQEEDWLDDDSQQTVGQQDGSEDNQTTTIQTIVEVQPQLEMELTPVVQTIEVNSFSGYLKLTDNVYIKNADIVEEAKKVKPTVVVNAANVYLKHGGGVAGALNKATNNAMQVESDDYIATNGPLKVGGSCVLSGHNLAKHCLHVVGPNVNKGEDIQLLKSAYENFNQHEVLLAPLLSAGIFGADPIHSLRVCVDTVRTNVYLAVFDKNLYDKLVSSFLEMKSEKQVEQKIAEIPKEEVKPFITESKPSVEQRKQDDKKIKACVEEVTTTLEETKFLTENLLLYIDINGNLHPDSATLVSDIDITFLKKDAPYIVGDVVQEGVLTAVVIPTKKAGGTTEMLAKALRKVPTDNYITTYPGQGLNGYTVEEAKTVLKKCKSAFYILPSIISNEKQEILGTVSWNLREMLAHAEETRKLMPVCVETKAIVSTIQRKYKGIKIQEGVVDYGARFYFYTSKTTVASLINTLNDLNETLVTMPLGYVTHGLNLEEAARYMRSLKVPATVSVSSPDAVTAYNGYLTSSSKTPEEHFIETISLAGSYKDWSYSGQSTQLGIEFLKRGDKSVYYTSNPTTFHLDGEVITFDNLKTLLSLREVRTIKVFTTVDNINLHTQVVDMSMTYGQQFGPTYLDGADVTKIKPHNSHEGKTFYVLPNDDTLRVEAFEYYHTTDPSFLGRYMSALNHTKKWKYPQVNGLTSIKWADNNCYLATALLTLQQIELKFNPPALQDAYYRARAGEAANFCALILAYCNKTVGELGDVRETMSYLFQHANLDSCKRVLNVVCKTCGQQQTTLKGVEAVMYMGTLSYEQFKKGVQIPCTCGKQATKYLVQQESPFVMMSAPPAQYELKHGTFTCASEYTGNYQCGHYKHITSKETLYCIDGALLTKSSEYKGPITDVFYKENSYTTTIKPVTYKLDGVVCTEIDPKLDNYYKKDNSYFTEQPIDLVPNQPYPNASFDNFKFVCDNIKFADDLNQLTGYKKPASRELKVTFFPDLNGDVVAIDYKHYTPSFKKGAKLLHKPIVWHVNNATNKATYKPNTWCIRCLWSTKPVETSNSFDVLKSEDAQGMDNLACEDLKPVSEEVVENPTIQKDVLECNVKTTEVVGDIILKPANNSLKITEEVGHTDLMAAYVDNSSLTIKKPNELSRVLGLKTLATHGLAAVNSVPWDTIANYAKPFLNKVVSTTTNIVTRCLNRVCTNYMPYFFTLLLQLCTFTRSTNSRIKASMPTTIAKNTVKSVGKFCLEASFNYLKSPNFSKLINIIIWFLLLSVCLGSLIYSTAALGVLMSNLGMPSYCTGYREGYLNSTNVTIATYCTGSIPCSVCLSGLDSLDTYPSLETIQITISSFKWDLTAFGLVAEWFLAYILFTRFFYVLGLAAIMQLFFSYFAVHFISNSWLMWLIINLVQMAPISAMVRMYIFFASFYYVWKSYVHVVDGCNSSTCMMCYKRNRATRVECTTIVNGVRRSFYVYANGGKGFCKLHNWNCVNCDTFCAGSTFISDEVARDLSLQFKRPINPTDQSSYIVDSVTVKNGSIHLYFDKAGQKTYERHSLSHFVNLDNLRANNTKGSLPINVIVFDGKSKCEESSAKSASVYYSQLMCQPILLLDQALVSDVGDSAEVAVKMFDAYVNTFSSTFNVPMEKLKTLVATAEAELAKNVSLDNVLSTFISAARQGFVDSDVETKDVVECLKLSHQSDIEVTGDSCNNYMLTYNKVENMTPRDLGACIDCSARHINAQVAKSHNIALIWNVKDFMSLSEQLRKQIRSAAKKNNLPFKLTCATTRQVVNVVTTKIALKGG

SEQ ID NO: 16146 - protein, 1946 aa, Artificial Sequence
  SARS-CoV-2__MT679198.1__non-structural protein 3 (NSP3)
MAPTKVTFGDDTVIEVQGYKSVNITFELDERIDKVLNEKCSAYTVELGTEVNEFACVVADAVIKTLQPVSELLTPLGIDLDEWSMATYYLFDESGEFKLASHMYCSFYPPDEDEEEGDCEEEEFEPSTQYEYGTEDDYQGKPLEFGATSAALQPEEEQEEDWLDDDSQQTVGQQDGSEDNQTTTIQTIVEVQPQLEMELTPVVQTIEVNSFSGYLKLTDNVYIKNADIVEEAKKVKPTVVVNAANVYLKHGGGVAGALNKATNNAMQVESDDYIATNGPLKVGGSCVLSGHNLAKHCLHVVGPNVNKGEDIQLLKSAYENFNQHEVLLAPLLSAGIFGADPIHSLRVCVDTVRTNVYLAVFDKNLYDKLVSSFLEMKSEKQVEQKIAEIPKEEVKPFITESKPSVEQRKQDDKKIKACVEEVTTTLEETKFLTENLLLYIDINGNLHPDSATLVSDIDITFLKKDAPYIVGDVVQEGVLTAVVIPTKKAGGTTEMLAKALRKVPTDNYITTYPGQGLNGYTVEEAKTVLKKCKSAFYILPSIISNEKQEILGTVSWNLREMLAHAEETRKLMPVCVETKAIVSTIQRKYKGIKIQEGVVDYGARFYFYTSKATVASLINTLNDLNETLVTMPLGYVTHGLNLEEAARYMRSLKVPATVSVSSPDAVTAYNGYLTSSSKTPEEHFIETISLAGSYKDWSYSGQSTQLGIEFLKRGDKSVYYTSNPTTFHLDGEVITFDNLKTLLSLREVRTIKVFTTVDNINLHTQVVDMSMTYGQQFGPTYLDGADVTKIKPHNSHEGKTFYVLPNDDTLRVEAFEYYHTTDPSFLGRYMSALNHTKKWKYPQVNGLTSIKWADNNCYLATALLTLQQIELKFNPPALQDAYYRARAGEAANFCALILAYCNKTVGELGDVRETMSYLFQHANLDSCKRVLNVVCKTCGQQQTTLKGVEAVMYMGTLSYEQFKKGVQIPCTCGKQATKYLVQQESPFVMMSAPPAQYELKHGTFTCASEYTGNYQCGHYKHITSKETLYCIDGALLTKSSEYKGPITDVFYKENSYTTTIKPVTYKLDGVVCTEIDPKLDNYYKKDNSYFTEQPIDLVPNQPYPNASFDNFKFVCDNIKFADDLNQLTGYKKPASRELKVTFFPDLNGDVVAIDYKHYTPSFKKGAKLLHKPIVWHVNNATNKATYKPNTWCIRCLWSTKPVETSNSFDVLKSEDAQGMDNLACEDLKPVSEEVVENPTIQKDVLECNVKTTEVVGDIILKPANNSLKITEEVGHTDLMAAYVDNSSLTIKKPNELSRVLGLKTLATHGLAAVNSVPWDTIANYAKPFLNKVVSTTTNIVTRCLNRVCTNYMPYFFTLLLQLCTFTRSTNSRIKASMPTTIAKNTVKSVGKFCLEASFNYLKSPNFSKLINIIIWFLLLSVCLGSLIYSTAALGVLMSNLGMPSYCTGYREGYLNSTNVTIATYCTGSIPCSVCLSGLDSLDTYPSLETIQITISSFKWDLTAFGLVAEWFLAYILFTRFFYVLGLAAIMQLFFSYFAVHFISNSWLMWLIINLVQMAPISAMVRMYIFFASFYYVWKSYVHVVDGCNSSTCMMCYKRNRATRVECTTIVNGVRRSFYVYANGGKGFCKLHNWNCVNCDTFCAGSTFISDEVARDLSLQFKRPINPTDQSSYIVDSVTVKNGSIHLYFDKAGQKTYERHSLSHFVNLDNLRANNTKGSLPINVIVFDGKSKCEESSAKSASVYYSQLMCQPILLLDQALVSDVGDSAEVAVKMFDAYVNTFSSTFNVPMEKLKTLVATAEAELAKNVSLDNVLSTFISAARQGFVDSDVETKDVVECLKLSHQSDIEVTGDSCNNYMLTYNKVENMTPRDLGACIDCSARHINAQVAKSHNIALIWNVKDFMSLSEQLRKQIRSAAKKNNLPFKLTCATTRQVVNVVTTKIALKGG

SEQ ID NO: 16147 - protein, 1946 aa, Artificial Sequence
  SARS-CoV-2__MT680218.1__non-structural protein 3 (NSP3)
MAPTKVTFGDDTVIEVQGYKSVNITFELDERIDKVLNEKCSAYTVELGTEVNEFACVVADAVIKTLQPVSELLTPLGIDLDEWSMATYYLFDESGEFKLASHMYCSFYPPDEDEEEGDCEEEEFEPSTQYEYGTEDDYQGKPLEFGATSAALQPEEEQEEDWLDDDSQQTVGQQDGSEDNQTTTIQTIVEVQPQLEMELTPVVQTIEVNSFSGYLKLTDNVYIKNADIVEEAKKVKPTVVVNAANVYLKHGGGVAGALNKATNNAMQVESDDYIATNGPLKVGGSCVLSGHNLAKHCLHVVGPNVNKGEDIQLLKSAYENFNQHEVLLAPLLSAGIFGADPIHSLRVCVDTVRTNVYLAVFDKNLYDKLVSSFLEMKSEKQVEQKIAEIPKEEVKPFITESKPSVEQRKQDDKKIKACVEEVTTTLEETKFLTENLLLYIDINGNLHPDSATLVSDIDITFLKKDAPYIVGDVVQEGVLTAVVIPTKKAGGTTEMLAKALRKVPTDNYITTYPGQGLNGYTVEEAKTVLKKCKSAFYILPSIISNEKQEILGTVSWNLREMLAHAEETRKLMPVCVETKAIVSTIQRKYKGIKIQEGVVDYGARFYFYTSKTTVASLINTLNDLNETLVTMPLGYVTHGLNLEEAARYMRSLKVPATVSVSSPDAVTAYNGYLTSSSKTPEEHFIETISLAGSYKDWSYSGQSTQLGIEFLKRGDKSVYYTSNPTTFHLDGEVITFDNLKTLLSLREVRTIKVFTTVDNINLHTQVVDMSMTYGQQFGPTYLDGADVTKIKPHNSHEGKTFYVLPNDDTLRVEAFEYYHTTDPSFLGRYMSALNHTKKWKYPQVNGLTSIKWADNNCYLATALLTLQQIELKFNPPALQDAYYRARAGEAANFCALILAYCNKTVGELGDVRETMSYLFQHANLDSCKRVLNVVCKTCGQQQTTLKGVEAVMYMGTLSYEQFKKGVQIPCTCGKQATKYLVQQESPFVMMSAPPAQYELKHGTFTCASEYTGNYQCGHYKHITSKETLYCIDGALLTKSSEYKGPITDVFYKENSYTTTIKPVTYKLDGVVCTEIDPKLDNYYKKDNSYFTEQPIDLVPNQPYPNASFDNFKFVCDNIKFADDLNQLTGYKKPASRELKVTFFPDLNGDVVAIDYKHYTPSFKKGAKLLHKPIVWHVNNATNKATYKPNTWCIRCLWSTKPVETSNSFDVLKSEDAQGMDNLACEDLKPVSEEVVENPTIQKDVLECNVKTTEVVGDIILKPANIKITEEVGHTDLMAAYVDNSSLTIKKPNELSRVLGLKTLATHGLAAVNSVPWDTIANYAKPFLNKVVSTTTNIVTRCLNRVCTNYMPYFFTLLLQLCTFTRSTNSRIKASMPTTIAKNTVKSVGKFCLEASFNYLKSPNFSKLINIIIWFLLLSVCLGSLIYSTAALGVLMSNLGMPSYCTGYREGYLNSTNVTIATYCTGSIPCSVCLSGLDSLDTYPSLETIQITISSFKWDLTAFGLVAEWFLAYILFTRFFYVLGLAAIMQLFFSYFAVHFISNSWLMWLIINLVQMAPISAMVRMYIFFASFYYVWKSYVHVVDGCNSSTCMMCYKRNRATRVECTTIVNGVRRSFYVYANGGKGFCKLHNWNCVNCDTFCAGSTFISDEVARDLSLQFKRPINPTDQSSYIVDSVTVKNGSIHLYFDKAGQKTYERHSLSHFVNLDNLRANNTKGSLPINVIVFDGKSKCEESSAKSASVYYSQLMCQPILLLDQALVSDVGDSAEVAVKMFDAYVNTFSSTFNVPMEKLKTLVATAEAELAKNVSLDNVLSTFISAARQGFVDSDVETKDVVECLKLSHQSDIEVTGDSCNNYMLTYNKVENMTPRDLGACIDCSARHINAQVAKSHNIALIWNVKDFMSLSEQLRKQIRSAAKKNNLPFKLTCATTRQVVNVVTTKIALKGGKI

SEQ ID NO: 16148 - protein, 1946 aa, Artificial Sequence
  SARS-CoV-2__MT680242.1__non-structural protein 3 (NSP3)
MAPTKVTFGDDTVIEVQGYKSVNITFELDERIDKVLNEKCSAYTVELGTEVNEFACVVADAVIKTLQPVSELLTPLGIDLDEWSMATYYLFDESGEFKLASHMYCSFYPPDEDEEEGDCEEEEFEPSTQYEYGTEDDYQGKPLEFGATSAALQPEEEQEEDWLDDDSQQTVGQQDGSEDNQTTTIQTIVEVQPQLEMELTPVVQTIEVNSFSGYLKLTDNVYIKNADIVEEAKKVKPTVVVNAANVYLKHGGGVAGALNKATNNAMQVESDDYIATNGPLKVGGSCVLSGHNLAKHCLHVVGPNVNKGEDIQLLKSAYENFNQHEVLLAPLLSAGIFGADPIHSLRVCVDTVRTNVYLAVFDKNLYDKLVSSFLEMKSEKQVEQKIAEIPKEEVKPFITESKPSVEQRKQDDKKIKACVEEVTTTLEETKFLTENLLLYIDINGNLHPDSATLVSDIDITFLKKDAPYIVGDVVQEGVLTAVVIPTKKAGGTTEMLAKALRKVPTDNYITTYPGQGLNGYTVEEAKTVLKKCKSAFYILPSIISNEKQEILGTVSWNLREMLAHAEETRKLMPVCVETKAIVSTIQRKYKGIKIQEGVVDYGARFYFYTSKTTVASLINTLNDLNETLVTMPLGYVTHGLNLEEAARYMRFLKVPATVSVSSPDAVTAYNGYLTSSSKTPEEHFIETISLAGSYKDWSYSGQSTQLGIEFLKRGDKSVYYTSNPTTFHLDGEVITFDNLKTLLSLREVRTIKVFTTVDNINLHTQVVDMSMTYGQQFGPTYLDGADVTKIKPHNSHEGKTFYVLPNDDTLRVEAFEYYHTTDPSFLGRYMSALNHTKKWKYPQVNGLTSIKWADNNCYLATALLTLQQIELKFNPPALQDAYYRARAGEAANFCALILAYCNKTVGELGDVRETMSYLFQHANLDSCKRVLNVVCKTCGQQQTTLKGVEAVMYMGTLSYEQFKKGVQIPCTCGKQATKYLVQQESPFVMMSAPPAQYELKHGTFTCASEYTGNYQCGHYKHITSKETLYCIDGALLTKSSEYKGPITDVFYKENSYTTTIKPVTYKLDGVVCTEIDPKLDNYYKKDNSYFTEQPIDLVPNQPYPNASFDNFKFVCDNIKFADDLNQLTGYKKPASRELKVTFFPDLNGDVVAIDYKHYTPSFKKGAKLLHKPIVWHVNNATNKATYKPNTWCIRCLWSTKPVETSNSFDVLKSEDAQGMDNLACEDLKPVSEEVVENPTIQKDVLECNVKTTEVVGDIILKPANNSLKITEEVGHTDLMAAYVDNSSLTIKKPNELSRVLGLKTLATHGLAAVNSVPWDTIANYAKPFLNKVVSTTTNIVTRCLNRVCTNYMPYFFTLLLQLCTFTRSTNSRIKASMPTTIAKNTVKSVGKFCLEASFNYLKSPNFSKLINIIIWFLLLSVCLGSLIYSTAALGVLMSNLGMPSYCTGYREGYLNSTNVTIATYCTGSIPCSVCLSGLDSLDTYPSLETIQITISSFKWDLTAFGLVAEWFLAYILFTRFFYVLGLAAIMQLFFSYFAVHFISNSWLMWLIINLVQMAPISAMVRMYIFFASFYYVWKSYVHVVDGCNSSTCMMCYKRNRATRVECTTIVNGVRRSFYVYANGGKGFCKLHNWNCVNCDTFCAGSTFISDEVARDLSLQFKRPINPTDQSSYIVDSVTVKNGSIHLYFDKAGQKTYERHSLSHFVNLDNLRANNTKGSLPINVIVFDGKSKCEESSAKSASVYYSQLMCQPILLLDQALVSDVGDSAEVAVKMFDAYVNTFSSTFNVPMEKLKTLVATAEAELAKNVSLDNVLSTFISAARQGFVDSDVETKDVVECLKLSHQSDIEVTGDSCNNYMLTYNKVENMTPRDLGACIDCSARHINAQVAKSHNIALIWNVKDFMSLSEQLRKQIRSAAKKNNLPFKLTCATTRQVVNVVTTKIALKGG

SEQ ID NO: 16149 - protein, 1946 aa, Artificial Sequence
  SARS-CoV-2__MT609918.1__non-structural protein 3 (NSP3)
MAPTKVTFGDDTVIEVQGYKSVNITFELDESIDKVLNEKCSAYTVELGTEVNEFACVVADAVIKTLQPVSELLTPLGIDLDEWSMATYYLFDESGEFKLASHMYCSFYPPDEDEEEGDCEEEEFEPSTQYEYGTEDDYQGKPLEFGATSAALQPEEEQEEDWLDDDSQQTVGQQDGSEDNQTTTIQTIVEVQPQLEMELTPVVQTIEVNSFSGYLKLTENVYIKNADIVEEAKKVKPTVVVNAANVYLKHGGGVAGALNKATNNAMQVESDDYIATNGPLKVGGSCVLSGHNLAKHCLHVVGPNVNKGEDIQLLKSAYENFNQHEVLLAPLLSAGIFGADPIHSLRVCVDTVRTNVYLAVFDKNLYDKLVSSFLEMKSEKQVEQKIAEIPKEEVKPFITESKPSVEQRKQDDKKIKACVEEVTTTLEETKFLTENLLLYIDINGNLHPDSATLVSDIDITFLKKDAPYIVGDVVQEGVLTAVVIPTKKAGGTTEILAKALRKVPTDNYITTYPGQGLNGYTVEEAKTVLKKCKSAFYILPSIISNEKQEILGTVSWNLREMLAHAEETRKLMPVCVETKAIVSTIQRKYKGIKIQEGVVDYGARFYFYTSKTTVASLINTLNDLNETLVTMPLGYVTHGLNLEEAARYMRSLKVPATVSVSSPDAVTAYNGYLTSSSKTPEEHFIETISLAGSYKDWSYSGQSTQLGIEFLKRGDKSVYYTSNPTTFHLDGEVITFDNLKTLLSLREVRTIKVFTTVDNINLHTQVVDMSMTYGQQFGPTYLDGADVTKIKPHNSHEGKTFYVLPNDDTLRVEAFEYYHTTDPSFLGRYMSALNHTKKWKYPQVNGLTSIKWADNNCYLATALLTLQQIELKFNPPALQDAYYRARAGEAANFCALILAYCNKTVGELGDVRETMSYLFQHANLDSCKRVLNVVCKTCGQQQTTLKGVEAVMYMGTLSYEQFKKGVQIPCTCGKQATKYLVQQESPFVMMSAPPAQYELKHGTFTCASEYTGNYQCGHYKHITSKETLYCIDGALLTKSSEYKGPITDVFYKENSYTTTIKPVTYKLDGVVCTEIDPKLDNYYKKDNSYFTEQPIDLVPNQPYPNASFDNFKFVCDNIKFADDLNQLTGYKKPASRELKVTFFPDLNGDVVAIDYKHYTPSFKKGAKLLHKPIVWHVNNATNKATYKPNTWCIRCLWSTKPVETSNSFDVLKSEDAQGMDNLACEDLKPVSEEVVENPTIQKDVLECNVKTTEVVGDIILKPANNSLKITEEVGHTDLMAAYVDNSSLTIKKPNELSRVLGLKTLATHGLAAVNSVPWDTIANYAKPFLNKVVSTTTNIVTRCLNRVCTNYMPYFFTLLLQLCTFTRSTNSRIKASMPTTIAKNTVKSVGKFCLEASFNYLKSPNFSKLINIIIWFLLLSVCLGSLIYSTAALGVLMSNLGMPSYCTGYREGYLNSTNVTIATYCTGSIPCSVCLSGLDSLDTYPSLETIQITISSFKWDLTAFGLVAEWFLAYILFTRFFYVLGLAAIMQLFFSYFAVHFISNSWLMWLIINLVQMAPISAMVRMYIFFASFYYVWKSYVHVVDGCNSSTCMMCYKRNRATRVECTTIVNGVRRSFYVYANGGKGFCKLHNWNCVNCDTFCAGSTFISDEVARDLSLQFKRPINPTDQSSYIVDSVTVKNGSIHLYFDKAGQKTYERHSLSHFVNLDNLRANNTKGSLPINVIVFDGKSKCEESSAKSASVYYSQLMCQPILLLDQALVSDVGDSAEVAVKMFDAYVNTFSSTFNVPMEKLKTLVATAEAELAKNVSLDNVLSTFISAARQGFVDSDVETKDVVECLKLSHQSDIEVTGDSCNNYMLTYNKVENMTPRDLGACIDCSARHINAQVAKSHNIALIWNVKDFMSLSEQLRKQIRSAAKKNNLPFKLTCATTRQVVNVVTTKIALKGG

SEQ ID NO: 16150 - protein, 1946 aa, Artificial Sequence
  SARS-CoV-2__MT611440.1__non-structural protein 3 (NSP3)
MAPTKVTFGDDTVIEVQGYKSVNITFELDERIDKVLNEKCSAYTVELGTEVNEFACVVADAVIKTLQPVSELLTPLGIDLDEWSMATYYLFDESGEFKLASHMYCSFYPPDEDEEEGDCEEEEFEPSTQYEYGTEDDYQGKPLEFGATSAALQPEEEQEEDWLDDDSQQTVGQQDGSEDNQTTTIQTIVEVQPQLEMELTPVVQTIEVNSFSGYLKLTDNVYIKNADIVEEAKKVKPTVVVNAANVYLKHGGGVAGALNKATNNAMQVESDDYIATNGPLKVGGSCVLSGHNLAKHCLHVVGPNVNKGEDIQLLKSAYENFNQHEVLLAPLLSAGIFGADPIHSLRVCVDTVRTNVYLAVFDKNLYDKLVSSFLEMKSEKQVEQKIAEIPKEEVKPFITESKPSVEQRKQDDKKIKACVEEVTTTLEEIKFLTENLLLYIDINGNLHPDSATLVSDIDITFLKKDAPYIVGDVVQEGVLTAVVIPTKKAGGTTEMLAKALRKVPTDNYITTYPGQGLNGYTVEEAKTVLKKCKSAFYILPSIISNEKQEILGTVSWNLREMLAHAEETRKLMPVCVETKAIVSTIQRKYKGIKIQEGVVDYGARFYFYTSKTTVASLINTLNDLNETLVTMPLGYVTHGLNLEEAARYMRSLKVPATVSVSSPDAVTAYNGYLTSSSKTPEEHFIETISLAGSYKDWSYSGQSTQLGIEFLKRGDKSVYYTSNPTTFHLDGEVITFDNLKTLLSLREVRTIKVFTTVDNINLHTQVVDMSMTYGQQFGPTYLDGADVTKIKPHNSHEGKTFYVLPNDDTLRVEAFEYYHTTDPSFLGRYMSALNHTKKWKYPQVNGLTSIKWADNNCYLATALLTLQQIELKFNPPALQDAYYRARAGEAANFCALILAYCNKTVGELGDVRETMSYLFQHANLDSCKRVLNVVCKTCGQQQTTLKGVEAVMYMGTLSYEQFKKGVQIPCTCGKQATKYLVQQESPFVMMSAPPAQYELKHGTFTCASEYTGNYQCGHYKHITSKETLYCIDGALLTKSSEYKGPITDVFYKENSYTTTIKPVTYKLDGVVCTEIDPKLDNYYKKDNSYFTEQPIDLVPNQPYPNASFDNFKFVCDNIKFADDLNQLTGYKKPASRELKVTFFPDLNGDVVAIDYKHYTPSFKKGAKLLHKPIVWHVNNATNKATYKPNTWCIRCLWSTKPVETSNSFDVLKSEDAQGMDNLACEDLKPVSEEVVENPTIQKDVLECNVKTTEVVGDIILKPANNSLKITEEVGHTDLMAAYVDNSSLTIKKPNELSRVLGLKTLATHGLAAVNSVPWDTIANYAKPFLNKVVSTTTNIVTRCLNRVCTNYMPYFFTLLLQLCTFTRSTNSRIKASMPTTIAKNTVKSVGKFCLEASFNYLKSPNFSKLINIIIWFLLLSVCLGSLIYSTAALGVLMSNLGIPSYCTGYREGYLNSTNVTIATYCTGSIPCSVCLSGLDSLDTYPSLETIQITISSFKWDLTAFGLVAEWFLAYILFTRFFYVLGLAAIMQLFFSYFAVHFISNSWLMWLIINLVQMAPISAMVRMYIFFASFYYVWKSYVHVVDGCNSSTCMMCYKRNRATRVECTTIVNGVRRSFYVYANGGKGFCKLHNWNCVNCDTFCAGSTFISDEVARDLSLQFKRPINPTDQSSYIVDSVTVKNGSIHLYFDKAGQKTYERHSLSHFVNLDNLRANNTKGSLPINVIVFDGKSKCEESSAKSASVYYSQLMCQPILLLDQALVSDVGDSAEVAVKMFDAYVNTFSSTFNVPMEKLKTLVATAEAELAKNVSLDNVLSTFISAARQGFVDSDVETKDVVECLKLSHQSDIEVTGDSCNNYMLTYNKVENMTPRDLGACIDCSARHINAQVAKSHNIALIWNVKDFMSLSEQLRKQIRSAAKKNNLPFKLTCATTRQVVNVVTTKIALKGG

SEQ ID NO: 16151 - protein, 1946 aa, Artificial Sequence
  SARS-CoV-2__MT611449.1__non-structural protein 3 (NSP3)
MAPTKVTFGDDTVIEVQGYKSVNITFELDERIDKVLNEKCSVYTVELGTEVNEFACVVADAVIKTLQPVSELLTPLGIDLDEWSMATYYLFDESGEFKLASHMYCSFYPPDEDEEEGDCEEEEFEPSTQYEYGTEDDYQGKPLEFGATSAALQPEEEQEEDWLDDDSQQTVGQQDGSEDNQTTTIQTIVEVQPQLEMELTPVVQTIEVNSFSGYLKLTDNVYIKNADIVEEAKKVKPTVVVNAANVYLKHGGGVAGALNKATNNAMQVESDDYIATNGPLKVGGSCVLSGHNLAKHCLHVVGPNVNKGEDIQLLKSAYENFNQHEVLLAPLLSAGIFCADPIHSLRVCVDTVRTNVYLAVFDKNLYDKLVSSFLEMKSEKQVEQKIAEIPKEEVKPFITESKPSVEQRKQDDKKIKACVEEVTTTLEEIKFLTENLLLYIDINGNLHPDSATLVSDIDITFLKKDAPYIVGDVVQEGVLTAVVIPTKKAGGTTEMLAKALRKVPTDNYITTYPGQGLNGYTVEEAKTVLKKCKSAFYILPSIISNEKQEILGTVSWNLREMLAHAEETRKLMPVCVETKAIVSTIQRKYKGIKIQEGVVDYGARFYFYTSKTTVASLINTLNDLNETLVTMPLGYVTHGLNLEEAARYMRSLKVPATVSVSSPDAVTAYNGYLTSSSKTPEEHFIETISLAGSYKDWSYSGQSTQLGIEFLKRGDKSVYYTSNPTTFHLDGEVITFDNLKTLLSLREVRTIKVFTTVDNINLHTQVVDMSMTYGQQFGPTYLDGADVTKIKPHNSHEGKTFYVLPNDDTLRVEAFEYYHTTDPSFLGRYMSALNHTKKWKYPQVNGLTSIKWADNNCYLATALLTLQQIELKFNPPALQDAYYRARAGEAANFCALILAYCNKTVGELGDVRETMSYLFQHANLDSCKRVLNVVCKTCGQQQTTLKGVEAVMYMGTLSYEQFKKGVQIPCTCGKQATKYLVQQESPFVMMSAPPAQYELKHGTFTCASEYTGNYQCGHYKHITSKETLYCIDGALLTKSSEYKGPITDVFYKENSYTTTIKPVTYKLDGVVCTEIDPKLDNYYKKDNSYFTEQPIDLVPNQPYPNASFDNFKFVCDNIKFADDLNQLTGYKKPASRELKVTFFPDLNGDVVAIDYKHYTPSFKKGAKLLHKPIVWHVNNATNKATYKPNTWCIRCLWSTKPVETSNSFDVLKSEDAQGMDNLACEDLKPVSEEVVENPTIQKDVLECNVKTTEVVGDIILKPANNSLKITEEVGHTDLMAAYVDNSSLTIKKPNELSRVLGLKTLATHGLAAVNSVPWDTIANYAKPFLNKVVSTTTNIVTRCLNRVCTNYMPYFFTLLLQLCTFTRSTNSRIKASMPTTIAKNTVKSVGKFCLEASFNYLKSPNFSKLINIIIWFLLLSVCLGSLIYSTAALGVLMSNLGMPSYCTGYREGYLNSTNVTIATYCTGSIPCSVCLSGLDSLDTYPSLETIQITISSFKWDLTAFGLVAEWFLAYILFTRFFYVLGLAAIMQLFFSYFAVHFISNSWLMWLIINLVQMAPISAMVRMYIFFASFYYVWKSYVHVVDGCNSSTCMMCYKRNRATRVECTTIVNGVRRSFYVYANGGKGFCKLHNWNCVNCDTFCAGSTFISDEVARDLSLQFKRPINPTDQSSYIVDSVTVKNGSIHLYFDKAGQKTYERHSLSHFVNLDNLRANNTKGSLPINVIVFDGKSKCEESSAKSASVYYSQLMCQPILLLDQALVSDVGDSAEVAVKMFDAYVNTFSSTFNVPMEKLKTLVATAEAELAKNVSLDNVLSTFISAARQGFVDSDVETKDVVECLKLSHQSDIEVTGDSCNNYMLTYNKVENMTPRDLGACIDCSARHINAQVAKSHNIALIWNVKDFMSLSEQLRKQIRSAAKKNNLPFKLTCATTRQVVNVVTTKIALKGG

SEQ ID NO: 16152 - protein, 1946 aa, Artificial Sequence
  SARS-CoV-2__MT611444.1__non-structural protein 3 (NSP3)
MAPTKVTFGDDTVIEVQGYKSVNITFELDERIDKVLNEKCSAYTVELGTEVNEFACVVADAVIKTLQPVSELLTPLGIDLDEWSMATYYLFDESGEFKLASHMYCSFYPPDEDEEEGDCEEEEFEPSTQYEYGTEDDYQGKPLEFGATSAALQPEEEQEEDWLDDDSQQTVGQQDGSEDNQTTTIQTIVEVQPQLEMELTPVVQTIEVNSFSGYLKLTDNVYIKNADIVEEAKKVKPTVVVNAANVYLKHGGGVAGALNKATNNAMQVESDDYIATNGPLKVGGSCVLSGHNLAKHCLHVVGPNVNKGEDIQLLKSAYENFNQHEVLLAPLLSAGIFGADPIHSLRVCVDTVRTNVYLAVFDKNLYDKLVSSFLEMKSEKQVEQKIAEIPKEEVKPFITESKPSVEQRKQDDKKIKACVEEVTTTLEETKFLTENLLLYIDINGNLHPDSATLVSDIDITFLKKDAPYIVGDVVQEGVLTAVVIPTKKAGGTTEMLAKALRKVPTDNYITTYPGQGLNGYTVEEAKTVLKKCKSAFYILPSIISNEKQEILGTVSWNLREMLAHAEETRKLMPVCVETKAIVSTIQRKYKGIKIQEGVVDYGARFYFYTSKTTVASLINTLNDLNETLVTMPLGYVTHGLNLEEAARYMRSLKVPATVSVSSPDAVTAYNGYLTSSSKTPEEHFIETISLAGSYKDWSYSGQSTQLGIEFLKRGDKSVYYTSNPTTFHLDGEVITFDNLKTLLSLREVRTIKVFTTVDNINLHTQVVDMSMTYGQQFGPTYLDGADVTKIKPHNSHEGKTFYVLPNDDTLRVEAFEYYHTTDPSFLGRYMSALNHTKKWKYPQVNGLTSIKWADNNCYLATALLTLQQIELKFNPPALQDAYYRARAGEAANFCALILAYCNKTVGELGDVRETMSYLFQHANLDSCKRVLNVVCKTCGQQQTTLKGVEAVMYMGTLSYEQFKKGVQIPCTCGKQATKYLVQQESPFVMMSAPPAQYELKHGTFTCASEYTGNYQCGHYKHITSKETLYCIDGALLTKSSEYKGPITDVFYKENSYTTTIKPVTYKLDGVVCTEIDPKLDNYYKKDNSYFTEQPIDLVPNQPYPNASFDNFKFVCDNIKFADDLNQLTGYKKPASRELKVTFFPDLNGDVVAIDYKHYTPSFKKGAKLLHKPIVWHVNNATNKATYKPNTWCIRCLWSTKPVETSNSFDVLKSEDAQGMDNLACEDLKPVSEEVVENPTIQKDVLECNVKTTEVVGDIILKPANNSLKIIEEVGHTDLMAAYVDNSSLTIKKPNELSRVLGLKTLATHGLAAVNSVPWDTIANYAKPFLNKVVSTTTNIVTRCLNRVCTNYMPYFFTLLLQLCTFTRSTNSRIKASMPTTIAKNTVKSVGKFCLEASFNYLKSPNFSKLINIIIWFLLLSVCLGSLIYSTAALGVLMSNLGMPSYCTGYREGYLNSTNVTIATYCTGSIPCSVCLSGLDSLDTYPSLETIQITISSFKWDLTAFGLVAEWFLAYILFTRFFYVLGLAAIMQLFFSYFAVHFISNSWLMWLIINLVQMAPISAMVRMYIFFASFYYVWKSYVHVVDGCNSSTCMMCYKRNRATRVECTTIVNGVRRSFYVYANGGKGFCKLHNWNCVNCDTFCAGSTFISDEVARDLSLQFKRPINPTDQSSYIVDSVTVKNGSIHLYFDKAGQKTYERHSLSHFVNLDNLRANNTKGSLPINVIVFDGKSKCEESSAKSASVYYSQLMCQPILLLDQALVSDVGDSAEVAVKMFDAYVNTFSSTFNVPMEKLKTLVATAEAELAKNVSLDNVLSTFISAARQGFVDSDVETKDVVECLKLSYQSDIEVTGDSCNNYMLTYNKVENMTPRDLGACIDCSARHINAQVAKSHNIALIWNVKDFMSLSEQLRKQIRSAAKKNNLPFKLTCATTRQVVNVVTTKIALKGG

SEQ ID NO: 16153 - protein, 1946 aa, Artificial Sequence
  SARS-CoV-2__MT614599.1__non-structural protein 3 (NSP3)
MAPTKVTFGDDTVIEVQGYKSVNITFELDERIDKVLNEKCSAYTVELGTEVNEFACVVADAVIKTLQPVSELLTPLGIDLDEWSMATYYLFDESGEFKLASHMYCSFYPPDEDEEEGDCEEEEFEPSTQYEYGTEDDYQGKPLEFGATSAALQPEEEQEEDWLDDDSQQTVGQQDGSEDNQTTTIQTIVEVQPQLEMELTPVVQTIEVNSFSGYLKLTDNVYIKNADIVEEAKKVKPTVVVNAANVYLKHGGGVAGALNKATNNAMQVESDDYIATNGPLKVGGSCVLSGHNLAKHCLHVVGPNVNKGEDIQLLKSAYENFNQHEVLLAPLLSAGIFGADPIHSLRVCVDTVRTNVYLAVFDKNLYDKLVSSFLEMKSEKQVEQKIAEIPKEEVKPFITESKPSVEQRKQDDKKIKACVEEVTTTLEETKFLTENLLLYIDINGNLHPDSATLVSDIDITFLKKDAPYIVGDVVQEGVLTAVVIPTKKAGGTTEMLAKALRKVPTDNYITTYPGQGLNGYTVEEAKTVLKKCKSAFYILPSIISNEKQEILGTVSWNLREMLAHAEETRKLMPVCVETKAIVSTIQRKYKGIKIQEGVVDYGARFYFYTSKTTVASLINTLNDLNETLVTMPLGYVTHGLNLEEAARYMRSLKVPATVSVSSPDAVTAYNGYLTSSSKTPEEHFIETISLAGSYKDWSYSGQSTQLGIEFLKRGDKSVYYTSNPTTFHLDGEVITFDNLKTLLSLREVRTIKVFTTVDNINLHTQVVDMSMTYGQQFGPTYLDGADVTKIKPHNSHEGKTFYVLPNDDTLRVEAFEYYHTTDPSFLGRYMSALNHTKKWKYPQVNGLTSIKWADNNCYLATALLTLQQIELKFNPPALQDAYYRARAGEAANFCALILAYCNKTVGELGDVRETMSYLFQHANLDSCKRVLNVVCKTCGQQQTTLKGVEAVMYMGTLSYEQFKKGVQIPCTCGKQATKYLVQQESPFVMMSAPPAQYELKHGTFTCASEYTGNYQCGHYKHITSKETLYCIDGALLTKSSEYKGPITDVFYKENSYTTTIKPVTYKLDGVVCTEIDPKLDNYYKKDNSYFTEQPIDLVPNQPYPNASFDNFKFVCDNIKFADDLNQLTGYKKPASRELKVTFFPDLNGDVVAIDYKHYTPSFKKGAKLLHKPIVWHVNNATNKATYKPNTWCIRCLWSTKPVETSNSFDVLKSEDAQGMDNLACEDLKSVSEEVVENPTIQKDVLECNVKTTEVVGDIILKPANNSLKITEEVGHTDLMAAYVDNSSLTIKKPNELSRVLGLKTLATHGLAAVNSVPWDTIANYAKPFLNKVVSTTTNIVTRCLNRVCTNYMPYFFTLLLQLCTFTRSTNSRIKASMPTTIAKNTVKSVGKFCLEASFNYLKSPNFSKLINIIIWFLLLSVCLGSLIYSTAALGVLMSNLGMPSYCTGYREGYLNSTNVTIATYCTGSIPCSVCLSGLDSLDTYPSLETIQITISSFKWDLTAFGLVAEWFLAYILFTRFFYVLGLAAIMQLFFSYFAVHFISNSWLMWLIINLVQMAPISAMVRMYIFFASFYYVWKSYVHVVDGCNSSTCMMCYKRNRATRVECTTIVNGVRRSFYVYANGGKGFCKLHNWNCVNCDTFCAGSTFISDEVARDLSLQFKRPINPTDQSSYIVDSVTVKNGSIHLYFDKAGQKTYERHSLSHFVNLDNLRANNTKGSLPINVIVFDGKSKCEESSAKSASVYYSQLMCQPILLLDQALVSDVGDSAEVAVKMFDAYVNTFSSTFNVPMEKLKTLVATAEAELAKNVSLDNVLSTFISAARQGFVDSDVETKDVVECLKLSHQSDIEVTGDSCNNYMLTYNKVENMTPRDLGACIDCSARHINAQVAKSHNIALIWNVKDFMSLSEQLRKQIRSAAKKNNLPFKLTCATTRQVVNVVTTKIALKGG

SEQ ID NO: 16154 - protein, 1946 aa, Artificial Sequence
  SARS-CoV-2__MT675289.1__non-structural protein 3 (NSP3)
MAPTKVTFGDDTVIEVQGYKSVNITFELDERIDKVLNEKCSAYTVELGTEVNEFACVVADAVIKTLQPVSELLTPLGIDLDEWSMATYYLFDESGEFKLASHMYCSFYPPDEDEEEGDCEEEEFEPSTQYEYGTEDDYQGKPLEFGATSAALQPEEEQEEDWLDDDSQQTVGQQDGSEDNQTTTIQTIVEVQPQLEMELTPVVQTIEVNSFSGYLKLTDNVYIKNADIVEEAKKVKPTVVVNAANVYLKHGGGVAGALNKATNNAMQVESDDYIATNGPLKVGGSCVLSGHNLAKHCLHVVGPNVNKGEDIQLLKSAYENFNQHEVLLAPLLSAGIFGADPIHSLRVCVDTVRTNVYLAVFDKNLYDKLVSSFLEMKSEKQVEQKIAEIPKEEVKPFITESKPSVEQRKQDDKKIKACVEEVTTTLEETKFLTENLLLYIDINGNLHPDSATLVSDIDITFLKKDAPYIVGDVVQEGVLTAVVIPTKKAGGTTEMLAKALRKVPTDSYITTYPGQGLNGYTVEEAKTVLKKCKSAFYILPSIISNEKQEILGTVSWNLREMLAHAEETRKLMPVCVETKAIVSTIQRKYKGIKIQEGVVDYGARFYFYTSKTTVASLINTLNDLNETLVTMPLGYVTHGLNLEEAARYMRSLKVPATVSVSSPDAVTAYNGYLTSSSKTPEEHFIETISLAGSYKDWSYSGQSTQLGIEFLKRGDKSVYYTSNPTTFHLDGEVITFDNLKTLLSLREVRTIKVFTTVDNINLHTQVVDMSMTYGQQFGPTYLDGADVTKIKPHNSHEGKTFYVLPNDDTLRVEAFEYYHTTDPSFLGRYMSALNHTKKWKYPQVNGLTSIKWADNNCYLATALLTLQQIELKFNPPALQDAYYRARAGEAANFCALILAYCNKTVGELGDVRETMSYLFQHANLDSCKRVLNVVCKTCGQQQTTLKGVEAVMYMGTLSYEQFKKGVQIPCTCGKQATKYLVQQESPFVMMSAPPAQYELKHGTFTCASEYTGNYQCGHYKHITSKETLYCIDGALLTKSSEYKGPITDVFYKENSYTTTIKPVTYKLDGVVCTEIDPKLDNYYKKDNSYFTEQPIDLVPNQPYPNASFDNFKFVCDNIKFADDLNQLTGYKKPASRELKVTFFPDLNGDVVAIDYKHYTPSFKKGAKLLHKPIVWHVNNATNKATYKPNTWCIRCLWSTKPVETSNSFDVLKSEDAQGMDNLACEDLKPVSEEVVENPTIQKDVLECNVKTTEVVGDIILKPANNSLKITEEVGHTDLMAAYVDNSSLTIKKPNELSRVLGLKTLATHGLAAVNSVPWDTIANYAKPFLNKVVSTTTNIVTRCLNRVCTNYMPYFFTLLLQLCTFTRSTNSRIKASMPTTIAKNTVKSVGKFCLEASFNYLKSPNFSKLINIIIWFLLLSVCLGSLIYSTAALGVLMSNLGMPSYCTGYREGYLNSTNVTIATYCTGSIPCSVCLSGLDSLDTYPSLETIQITISSFKWDLTAFGLVAEWFLAYILFTRFFYVLGLAAIMQLFFSYFAVHFISNSWLMWLIINLVQMAPISAMVRMYIFFASFYYVWKSYVHVVDGCNSSTCMMCYKRNRATRVECTTIVNGVRRSFYVYANGGKGFCKLHNWNCVNCDTFCAGSTFISDEVARDLSLQFKRPINPTDQSSYIVDSVTVKNGSIHLYFDKAGQKTYERHSLSHFVNLDNLRANNTKGSLPINVIVFDGKSKCEESSAKSASVYYSQLMCQPILLLDQALVSDVGDSAEVAVKMFDAYVNTFSSTFNVPMEKLKTLVATAEAELAKNVSLDNVLSTFISAARQGFVDSDVETKDVVECLKLSHQSDIEVTGDSCNNYMLTYNKVENMTPRDLGACIDCSARHINAQVAKSHNIALIWNVKDFMSLSEQLRKQIRSAAKKNNLPFKLTCATTRQVVNVVTTKIALKGG

SEQ ID NO: 16155 - protein, 1946 aa, Artificial Sequence
  SARS-CoV-2__MT675950.1__non-structural protein 3 (NSP3)
MAPTKVTFGDDTVIEVQGYKSVNITFELDERIDKVLNEKCSAYTVELGTEVNEFACVVADAVIKTLQPVSELLTPLGIDLDEWSMATYYLFDESGEFKLASHMYCSFYPPDEDEEEGDCEEEEFEPSTQYEYGTEDDYQGKPLEFGATSAALQPEEEQEEDWLDDDSQQTVGQQDGSEDNQTTTIQTIVEVQPQLEMELTPVVQTIEVNSFSGYLKLTDNVYIKNADIVEEAKKVKPTVVVNAANVYLKHGGGVAGALNKATNNAMQVESDDYIATNGPLKVGGSCVLSGHNLAKHCLHVVGPNVNKGEDIQLLKSAYENFNQHEVLLAPLLSAGIFGADPIHSLRVCVDTVRTNVYLAVFDKNLYDKLVSSFLEMKSEKQVEQKIAEIPKEEVKPFITESKPSVEQRKQDDKKIKACVEEVTTTLEETKFLTENLLLYIDINGNLHPDSATLVSDIDITFLKKDAPYIVGDVVQEGVLTAVVIPTKKAGGTTEMLAKALRKVPTDNYITTYPGQGLNGYTVEEAKTVLKKCKSAFYILPSIISNEKQEILGTVSWNLREMLAHAEETRKLMPVCVETKAIVSTIQRKYKGIKIQEGVVDYGARFYFYTSKTTVASLINTLNDLNETLVTMPLGYVTHGLNLEEAARYMRSLKVPATVSVSSPDAVTAYNGYLTSSSKTPEEHFIETISLAGSYKDWSYSGQSTQLGIEFLKRGDKSVYYTSNPTTFHLDGEVITFDNLKTLLSLREVRTIKVFTTVDNINLHTQVVDMSMTYGQQFGPTYLDGADVTKIKPHNSHEGKTFYVLPNDDTLRVEAFEYYHTTDPSFLGRYMSALNHTKKWKYPQVNGLTSIKWADNNCYLATALLTLQQIELKFNPPALQDAYYRARAGEAANFCALILAYCNKTVGELGDVRETMSYLFQHANLDSCKRVLNVVCKTCGQQQTTLKGVEAVMYMGTLSYEQFKKGVQIPCTCGKQATKYLVQQESPFVMMSAPPAQYELKHGTFICASEYTGNYQCGHYKHITSKETLYCIDGALLTKSSEYKGPITDVFYKENSYTTTIKPVTYKLDGVVCTEIDPKLDNYYKKDNSYFTEQPIDLVPNQPYPNASFDNFKFVCDNIKFADDLNQLTGYKKPASRELKVTFFPDLNGDVVAIDYKHYTPSFKKGAKLLHKPIVWHVNNATNKATYKPNTWCIRCLWSTKPVETSNSFDVLKSEDAQGMDNLACEDLKPVSEEVVENPTIQKDVLECNVKTTEVVGDIILKPANNSLKITEEVGHTDLMAAYVDNSSLTIKKPNELSRVLGLKTLATHGLAAVNSVPWDTIANYAKPFLNKVVSTTTNIVTRCLNRVCTNYMPYFFTLLLQLCTFTRSTNSRIKASMPTTIAKNTVKSVGKFCLEASFNYLKSPNFSKLINIIIWFLLLSVCLGSLIYSTAALGVLMSNLGMPSYCTGYREGYLNSTNVTIATYCTGSIPCSVCLSGLDSLDTYPSLETIQITISSFKWDLTAFGLVAEWFLAYILFTRFFYVLGLAAIMQLFFSYFAVHFISNSWLMWLIINLVQMAPISAMVRMYIFFASFYYVWKSYVHVVDGCNSSTCMMCYKRNRATRVECTTIVNGVRRSFYVYANGGKGFCKLHNWNCVNCDTFCAGSTFISDEVARDLSLQFKRPINPTDQSSYIVDSVTVKNGSIHLYFDKAGQKTYERHSLSHFVNLDNLRANNTKGSLPINVIVFDGKSKCEESSAKSASVYYSQLMCQPILLLDQALVSDVGDSAEVAVKMFDAYVNTFSSTFNVPMEKLKTLVATAEAELAKNVSLDNVLSTFISAARQGFVDSDVETKDVVECLKLSHQSDIEVTGDSCNNYMLTYNKVENMTPRDLGACIDCSARHINAQVAKSHNIALIWNVKDFMSLSEQLRKQIRSAAKKNNLPFKLTCATTRQVVNVVTTKIALKGG

SEQ ID NO: 16156 - protein, 1946 aa, Artificial Sequence
  SARS-CoV-2__MT664106.1__non-structural protein 3 (NSP3)
MAPTKVTFGDDTVIEVQGYKSVNITFELDERIDKVLNEKCSAYTVELGTEVNEFACVVADAVIKTLQPVSELLTPLGIDLDEWSMATYYLFDESGEFKLASHMYCSFYPPDEDEEEGDCEEEEFEPSTQYEYGTEDDYQGKPLEFGATSAALQPEEEQEEDWLDDDSQQTVGQQDGSEDNQTTTIQTIVEVQPQLEMELTPVVQTIEVNSFSGYLKLTDNVYIKNADIVEEAKKVKPTVVVNAANVYLKHGGGVAGALNKATNNAMQVESDDYIATNGPLKVGGSCVLSGHNLAKHCLHVVGPNVNKGEDIQLLKSAYENFNQHEVLLAPLLSAGIFGADPIHSLRVCVDTVRTNVYLAVFDKNLYDKLVSSFLEMKSEKQVEQKIAEIPKEEVKPFITESKPSVEQRKQDDKKIKACVEEVTTTLEETKFLTENLLLYIDINGNLHPDSATLVSDIDITFLKKDAPYIVGDVVQEGVLTAVVIPTKKAGGTTEMLAKALRKVPTDNYITTYPGQGLNGYTVEEAKTVLKKCKSAFYILPSIISNEKQEILGTVSWNLREMLAHAEETRKLMPVCVETKAIVSTIQRKYKGIKIQEGVVDYGARFYFYTSKTTVASLINTLNDLNETLVTMPLGYVTHGLNLEEAARYMRSLKVPATVSVSSPDAVTAYNGYLTSSSKTPEEHFIETISLAGSYKDWSYSGQSTQLGIEFLKRGDKSVYYTSNPTTFHLDGEVITFDNLKTLLSLREVRTIKVFTTVDNINLHTQVVDMSMTYGQQFGPTYLDGADVTKIKPHNSHEGKTFYVLPNDDTLRVEAFEYYHTTDPSFLGRYMSALNHTKKWKYPQVNGLTSIKWADNNCYLATALLTLQQIELKFNPPALQDAYYRARAGEAANFCALILAYCNKTVGELGDVRETMSYLFQHANLDSCKRVLNVVCKTCGQQQTTLKGVEAVMYMGTLSYEQFKKGVQIPCTCGKQATKYLVQQESPFVMMSAPPAQYELKHGTFTCASEYTGNYQCGHYKHITSKETLYCIDGALLTKSSEYKGPITDVFYKENSYTTTIKPVTYKLDGVVCTEIDPKLDNYYKKDNSYFTEQPIDLVPNQPYPNASFDNFKFVCDNIKFADDLNQLTGYKKPASRELKVTFFPDLNGDVVAIDYKHYTPSFKKGAKLLHKPIVWHVNNATNKATYKPNTWCIRCLWSTKPVETSNSFDVLKSENAQGMDNLACEDLKPVSEEVVENPTIQKDVLECNVKTTEVVGDIILKPANNSLKITEEVGHTDLMAAYVDNSSLTIKKPNELSRVLGLKTLATHGLAAVNSVPWDTIANYAKPFLNKVVSTTTNIVTRCLNRVCTNYMPYFFTLLLQLCTFTRSTNSRIKASMPTTIAKNTVKSVGKFCLEASFNYLKSPNFSKLINIIIWFLLLSVCLGSLIYSTAALGVLMSNLGMPSYCTGYREGYLNSTNVTIATYCTGSIPCSVCLSGLDSLDTYPSLETIQITISSFKWDLTAFGLVAEWFLAYILFTRFFYVLGLAAIMQLFFSYFAVHFISNSWLMWLIINLVQMAPISAMVRMYIFFASFYYVWKSYVHVVDGCNSSTCMMCYKRNRATRVECTTIVNGVRRSFYVYANGGKGFCKLHNWNCVNCDTFCAGSTFISDEVARDLSLQFKRPINPTDQSSYIVDSVTVKNGSIHLYFDKAGQKTYERHSLSHFVNLDNLRANNTKGSLPINVIVFDGKSKCEESSAKSASVYYSQLMCQPILLLDQALVSDVGDSAEVAVKMFDAYVNTFSSTFNVPMEKLKTLVATAEAELAKNVSLDNVLSTFISAARQGFVDSDVETKDVVECLKLSHQSDIEVTGDSCNNYMLTYNKVENMTPRDLGACIDCSARHINAQVAKSHNIALIWNVKDFMSLSEQLRKQIRSAAKKNNLPFKLTCATTRQVVNVVTTKIALKGG

SEQ ID NO: 16157 - protein, 1946 aa, Artificial Sequence
  SARS-CoV-2__MT664171.1__non-structural protein 3 (NSP3)
MAPTKVTFGDDTVIEVQGYKSVNITFELDERIDKVLNEKCSAYTVELGTEVNEFACVVADAVIKTLQPVSELLTPLGIDLDEWSMATYYLFDESGEFKLASHMYCSFYPPDEDEEEGDCEEEEFEPSTQYEYGTEDDYQGKPLEFGATSAALQPEEEQEEDWLDDDSQQTVGQQDGSEDNQTTTIQTIVEVQPQLEMELTPVVQTIEVNSFSGYLKLTDNVYIKNADIVEEAKKVKPTVVVNAANVYLKHGGGVAGALNKATNNAMQVESDDYIATNGPLKVGGSCVLSGHNLAKHCLHVVGPNVNKGEDIQLLKSAYENFNQHEVLLAPLLSAGIFGADPIHSLRVCVDTVRTNVYLAVFDKNLYDKLVSSFLEMKSEKQVEQKIAEIPKEEVKPFITESKPSVEQRKQDDKKIKACVEEVTTTLEETKFLTENLLLYIDINGNLHPDSATLVSDIDITFLKKDAPYIVGDVVQEGVLTAVVIPTKKAGGTTEMLAKALRKVPTDNYITTYPGQGLNGYTVEEAKTVLKKCKSAFYILPSIISNEKQEILGTVSWNLREMLAHAEETRKLMPVCVETKAIVSTIQRKYKGIKIQVGVVDYGARFYFYTSKTTVASLINTLNDLNETLVTMPLGYVTHGLNLEEAARYMRSLKVPATVSVSSPDAVTAYNGYLTSSSKTPEEHFIETISLAGSYKDWSYSGQSTQLGIEFLKRGDKSVYYTSNPTTFHLDGEVITFDNLKTLLSLREVRTIKVFTTVDNINLHTQVVDMSMTYGQQFGPTYLDGADVTKIKPHNSHEGKTFYVLPNDDTLRVEAFEYYHTTDPSFLGRYMSALNHTKKWKYPQVNGLTSIKWADNNCYLATALLTLQQIELKFNPPALQDAYYRARAGEAANFCALILAYCNKTVGELGDVRETMSYLFQHANLDSCKRVLNVVCKTCGQQQTTLKGVEAVMYMGTLSYEQFKKGVQIPCTCGKQATKYLVQQESPFVMMSAPPAQYELKHGTFTCASEYTGNYQCGHYKHITSKETLYCIDGALLTKSSEYKGPITDVFYKENSYTTTIKPVTYKLDGVVCTEIDPKLDNYYKKDNSYFTEQPIDLVPNQPYPNASFDNFKFVCDNIKFADDLNQLTGYKKPASRELKVTFFPDLNGDVVAIDYKHYTPSFKKGAKLLHKPIVWHVNNATNKATYKPNTWCIRCLWSTKPVETSNSFDVLKSEDAQGMDNLACEDLKPVSEEVVENPTIQKDVLECNVKTTEVVGDIILKPANNSLKITEEVGHTDLMAAYVDNSSLTIKKPNELSRVLGLKTLATHGLAAVNSVPWDTIANYAKPFLNKVVSTTTNIVTRCLNRVCTNYMPYFFTLLLQLCTFTRSTNSRIKASMPTTIAKNTVKSVGKFCLEASFNYLKSPNFSKLINIIIWFLLLSVCLGSLIYSTAALGVLMSNLGMPSYCTGYREGYLNSTNVTIATYCTGSIPCSVCLSGLDSLDTYPSLETIQITISSFKWDLTAFGLVAEWFLAYILFTRFFYVLGLAAIMQLFFSYFAVHFISNSWLMWLIINLVQMAPISAMVRMYIFFASFYYVWKSYVHVVDGCNSSTCMMCYKRNRATRVECTTIVNGVRRSFYVYANGGKGFCKLHNWNCVNCDTFCAGSTFISDEVARDLSLQFKRPINPTDQSSYIVDSVTVKNGSIHLYFDKAGQKTYERHSLSHFVNLDNLRANNTKGSLPINVIVFDGKSKCEESSAKSASVYYSQLMCQPILLLDQALVSDVGDSAEVAVKMFDAYVNTFSSTFNVPMEKLKTLVATAEAELVKNVSLDNVLSTFISAARQGFVDSDVETKDVVECLKLSHQSDIEVTGDSCNNYMLTYNKVENMTPRDLGACIDCSARHINAQVAKSHNIALIWNVKDFMSLSEQLRKQIRSAAKKNNLPFKLTCATTRQVVNVVTTKIALKGG

SEQ ID NO: 16158 - protein, 1946 aa, Artificial Sequence
  SARS-CoV-2__MT666042.1__non-structural protein 3 (NSP3)
MAPTKVTFGDDTVIEVQGYKSVNITFELDERIDKVLNEKCSAYTVELGTEVNEFACVVADAVIKTLQPVSELLTPLGIDLDEWSMATYYLFDESGEFKLASHMYCSFYPPDEDEEEGDCEEEEFEPSTQYEYGTEDDYQGKPLEFGATSAALQPEEEQEEDWLDDDSQQTVGQQDGSEDNQTTTIQTIVEVQPQLEMELTPVVQTIEVNSFSGYLKLTDNVYIKNADIVEEAKKVKPTVVVNAANVYLKHGGGVAGALNKATNNAMQVESDDYIATNGPLKVGGSCVLSGHNLAKHCLHVVGPNVNKGEDIQLLKSAYENFNQHEVLLAPLLSAGIFGADSIHSLRVCVDTVRTNVYLAVFDKNLYDKLVSSFLEMKSEKQVEQKIAEIPKEEVKPFITESKPSVEQRKQDDKKIKACVEEVTTTLEETKFLTENLLLYIDINGNLHPDSATLVSDIDITFLKKDAPYIVGDVVQEGVLTAVVIPTKKAGGTTEMLAKALRKVPTDNYITTYPGQGLNGYTVEEAKTVLKKCKSAFYILPSIISNEKQEILGTVSWNLREMLAHAEETRKLMPVCVETKAIVSTIQRKYKGIKIQEGVVDYGARFYFYTSKTTVASLINTLNDLNETLVTMPLGYVTHGLNLEEAARYMRSLKVPATVSVSSPDAVTAYNGYLTSSSKTPEEHFIETISLAGSYKDWSYSGQSTQLGIEFLKRGDKIVYYTSNPTTFHLDGEVITFDNLKTLLSLREVRTIKVFTTVDNINLHTQVVDMSMTYGQQFGPTYLDGADVTKIKPHNSHEGKTFYVLPNDYTLRVEAFEYYHTTDPSFLGRYMSALNHTKKWKYPQVNGLTSIKWADNNCYLATALLTLQQIELKFNPPALQDAYYRARAGEAANFCALILAYCNKTVGELGDVRETMSYLFQHANLDSCKRVLNVVCKTCGQQQTTLKGVEAVMYMGTLSYEQFKKGVQIPCTCGKQATKYLVQQESPFVMMSAPPAQYELKHGTFTCASEYTGNYQCGHYKHITSKETLYCIDGALLTKSSEYKGPITDVFYKENSYTTTIKPVTYKLDGVVCTEIDPKLDNYYKKDNSYFTEQPIDLVPNQPYPNASFDNFKFVCDNIKFADDLNQLTGYKKPASRELKVTFFPDLNGDVVAIDYKHYTPSFKKGAKLLHKPIVWHVNNATNKATYKPNTWCIRCLWSTKPVETSNSFDVLKSEDAQGMDNLACEDLKPVSEEVVENPTIQKDVLECNVKTTEVVGDIILKPANNSLKITEEVGHTDLMAAYVDNSSLTIKKPNELSRVLGLKTLATHGLAAVNSVPWDTIANYAKPFLNKVVSTTTNIVTRCLNRVCTNYMPYFFTLLLQLCTFTRSTNSRIKASMPTTIAKNTVKSVGKFCLEASFNYLKSPNFSKLINIIIWFLLLSVCLGSLIYSTAALGVLMSNLGMPSYCTGYREGYLNSTNVTIATYCTGSIPCSVCLSGLDSLDTYPSLETIQITISSFKWDLTAFGLVAEWFLAYILFTRFFYVLGLAAIMQLFFSYFAVHFISNSWLMWLIINLVQMAPISAMVRMYIFFASFYYVWKSYVHVVDGCNSSTCMMCYKRNRATRVECTTIVNGVRRSFYVYANGGKGFCKLHNWNCVNCDTFCAGSTFISDEVARDLSLQFKRPINPTDQSSYIVDSVTVKNGSIHLYFDKAGQKTYERHSLSHFVNLDNLRANNTKGSLPINVIVFDGKSKCEESSAKSASVYYSQLMCQPILLLDQALVSDVGDSAEVAVKMFDAYVNTFSSTFNVPMEKLKTLVATAEAELAKNVSLDNVLSTFISAARQGFVDSDVETKDVVECLKLSHQSDIEVTGDSCNNYMLTYNKVENMTPRDLGACIDCSARHINAQVAKSHNIALIWNVKDFMSLSEQLRKQIRSAAKKNNLPFKLTCATTRQVVNVVTTKIALKGG

SEQ ID NO: 16159 - protein, 1946 aa, Artificial Sequence
  SARS-CoV-2__MT666099.1__non-structural protein 3 (NSP3)
MAPTKVTFGDDTVIEVQGYKSVNITFELDERIDKVLNEKCSAYTVELGTEVNEFACVVADAVIKTLQPVSELLTPLGIDLDEWSMATYYLFDESGEFKLASHMYCSFYPPDEDEEEGDCEEEEFEPSTQYEYGTEDDYQGKPLEFGATSAALQPEEEQEEDWLDDDSQQTVGQQDGSEDNQTTTIQTIVEVQPQLEMELTPVVQTIEVNSFSGYLKLTDNVYIKNADIVEEAKKVKPTVVVNAANVYLKHGGGVAGALNKATNNAMQVESDDHIATNGPLKVGGSCVLSGHNLAKHCLHVVGPNVNKGEDIQLLKSAYENFNQHEVLLAPLLSAGIFGADPIHSLRVCVDTVRTNVYLAVFDKNLYDKLVSSFLEMKSEKQVEQKIAEIPKEEVKPFITESKPSVEQRKQDDKKIKACVEEVTTTLEETKFLTENLLLYIDINGNLHPDSATLVSDIDITFLKKDAPYIVGDVVQEGVLTAVVIPTKKAGGTTEMLAKALRKVPTDNYITTYPGQGLNGYTVEEAKTVLKKCKSAFYILPSIISNEKQEILGTVSWNLREMLAHAEETRKLMPVCVETKAIVSTIQRKYKGIKIQEGVVDYGARFYFYTSKTTVASLINTLNDLNETLVTMPLGYVTHGLNLEEAARYMRSLKVPATVSVSSPDAVTAYNGYLTSSSKTPEEHFIETISLAGSYKDWSYSGQSTQLGIEFLKRGDKSVYYTSNPTTFHLDGEVITFDNLKTLLSLREVRTIKVFTTVDNINLHTQVVDMSMTYGQQFGPTYLDGADVTKIKPHNSHEGKTFYVLPNDDTLRVEAFEYYHTTDPSFLGRYMSALNHTKKWKYPQVNGLTSIKWADNNCYLATALLTLQQIELKFNPPALQDAYYRARAGEAANFCALILAYCNKTVGELGDVRETMSYLFQHANLDSCKRVLNVVCKTCGQQQTTLKGVEAVMYMGTLSYEQFKKGVQIPCTCGKQATKYLVQQESPFVMMSAPPAQYELKHGTFTCASEYTGNYQCGHYKHITSKETLYCIDGALLTKSSEYKGPITDVFYKENSYTTTIKPVTYKLDGVVCTEIDPKLDNYYKKDNSYFTEQPIDLVPNQPYPNASFDNFKFVCDNIKFADDLNQLTGYKKPASRELKVTFFPDLNGDVVAIDYKHYTPSFKKGAKLLHKPIVWHVNNATNKATYKPNTWCIRCLWSTKPVETSNSFDVLKSEDAQGMDNLACEDLKPVSEEVVENPTIQKDVLECNVKTTEVVGDIILKPANNSLKITEEVGHTDLMAAYVDNSSLTIKKPNELSRVLGLKTLATHGLAAVNSVPWDTIANYAKPFLNKVVSTTTNIVTRCLNRVCTNYMPYFFTLLLQLCTFTRSTNSRIKASMPTTIAKNTVKSVGKFCLEASFNYLKSPNFSKLINIIIWFLLLSVCLGSLIYSTAALGVLMSNLGMPSYCTGYREGYLNSTNVTIATYCTGSIPCSVCLSGLDSLDTYPSLETIQITISSFKWDLTAFGLVAEWFLAYILFTRFFYVLGLAAIMQLFFSYFAVHFISNSWLMWLIINLVQMAPISAMVRMYIFFASFYYVWKSYVHVVDGCNSSTCMMCYKRNRATRVECTTIVNGVRRSFYVYANGGKGFCKLHNWNCVNCDTFCAGSTFISDEVARDLSLQFKRPINPTDQSSYIVDSVTVKNGSIHLYFDKAGQKTYERHSLSHFVNLDNLRANNTKGSLPINVIVFDGKSKCEESSAKSASVYYSQLMCQPILLLDQALVSDVGDSAEVAVKMFDAYVNTFSSTFNVPMEKLKTLVATAEAELAKNVSLDNVLSTFISAARQGFVDSDVETKDVVECLKLSHQSDIEVTGDSCNNYMLTYNKVENMTPRDFGACIDCSARHINAQVAKSHNIALIWNVKDFMSLSEQLRKQIRSAAKKNNLPFKLTCATTRQVVNVVTTKIALKGG

SEQ ID NO: 16160 - protein, 1946 aa, Artificial Sequence
  SARS-CoV-2__MT655744.1__non-structural protein 3 (NSP3)
MAPTKVTFGDDTVIEVQGYKSVNITFELDERIDKVLNEKCSAYTVELGTEVNEFACVVADAVIKTLQPVSELLTPLGIDLDEWSMATYYLFDESGEFKLASHMYCSFYPPDEDEEEGDCEEEEFEPSTQYEYGTEDDYQGKPLEFGATSAALQPEEEQEEDWLDDDSQQTVGQQDGSEDNQTTTIQTIVEVQPQLEMELTPVVQTIEVNSFSGYLKLTDNVYIKNADIVEEAKKVKPTVVVNAANVYLKHGGGVAGALNKATNNAMQVESDDYIATNGPLKVGGSCVLSGHNLAKHCLHVVGPNVNKGEDIQLLKSAYENFNQHEVLLAPLLSAGIFGADPIHSLRVCVDTVRTNVYLAVFDKNLYDKLVSSFLEMKSEKQVEQKIAEIPKEEVKPFITESKPSVEQRKQDDKKIKACVEEVTTTLEETKFLTENLLLYIDINGNLHPDSATLVSDIDITFLKKDAPYIVGDVVQEGVLTAVVIPTKKAGGTTEMLAKALRKVPTDNYITTYPGQGLNGYTVEEAKTVLKKCKSAFYILPSIISNEKQEILGTVSWNLREMLAHAEETRKLMPVCVETKAIVSTIQRKYKGIKIQEGVVDYGARFYFYTSKTTVASLINTLNDLNETLVTMPLGYVTHGLNLEEAARYMRSLKVPATVSVSSPDAVTAYNGYLTSSSKTPEEHFIETISLAGSYKDWSYSGQSTQLGIEFLKRGDKSVYYTSNPTTFHLDGEVITFDNLKTLLSLREVRTIKVFTTVDNINLHTQVVDMSMTYGQQFGPTYLDGADVTKIKPHNSHEGKTFYVLPNDDTLRVEAFEYYHTTDPSFLGRYMSALNHTKKWKYPQVNGLTSIKWADNNCYLATALLTLQQIELKFNPPALQDAYYGARAGEAANFCALILAYCNKTVGELGDVRETMSYLFQHANLDSCKRVLNVVCKTCGQQQTTLKGVEAVMYMGTLSYEQFKKGVQIPCTCGKQATKYLVQQESPFVMMSAPPAQYELKHGTFTCASEYTGNYQCGHYKHITSKETLYCIDGALLTKFSEYKGPITDVFYKENSYTTTIKPVTYKLDGVVCTEIDPKLDNYYKKDNSYFTEQPIDLVPNQPYPNASFDNFKFVCDNIKFADDLNQLTGYKKPASRELKVTFFPDLNGDVVAIDYKHYTPSFKKGAKLLHKPIVWHVNNATNKATYKPNTWCIRCLWSTKPVETSNSFDVLKSEDAQGMDNLACEDLKPVSEEVVENPTIQKDVLECNVKTTEVVGDIILKPANNSLKITEEVGHTDLMAAYVDNSSLTIKKPNELSRVLGLKTLATHGLAAVNSVPWDTIANYAKPFLNKVVSTTTNIVTRCLNRVCTNYMPYFFTLLLQLCTFTRSTNSRIKASMPTTIAKNTVKSVGKFCLEASFNYLKSPNFSKLINIIIWFLLLSVCLGSLIYSTAALGVLMSNLGMPSYCTGYREGYLNSTNVTIATYCTGSIPCSVCLSGLDSLDTYPSLETIQITISSFKWDLTAFGLVAEWFLAYILFTRFFYVLGLAAIMQLFFSYFAVHFISNSWLMWLIINLVQMAPISAMVRMYIFFASFYYVWKSYVHVVDGCNSSTCMMCYKRNRATRVECTTIVNGVRRSFYVYANGGKGFCKLHNWNCVNCDTFCAGSTFISDEVARDLSLQFKRPINPTDQSSYIVDSVTVKNGSIHLYFDKAGQKTYERHSLSHFVNLDNLRANNTKGSLPINVIVFDGKSKCEESSAKSASVYYSQLMCQPILLLDQALVSDVGDSAEVAVKMFDAYVNTFSSTFNVPMEKLKTLVATAEAELAKNVSLDNVLSTFISAARQGFVDSDVETKDVVECLKLSHQSDIEVTGDSCNNYMLTYNKVENMTPRDLGACIDCSARHINAQVAKSHNIALIWNVKDFMSLSEQLRKQIRSAAKKNNLPFKLTCATTRQVVNVVTTKIALKGG

SEQ ID NO: 16161 - protein, 1946 aa, Artificial Sequence
  SARS-CoV-2__MT656257.1__non-structural protein 3 (NSP3)
MAPTKVTFGDDTVIEVQGYKSVNITFELDERIDKVLNEKCSAYTVELGTEVNEFACVVADAVIKILQPVSELLTPLGIDLDEWSMATYYLFDESGEFKLASHMYCSFYPPDEDEEEGDCEEEEFEPSTQYEYGTEDDYQGKPLEFGATSAALQPEEEQEEDWLDDDSQQTVGQQDGSEDNQTTTIQTIVEVQPQLEMELTPVVQTIEVNSFSGYLKLTDNVYIKNADIVEEAKKVKPTVVVNAANVYLKHGGGVAGALNKATNNAMQVESDDYIATNGPLKVGGSCVLSGHNLAKHCLHVVGPNVNKGEDIQLLKSAYENFNQHEVLLAPLLSAGIFGADPIHSLRVCVDTVRTNVYLAVFDKNLYDKLVLSFLEMKSEKQVEQKIAEIPKEEVKPFITESKPSVEQRKQDDKKIKACVEEVTTTLEETKFLTENLLLYIDINGNLHPDSATLVSDIDITFLKKDAPYIVGDVVQEGVLTAVVIPTKKAGGTTEMLAKALRKVPTDNYITTYPGQGLNGYTVEEAKTVLKKCKSAFYILPSIISNEKQEILGTVSWNLREMLAHAEETRKLMPVCVETKAIVSTIQRKYKGIKIQEGVVDYGARFYFYTSKTTVASLINTLNDLNETLVTMPLGYVTHGLNLEEAARYMRSLKVPATVSVSSPDAVTAYNGYLTSSSKTPEEHFIETISLAGSYKDWSYSGQSTQLGIEFLKRGDKSVYYTSNPTTFHLDGEVITFDNLKTLLSLREVRTIKVFTTVDNINLHTQVVDMSMTYGQQFGPTYLDGADVTKIKPHNSHEGKTFYVLPNDDTLRVEAFEYYHTTDPSFLGRYMSALNHTKKWKYPQVNGLTSIKWADNNCYLATALLTLQQIELKFNPPALQDAYYRARAGEAANFCALILAYCNKTVGELGDVRETMSYLFQHANLDSCKRVLNVVCKTCGQQQTTLKGVEAVMYMGTLSYEQFKKGVQIPCTCGKQATKYLVQQESPFVMMSAPPAQYELKHGTFTCASEYTGNYQCGHYKHITSKETLYCIDGALLTKSSEYKGPITDVFYKENSYTTTIKPVTYKLDGVVCTEIDPNLDNYYKKDNSYFTEQPIDLVPNQPYPNASFDNFKFVCDNIKFADDLNQLTGYKKPASRELKVTFFPDLNGDVVAIDYKHYTPSFKKGAKLLHKPIVWHVNNATNKATYKPNTWCIRCLWSTKPVETSNSFDVLKSEDAQGMDNLACEDLKPVSEEVVENPTIQKDVLECNVKTTEVVGDIILKPANNSLKITEEVGHTDLMAAYVDNSSLTIKKPNELSRVLGLKTLATHGLAAVNSVPWDTIANYAKPFLNKVVSTTTNIVTRCLNRVCTNYMPYFFTLLLQLCTFTRSTNSRIKASMPTTIAKNTVKSVGKFCLEASFNYLKSPNFSKLINIIIWFLLLSVCLGSLIYSTAALGVLMSNLGMPSYCTGYREGYLNSTNVTIATYCTGSIPCSVCLSGLDSLDTYPSLETIQITISSFKWDLTAFGLVAEWFLAYILFTRFFYVLGLAAIMQLFFSYFAVHFISNSWLMWLIINLVQMAPISAMVRMYIFFASFYYVWKSYVHVVDGCNSSTCMMCYKRNRATRVECTTIVNGVRRSFYVYANGGKGFCKLHNWNCVNCDTFCAGSTFISDEVARDLSLQFKRPINPTDQSSYIVDSVTVKNGSIHLYFDKAGQKTYERHSLSHFVNLDNLRANNTKGSLPINVIVFDGKSKCEESSAKSASVYYSQLMCQPILLLDQALVSDVGDSAEVAVKMFDAYVNTFSSTFNVPMEKLKTLVATAEAELAKNVSLDNVLSTFISAARQGFVDSDVETKDVVECLKLSHQSDIEVTGDSCNNYMLTYNKVENMTPRDLGACIDCSARHINAQVAKSHNIALIWNVKDFMSLSEQLRKQIRSAAKKNNLPFKLTCATTRQVVNVVTTKIALKGG

SEQ ID NO: 16162 - protein, 1946 aa, Artificial Sequence
  SARS-CoV-2__MT657958.1__non-structural protein 3 (NSP3)
MAPTKVTFGDDTVIEVQGYKSVNITFELDERIDKVLNEKCSAYTVELGTEVNEFACVVADAVIKTLQPVSELLTPLGIDLDEWSMATYYLFDESGEFKLASHMYCSFYPPDEDEEEGDCEEEEFEPSTQYEYGTEDDYQGKPLEFGATSAALQPEEEQEEDWLDDDSQQTVGRQDGSEDNQTTTIQTIVEVQPQLEMELTPVVQTIEVNSFSGYLKLTDNVYIKNADIVEEAKKVKPTVVVNAANVYLKHGGGVAGALNKATNNAMQVESDDYIATNGPLKVGGSCVLSGHNLAKHCLHVVGPNVNKGEDIQLLKSAYENFNQHEVLLAPLLSAGIFGADPIHSLRVCVDTVRTNVYLAVFDKNLYDKLVSSFLEMKSEKQVEQKIAEIPKEEVKPFITESKPSVEQRKQDDKKIKACVEEVTTTLEETKFLTENLLLYIDINGNLHPDSATLVSDIDITFLKKDAPYIVGDVVQEGVLTAVVIPTKKAGGTTEMLAKALRKVPTDNYITTYPGQGLNGYTVEEAKTVLKKCKSAFYILPSIISNEKQEILGTVSWNLREMLAHAEETRKLMPVCVETKAIVSTIQRKYKGIKIQEGVVDYGARFYFYTSKTTVASLINTLNDLNETLVTMPLGYVTHGLNLEEAARYMRSLKVPATVSVSSPDAVTAYNGYLTSSSKTPEEHFIETISLAGSYKDWSYSGQSTQLGIEFLKRGDKSVYYTSNPTTFHLDGEVITFDNLKTLLSLREVRTIKVFTTVDNINLHTQVVDMSMTYGQQFGPTYLDGADVTKIKPHNSHEGKTFYVLPNDDTLRVEAFEYYHTTDPSFLGRYMSALNHTKKWKYPQVNGLTSIKWADNNCYLATALLTLQQIELKFNPPALQDAYYRARAGEAANFCALILAYCNKTVGELGDVRETMSYLFQHANLDSCKRVLNVVCKTCGQQQTTLKGVEAVMYMGTLSYEQFKKGVQIPCTCGKQATKYLVQQESPFVMMSAPPAQYELKHGTFTCASEYTGNYQCGHYKHITSKETLYCIDGALLTKSSEYKGPITDVFYKENSYTTTIKPVTYKLDGVVCTEIDPKLDNYYKKDNSYFTEQPIDLVPNQPYPNASFDNFKFVCDNIKFADDLNQLTGYKKPASRELKVTFFPDLNGDVVAIDYKHYTPSFKKGAKLLHKPIVWHVNNATNKATYKPNTWCIRCLWSTKPVETSNSFDVLKSEDAQGMDNLACEDLKPVSEEVVENPTIQKDVLECNVKTTEVVGDIILKPANNSLKITEEVGHTDLMAAYVDNSSLTIKKPNELSRVLGLKTLATHGLAAVNSVPWDTIANYAKPFLNKVVSTTTNIVTRCLNRVCTNYMPYFFTLLLQLCTFTRSTNSRIKASMPTTIAKNTVKSVGKFCLEASFNYLKSPNFSKLINIIIWFLLLSVCLGSLIYSTAALGVLMSNLGMPSYCTGYREGYLNSTNVTIATYCTGSIPCSVCLSGLDSLDTYPSLETIQITISSFKWDLTAFGLVAEWFLAYILFTRFFYVLGLAAIMQLFFSYFAVHFISNSWLMWLIINLVQMAPISAMVRMYIFFASFYYVWKSYVHVVDGCNSSTCMMCYKRNRATRVECTTIVNGVRRSFYVYANGGKGFCKLHNWNCVNCDTFCAGSTFISDEVARDLSLQFKRPINPTDQSSYIVDSVTVKNGSIHLYFDKAGQKTYERHSLSHFVNLDNLRANNTKGSLPINVIVFDGKSKCEESSAKSASVYYSQLMCQPILLLDQALVSDVGDSAEVAVKMFDAYVNTFSSTFNVPMEKLKTLVATAEAELAKNVSLDNVLSTFISAARQGFVDSDVETKDVVECLKLSHQSDIEVTGDSCNNYMLTYNKVENMTPRDLGACIDCSARHINAQVAKSHNIALIWNVKDFMSLSEQLRKQIRSAAKKNNLPFKLTCATTRQVVNVVTTKIALKGG

SEQ ID NO: 16163 - protein, 1946 aa, Artificial Sequence
  SARS-CoV-2__MT646054.1__non-structural protein 3 (NSP3)
MAPTKVTFGDDTVIEVQGYKSVNITFELDERIDKVLNEKCSAYTVELGTEVNEFACVVADAVIKTLQPVSELLTPLGIDLDEWSMATYYLFDESGEFKLASHMYCSFYPPDEDEEEGDCEEEEFEPSTQYEYGTEDDYQGKPLEFGATSAALQPEEEQEEDWLDDDSQQTVGQQDGSEDNQTTTIQTIVEVQPQLEMELTPVVQTIEVNSFSGYLKLTDNVYIKNADIVEEAKKVKPTVVVNAANVYLKHGGGVAGALNKATNNAMQVESDDYIATNGPLKVGGSCVLSGHNLAKHCLHVVGPNVNKGEDIQLLKSAYENFNQHEVLLAPLLSAGIFGADPIHSLRVCVDTVRTNVYLAVFDKNLYDKLVSSFLEMKSEKQVEQKIAEIPKEEVKPFITESKPSVEQRKQDDKKIKACVEEVTTTLEETKFLTENLLLYIDINGNLHPDSATLVSDIDITFLKKDAPYIVGDVVQEGVLTAVVIPTKKAGGTTEMLAKALRKVPTDNYITTYPGQGLNGYTVEEAKTVLKKCKSAFYILPSIISNEKQEILGTVSWNLREMLAHAEETRKLMPVCVETKAIVSTIQRKYKGIKIQEGVVDYGARFYFYTSKTTVASLINTLNDLHETLVTMPLGYVTHGLNLEEAARYMRSLKVPATVSVSSPDAVTAYNGYLTSSSKTPEEHFIETISLAGSYKDWSYSGQSTQLGIEFLKRGDKSVYYTSNPTTFHLDGEVITFDNLKTLLSLREVRTIKVFTTVDNINLHTQVVDMSMTYGQQFGPTYLDGADVTKIKPHNSHEGKTFYVLPNDDTLRVEAFEYYHTTDPSFLGRYMSALNHTKKWKYPQVNGLTSIKWADNNCYLATALLTLQQIELKFNPPALQDAYYRARAGEAANFCALILAYCNKTVGELGDVRETMSYLFQHANLDSCKRVLNVVCKTCGQQQTTLKGVEAVMYMGTLSYEQFKKGVQIPCTCGKQATKYLVQQESPFVMMSAPPAQYELKHGTFTCASEYTGNYQCGHYKHITSKETLYCIDGALLTKSSEYKGPITDVFYKENSYTTTIKPVTYKLDGVVCTEIDPKLDNYYKKDNSYFTEQPIDLVPNQPYPNASFDNFKFVCDNIKFADDLNQLTGYKKPASRELKVTFFPDLNGDVVAIDYKHYTPSFKKGAKLLHKPIVWHVNNATNKATYKPNTWCIRCLWSTKPVETSNSFDVLKSEDAQGMDNLACEDLKPVSEEVVENPTIQKDVLECNVKTTEVVGDIILKPANNSLKITEEVGHTDLMAAYVDNSSLTIKKPNELSRVLGLKTLATHGLAAVNSVPWDTIANYAKPFLNKVVSTTTNIVTRCLNRVCTNYMPYFFTLLLQLCTFTRSTNSRIKASMPTTIAKNTVKSVGKFCLEASFNYLKSPNFSKLINIIIWFLLLSVCLGSLIYSTAALGVLMSNLGMPSYCTGYREGYLNSTNVTIATYCTGSIPCSVCLSGLDSLDTYPSLETIQITISSFKWDLTAFGLVAEWFLAYILFTRFFYVLGLAAIMQLFFSYFAVHFISNSWLMWLIINLVQMAPISAMVRMYIFFASFYYVWKSYVHVVDGCNSSTCMMCYKRNRATRVECTTIVNGVRRSFYVYANGGKGFCKLHNWNCVNCDTFCAGSTFISDEVARDLSLQFKRPINPTDQSSYIVDSVTVKNGSIHLYFDKAGQKTYERHSLSHFVNLDNLRANNTKGSLPINVIVFDGKSKCEESSAKSASVYYSQLMCQPILLLDQALVSDVGDSAEVAVKMFDAYVNTFSSTFNVPMEKLKTLVATAEAELAKNVSLDNVLSTFISAARQGFVDSDVETKDVVECLKLSHQSDIEVTGDSCNNYMLTYNKVENMTPRDLGACIDCSARHINAQVAKSHNIALIWNVKDFMSLSEQLRKQIRSAAKKNNLPFKLTCATTRQVVNVVTTKIALKGG

SEQ ID NO: 16164 - protein, 1946 aa, Artificial Sequence
  SARS-CoV-2__MT646073.1__non-structural protein 3 (NSP3)
MAPTKVTFGDDTVIEVQGYKSVNITFELDERIDKVLNEKCSAYTVELGTEVNEFACVVADAVIKTLQPVSELLTPLGIDLDEWSMATYYLFDESGEFKLASHMYCSFYPPDEDEEEGDCEEEEFEPSTQYEYGTEDDYQGKPLEFGATSAALQPEEEQEEDWLDDDSQQTVGQQDGSEDNQTTTIQTIVEVQPQLEMELTPVVQTIEVNSFSGYLKLTDNVYIKNADIVEEAKKVKPTVVVNAANVYLKHGGGVAGALNKATNNAMQVESDDYIATNGPLKVGGSCVLSGHNLAKHCLHVVGPNVNKGEDIQLLKSAYENFNQHEVLLAPLLSAGIFGADPIHSLRVCVDTVRTNVYLAVFDKNLYDKLVSSFLEMKSEKQVEQKIAEIPKEEVKPFITESKPSVEQRKQDDKKIKACVEEVTTTLEETKFLTENLLLYIDINGNLHPDSATLVSDIDITFLKKDAPYIVGDVVQEGVLTAVVIPTKKAGGTTEMLAKALRKVPTDNYITTYPGQGLNGYTVEEAKTVLKKCKSAFYILPSIISNEKQEILGTVSWNLREMLAHAEETRKLMPVCVETKAIVSTIQRKYKGIKIQDGVVDYGARFYFYTSKTTVASLINTLNDLNETLVTMPLGYVTHGLNLEEAARYMRSLKVPATVSVSSPDAVTAYNGYLTSSSKTPEEHFIETISLAGSYKDWSYSGQSTQLGIEFLKRGDKSVYYTSNPTTFHLDGEVITFDNLKTLLSLREVRTIKVFTTVDNINLHTQVVDMSMTYGQQFGPTYLDGADVTKIKPHNSHEGKTFYVLPNDDTLRVEAFEYYHTTDPSFLGRYMSALNHTKKWKYPQVNGLTSIKWADNNCYLATALLTLQQIELKFNPPALQDAYYRARAGEAANFCALILAYCNKTVGELGDVRETMSYLFQHANLDSCKRVLNVVCKTCGQQQTTLKGVEAVMYMGTLSYEQFKKGVQIPCTCGKQATKYLVQQESPFVMMSAPPAQYELKHGTFTCASEYTGNYQCGHYKHITSKETLYCIDGALLTKSSEYKGPITDVFYKENSYTTTIKPVTYKLDGVVCTEIDPKLDNYYKKDNSYFTEQPIDLVPNQPYPNASFDNFKFVCDNIKFADDLNQLTGYKKPASRELKVTFFPDLNGDVVAIDYKHYTPSFKKGAKLLHKPIVWHVNNATNKATYKPNTWCIRCLWSTKPVETSNSFDVLKSEDAQGMDNLACEDLKPVSEEVVENPTIQKDVLECNVKTTEVVGDIILKPANNSLKITEEVGHTDLMAAYVDNSSLTIKKPNELSRVLGLKTLATHGLAAVNSVPWDTIANYAKPFLNKVVSTTTNIVTRCLNRVCTNYMPYFFTLLLQLCTFTRSTNSRIKASMPTTIAKNTVKSVGKFCLEASFNYLKSPNFSKLINIIIWFLLLSVCLGSLIYSTAALGVLMSNLGMPSYCTGYREGYLNSTNVTIATYCTGSIPCSVCLSGLDSLDTYPSLETIQITISSFKWDLTAFGLVAEWFLAYILFTRFFYVLGLAAIMQLFFSYFAVHFISNSWLMWLIINLVQMAPISAMVRMYIFFASFYYVWKSYVHVVDGCNSSTCMMCYKRNRATRVECTTIVNGVRRSFYVYANGGKGFCKLHNWNCVNCDTFCAGSTFISDEVARDLSLQFKRPINPTDQSSYIVDSVTVKNGSIHLYFDKAGQKTYERHSLSHFVNLDNLRANNTKGSLPINVIVFDGKSKCEESSAKSASVYYSQLMCQPILLLDQALVSDVGDSAEVAVKMFDAYVNTFSSTFNVPMEKLKTLVATAEAELAKNVSLDNVLSTFISAARQGFVDSDVETKDVVECLKLSHQSDIEVTGDSCNNYMLTYNKVENMTPRDLGACIDCSARHINAQVAKSHNIALIWNVKDFMSLSEQLRKQIRSAAKKNNLPFKLTCATTRQVVNVVTTKIALKGG

SEQ ID NO: 16165 - protein, 1946 aa, Artificial Sequence
  SARS-CoV-2__MT641485.1__non-structural protein 3 (NSP3)
MAPTKVTFGDDTVIEVQGYKSVNITFELDERIDKVLNEKCSAYTVELGTEVNEFACVVADAVIKTLQPVSELLTPLGIDLDEWSMATYYLFDESGEFKLASHMYCSFYPPDEDEEEGDCEEEEFEPSTQYEYGTEDDYQGKPLEFGATSAALQPEEEQEEDWLDDDSQQTVGQQDGSEDNQTTTIQTIVEVQPQLEMELTPVVQTIEVNSFSGYLKLTDNVYIKNADIVEEAKKVKPTVVVNAANVYLKHGGGVAGALNKATNNAMQVESDDYIATNGPLKVGGSCVLSGHNLAKHCLHVVGPNVNKGEDIQLLKSAYENFNQHEVLLAPLLSAGIFGADPIHSLRVCVDTVRTNVYLAVFDKNLYDKLVSSFLEMKSEKQVEQKIAEIPKEEVKPFITESKPSVEQRKQDDNKIKACVEEVTTTLEETKFLTENLLLYIDINGNLHPDSATLVSDIDITFLKKDAPYIVGDVVQEGVLTAVVIPTKKAGGTTEMLAKALRKVPTDNYITTYPGQGLNGYTVEEAKTVLKKCKSAFYILPSIISNEKQEILGTVSWNLREMLAHAEETRKLMPVCVETKAIVSTIQRKYKGIKIQEGVVDYGARFYFYTSKTTVASLINTLNDLNETLVTMPLGYVTHGLNLEEAARYMRSLKVPATVSVSSPDAVTAYNGYLTSSSKTPEEHFIETISLAGSYKDWSYSGQSTQLGIEFLKRGDKSVYYTSNPTTFHLDGEVITFDNLKTLLSLREVRTIKVFTTVDNINLHTQVVDMSMTYGQQFGPTYLDGADVTKIKPHNSHEGKTFYVLPNDDTLRVEAFEYYHTTDPSFLGRYMSALNHTKKWKYPQVNGLTSIKWADNNCYLATALLTLQQIELKFNPPALQDAYYRARAGEAANFCALILAYCNKTVGELGDVRETMSYLFQHANLDSCKRVLNVVCKTCGQQQTTLKGVEAVMYMGTLSYEQFKKGVQIPCTCGKQATKYLVQQESPFVMMSAPPAQYELKHGTFTCASEYTGNYQCGHYKHITSKETLYCIDGALLTKSSEYKGPITDVFYKENSYTTTIKPVTYKLDGVVCTEIDPKLDNYYKKDNSYFTEQPIDLVPNQPYPNASFDNFKFVCDNIKFADDLNQLTGYKKPASRELKVTFFPDLNGDVVAIDYKHYTPSFKKGAKLLHKPIVWHVNNATNKATYKPNTWCIRCLWSTKPVETSNSFDVLKSEDAQGMDNLACEDLKPVSEEVVENPTIQKDVLECNVKTTEVVGDIILKPANNSLKITEEVGHTDLMAAYVDNSSLTIKKPNELSRVLGLKTLATHGLAAVNSVPWDTIANYAKPFLNKVVSTTTNIVTRCLNRVCTNYMPYFFTLLLQLCTFTRSTNSRIKASMPTTIAKNTVKSVGKFCLEASFNYLKSPNFSKLINIIIWFLLLSVCLGSLIYSTAALGVLMSNLGMPSYCTGYREGYLNSTNVTIATYCTGSIPCSVCLSGLDSLDTYPSLETIQITISSFKWDLTAFGLVAEWFLAYILFTRFFYVLGLAAIMQLFFSYFAVHFISNSWLMWLIINLVQMAPISAMVRMYIFFASFYYVWKSYVHVVDGCNSSTCMMCYKRNRATRVECTTIVNGVRKSFYVYANGGKGFCKLHNWNCVNCDTFCAGSTFISDEVARDLSLQFKRPINPTDQSSYIVDSVTVKNGSIHLYFDKAGQKTYERHSLSHFVNLDNLRANNTKGSLPINVIVFDGKSKCEESSAKSASVYYSQLMCQPILLLDQALVSDVGDSAEVAVKMFDAYVNTFSSTFNVPMEKLKTLVATAEAELAKNVSLDNVLSTFISAARQGFVDSDVETKDVVECLKLSHQSDIEVTGDSCNNYMLTYNKVENMTPRDLGACIDCSARHINAQVAKSHNIALIWNVKDFMSLSEQLRKQIRSAAKKNNLPFKLTCATTRQVVNVVTTKIALKGG

SEQ ID NO: 16166 - protein, 1946 aa, Artificial Sequence
  SARS-CoV-2__MT641489.1__non-structural protein 3 (NSP3)
MAPTKVTFGDDTVIEVQGYKSVNITFELDERIDKVLNEKCSAYTVELGTEVNEFACVVADAVIKTLQPVSELLTPLGIDLDEWSMATYYLFDESGEFKLASHMYCSFYPPDEDEEEGDCEEEEFEPSTQYEYGTEDDYQGKPLEFGATSAALQPEEEQEEDWLDDDSQQTVGQQDGSEDNQTTTIQTIVEVQPQLEMEITPVVQTIEVNSFSGYLKLTDNVYIKNADIVEEAKKVKPTVVVNAANVYLKHGGGVAGALNKATNNAMQVESDDYIATNGPLKVGGSCVLSGHNLAKHCLHVVGPNVNKGEDIQLLKSAYENFNQHEVLLAPLLSAGIFGADPIHSLRVCVDTVRTNVYLAVFDKNLYDKLVSSFLEMKSEKQVEQKIAEIPKEEVKPFITESKPSVEQRKQDDKKIKACVEEVTTTLEETKFLTLNLLLYIDINGNLHPDSATLVSDIDITFLKKDAPYIVGDVVQEGVLTAVVIPTKKAGGTTEMLAKALRKVPTDNYITTYPGQGLNGYTVEEAKTVLKKCKSAFYILPSIISNEKQEILGTVSWNLREMLAHAEETRKLMPVCVETKAIVSTIQRKYKGIKIQEGVVDYGARFYFYTSKTTVASLINTLNDLNETLVTMPLGYVTHGLNLEEAARYMRSLKVPATVSVSSPDAVTAYNGYLTSSSKTPEEHFIETISLAGSYKDWSYSGQSTQLGIEFLKRGDKSVYYTSNPTTFHLDGEVITFDNLKTLLSLREVRTIKVFTTVDNINLHTQVVDMSMTYGQQFGPTYLDGADVTKIKPHNSHEGKTFYVLPNDDTLRVEAFEYYHTTDPSFLGRYMSALNHTKKWKYPQVNGLTSIKWADNNCYLATALLTLQQIELKFNPPALQDAYYRARAGEAANFCALILAYCNKTVGELGDVRETMSYLFQHANLDSCKRVLNVVCKTCGQQQTTLKGVEAVMYMGTLSYEQFKKGVQIPCTCGKQATKYLVQQESPFVMMSAPPAQYELKHGTFTCASEYTGNYQCGHYKHITSKETLYCIDGALLTKSSEYKGPITDVFYKENSYTTTIKPVTYKLDGVVCTEIDPKLDNYYKKDNSYFTEQPIDLVPNQPYPNASFDNFKFVCDNIKFADDLNQLTGYKKPASRELKVTFFPDLNGDVVAIDYKHYTPSFKKGAKLLHKPIVWHVNNATNKATYKPNTWCIRCLWSTKPVETSNSFDVLKSEDAQGMDNLACEDLKPVSEEVVENPTIQKDVLECNVKTTEVVGDIILKPANNSLKITEEVGHTDLMAAYVDNSSLTIKKPNELSRVLGLKTLATHGLAAVNSVPWDTIANYAKPFLNKVVSTTTNIVTRCLNRVCTNYMPYFFTLLLQLCTFTRSTNSRIKASMPTTIAKNTVKSVGKFCLEASFNYLKSPNFSKLINIIIWFLLLSVCLGSLIYSTAALGVLMSNLGMPSYCTGYREGYLNSTNVTIATYCTGSIPCSVCLSGLDSLDTYPSLETIQITISSFKWDLTAFGLVAEWFLAYILFTRFFYVLGLAAIMQLFFSYFAVHFISNSWLMWLIINLVQMAPISAMVRMYIFFASFYYVWKSYVHVVDGCNSSTCMMCYKRNRATRVECTTIVNGVRRSFYVYANGGKGFCKLHNWNCVNCDTFCAGSTFISDEVARDLSLQFKRPINPTDQSSYIVDSVTVKNGSIHLYFDKAGQKTYERHSLSHFVNLDNLRANNTKGSLPINVIVFDGKSKCEESSAKSASVYYSQLMCQPILLLDQALVSDVGDSAEVAVKMFDAYVNTFSSTFNVPMEKLKTLVATAEAELAKNVSLDNVLSTFISAARQGFVDSDVETKDVVECLKLSHQSDIEVTGDSCNNYMLTYNKVENMTPRDLGACIDCSARHINAQVAKSHNIALIWNVKDFMSLSEQLRKQIRSAAKKNNLPFKLTCATTRQVVNVVTTKIALKGG

SEQ ID NO: 16167 - protein, 1946 aa, Artificial Sequence
  SARS-CoV-2__MT641492.1__non-structural protein 3 (NSP3)
MAPTKVTFGDDTVIEVQGYKSVNITFELDERIDKVLNEKCSAYTVELGTEVNEFACVVADAVIKTLQPVSELLTPLGIDLDEWSMATYYLFDESGEFKLASHMYCSFYPPDEDEEEGDCEEEEFEPSTQYEYGTEDDYQGKPLEFGATSAALQPEEEQEEDWLDDDSQQTVGQQDGSEDNQTTTIQTIVEVQPQLEMELTPVVQTIEVNSFSGYLKLTDNVYIKNADIVEEAKKVKPTVVVNAANVYLKHGGGVAGALNKATNNAMQVESDDYIATNGPLKVGGSCVLSGHNLAKHCLHVVGPNVNKGEDIQLLKSAYENFNQHEVLLAPLLSAGIFGADPIHSLRVCVDTVRTNVYLAVFDKNLYDKLVSSFLEMKSEKQVEQKIAEIPKEEVKPFITESKPSVEQRKQDDKKIKACVEEVTTTLEETKFLTENLLLYIDINGNLHPDSATLVSDIDITFLKKDAPYIVGDVVQEGVLTAVVIPTKKAGGTTEMLAKALRKVPTDNYITTYPGQGLNGYTVEEAKTVLKKCKSAFYILPSIISNEKQEILGTVSWNLREMLAHAEETRKLMPVCVETKAIVSTIQRKYKGIKIQEGVVDYGARFYFYTSKTTVASLINTLNDLNETLVTMPLGYVTHGLNLEEAARYMRSLKVPATVSVSSPDAVTAYNGYLTSSSKTPEEHFIETISLAGSYKDWSYSGQSTQLGIEFLKRGDKSVYYTSNPTTFHLDGEVITFDNLKTLLSLREVRTIKVFTTVDNINLHTQVVDMSMTYGQQFGPTYLDGADVTKIKPHNSHEGKTFYVLPNDDTLRVEAFEYYHTTDPSFLGRYMSALNHTKKWKYPQVNGLTSIKWADNNCYLATALLTLQQIELKFNPPALQDAYYRARAGEAANFCALILAYCNKTVGELGDVRETMSYLFQHANLDSCKRVLNVVCKTCGQQQTTLKGVEAVMYMGTLSYEQFKKGVQIPCTCGKQATKYLVQQESPFVMMSAPPAQYELKHGTFTCASEYTGNYQCGHYKHITSKETLYCIDGALLTKSSEYKGPITDVFYKENSYTTTIKPVTYKLDGVVCTEIDPKLDNYYKKDNSYFTEQPIDLVPNQPYPNASFDNFKFVCDNIKFADDLNQLTGYKKPASRELKVTFFPDLNGDVVAIDYKHYTPSFKKGAKLLHKPIVWHVNNATNKATYKPNTWCIRCLWSTKPVETSNSFDVLKSEDAQGMDNLACEDLKPVSEEVVENPTIQKDVLECNVKTTEVVGDIILKPANNSLKITEEVGHTDLMAAYVDNSSLTIKKPNELSRVLGLKTLATHGLAAVNSVPWDTIANYAKPFLNKVVSTTTNIVTRCLNRVCTNYMPYFFTLMLQLCTFTRSTNSRIKASMPTTIAKNTVKSVGKFCLEASFNYLKSPNFSKLINIIIWFLLLSVCLGSLIYSTAALGVLMSNLGMPSYCTGYREGYLNSTNVTIATYCTGSIPCSVCLSGLDSLDTYPSLETIQITISSFKWDLTAFGLVAEWFLAYILFTRFFYVLGLAAIMQLFFSYFAVHFISNSWLMWLIINLVQMAPISAMVRMYIFFASFYYVWKSYVHVVDGCNSSTCMMCYKRNRATRVECTTIVNGVRRSFYVYANGGKGFCKLHNWNCVNCDTFCAGSTFISDEVARDLSLQFKRPINPTDQSSYIVDSVTVKNGSIHLYFDKAGQKTYERHSLSHFVNLDNLRANNTKGSLPINVIVFDGKSKCEESSAKSASVYYSQLMCQPILLLDQALVSDVGDSAEVAVKMFDAYVNTFSSTFNVPMEKLKTLVATAEAELAKNVSLDNVLSTFISAARQGFVDSDVETKDVVECLKLSHQSDIEVTGDSCNNYMLTYNKVENMTPRDLGACIDCSARHINAQVAKSHNIALIWNVKDFMSLSEQLRKQIRSAAKKNNLPFKLTCATTRQVVNVVTTKIALKGG

SEQ ID NO: 16168 - protein, 1946 aa, Artificial Sequence
  SARS-CoV-2__MT641496.1__non-structural protein 3 (NSP3)
MAPTKVTFGDDTVIEVQGYKSVNITFELDERIDKVLNEKCSAYTVELGTEVNEFACVVADAVIKTLQPVSELLTPLGIDLDEWSMATYYLFDESGEFKLASHMYCSFYPPDEDEEEGDCEEEEFEPSTQYEYGTEDDYQGKPLEFGATSAALQPEEEQEEDWLDDDSQQTVGQQDGSEDNQTTTIQTIVEVQPQLEMELTPVVQTIEVNSFSGYLKLTDNVYIKNADIVEEAKKVKPTVVVNAANVYLKHGGGVAGALNKATNNAMQVESDDYIATNGPLKVGGSCVLSGHNLAKHCLHVVGPNVNKGEDIQLLKSAYENFNQHEVLLAPLLSAGIFGADPIHSLRVCVDTVRTNVYLAVFDKNLYDKLVSSFLEMKSEKQVEQKIAEIPKEEVKPFITESKPSVEQRKQDDKKIKACVEEVTTTLEETKFLTENLLLYIDINGNLHPDSATLVSDIDITFLKKDAPYIVGDVVQEGVLTAVVIPTKKAGGTTEMLAKALRKVPTDNYITTYPGQGLNGYTVEEAKTVLKKCKSAFYILPSIISNEKQEILGTVSWNLREMLAHAEETRKLMPVCVETKAIVSTIQRKYKGIKIQEGVVDYGARFYFYTSKTTVASLINTLNDLNETLVTMPLGYVTHGLNLEEAARYMRSLKVPATVSVSSPDAVTAYNGYLTSSSKTPEEHFIETISLAGSYKDWSYSGQSTQLGIEFLKRGDKSVYYTSNPTTFHLDGEVITFDNLKTLLSLREVRTIKVFTTVDNINLHTQVVDMSMTYGQQFGPTYLDGADVTKIKPHNSHEGKTFYVLPNDDTLRVEAFEYYHTTDPSFLGRYMSALNHTKKWKYPQVNGLTSIKWADNNCYLATALLTLQQIELKFNPPALQDAYYRARAGEAANFCALILAYCNKTVGELGDVRETMSYLFQHANLDSCKRVLNVVCKTCGQQQTTLKGVEAVMYMGTLSYEQFKKGVQIPCTCGKQATKYLVQQESPFVMMSAPPAQYELKHGTFTCASEYTGNYQCGHYKHITSKETLYCIDGALLTKSSEYKGPITDVFYKENSYTTTIKPVTYKLDGVVCTEIDPKLDNYYKKDNSYFTEQPIDLVPNQPYPNASFDNFKFVCDNIKFADDLNQLTGYKKPASRELKVTFFPDLNGDVVAIDYKHYTPSFKKGAKLLHKPIVWHVNNATNKATYKPNTWCIRCLWSTKPVETSNSFDVLKSEDAQGMDNLACEDLKPVSEEVVENPTIQKDVLECNVKTTEVVGDIILKPANNSLKITEEVGHTDLMAAYVDNSSLTIKKPNELSRVLGLKTLATHGLAAVNSVPWDTIANYAKPFLNKVVSTTTNIVTRCLNRVCTNYMPYFFTLLLQLCTFTRSTNSRIKASMPTTIAKNTVKSVGKFCLEASFNYLKSPNFSKLINIIIWFLLLSVCLGSLIYSTAALGVLMSNLGMPSYCTGYREGYLNSTNVTIATYCTGSIPCSVCLSGLDSLDTYPSLETIQITISSFKWDLTAFGLVAEWFLAYILFTRFFYVLGLAAIMQLFFSYFAVHFISNSWLMWLIINLVQMAPISAMVRMYIFFASFYYVWKSYVHVVDGCNSSTCMMCYKRNRATRVECTTIVNGVRRSFYVYANGGKGFCKLHNWNCVNCDTFCAGSTFISDEVARDLSLQFKRPINPTDQSSYIVDSVTVNNGSIHLYFDKAGQKTYERHSLSHFVNLDNLRANNTKGSLPINVIVFDGKSKCEESSAKSASVYYSQLMCQPILLLDQALVSDVGDSAEVAVKMFDAYVNTFSSTFNVPMEKLKTLVATAEAELAKNVSLDNVLSTFISAARQGFVDSDVETKDVVECLKLSHQSDIEVTGDSCNNYMLTYNKVENMTPRDLGACIDCSARHINAQVAKSHNIALIWNVKDFMSLSEQLRKQIRSAAKKNNLPFKLTCATTRQVVNVVTTKIALKGG

SEQ ID NO: 16169 - protein, 1946 aa, Artificial Sequence
  SARS-CoV-2__MT641501.1__non-structural protein 3 (NSP3)
MAPTKVTFGDDTVIEVQGYKSVNITFELDERIDKVLNEKCSAYTVELGTEVNEFACVVADAVIKTLQPVSELLTPLGIDLDEWSMATYYLFDESGEFKLASHMYCSFYPPDEDEEEGDCEEEEFEPSTQYEYGTEDDYQGKPLEFGATSAALQPEEEQEEDWLDDDSQQTVGQQDGSEDNQTTTIQTIVEVQPQLEMELTPVVQTIEVNSFSGYLKLTDNVYIKNADIVEEAKKVKPTVVVNAANVYLKHGGGVAGALNKATNNAMQVESDDYIATNGPLKVGGSCVLSGHNLAKHCLHVVGPNVNKGEDIQLLKSAYENFNQHEVLLAPLLSAGIFGADPIHSLRVCVDTVRTNVYLAVFDKNLYDKLVSSFLEMKSEKQVEQKIAEIPKEEVKPFITESKPSVEQRKQDDKKIKACVEEVTTTLEETKFLTENLLLYIDINGNLHPDSATLVSDIDITFLKKDAPYIVGDVVQEGVLTAVVIPTKKAGGTTEMLAKALRKVPTDNYITTYPGQGLNGYTVEEAKTVLKKCKSAFYILPSIISNEKQEILGTVSWNLREMLAHAEETRKLMPVCVETKAIVSTIQRKYKGIKIQEGVVDYGARFYFYTSKTTVASLINTLNDLNETLVTMPLGYVTHGLNLEEAARYMRSLKVPATVSVSSPDAVTAYNGYLTSSSKTPEEHFIETISLAGSYKDWSYSGQSTQLGIEFLKRGDKSVYYTSNPTTFHLDGEVITFDNLKTLLSLREVRTIKVFTTVDNINLHTQVVDMSMTYGQQFGPTYLDGADVTKIKPHNSHEGKTFYVLPNDDTLRVEAFEYYHTTDPSFLGRYMSALNHTKKWKYPQVNGLTSIKWADNNCYLATALLTLQQIELKFNPPALQDAYYRARAGEAANFCALILAYCNKTVGELGDVRETMSYLFQHANLDSCKRVLNVVCKTCGQQQTTLKGVEAVMYMGTLSYEQFKKGVQIPCTCGKQATKYLVQQESPFVMMSAPPAQYELKHGTFICASEYTGNYQCGHYKHITSKETLYCIDGALLTKSSEYKGPITDVFYKENSYTTTIKPVTYKLDGVVCTEIDPKLDNYYKKDNSYFTEQPIDLVPNQPYPNASFDNFKFVCDNIKFADDLNQLTGYKKPASRELKVTFFPDLNGDVVAIDYKHYTPSFKKGAKLLHKPIVWHVNNATNKATYKPNTWCIRCLWSTKPVETSNSFDVLKSEDAQGMDNLACEDLKPVSEEVVENPTIQKDVLECNVKTTEVVGDIILKPANNSLKITEEVGHTDLMAAYVDNSSLTIKKPNELSRVLGLKTLATHGLAAVNSVPWDTIANYARPFLNKVVSTTTNIVTRCLNRVCTNYMPYFFTLLLQLCTFTRSTNSRIKASMPTTIAKNTVKSVGKFCLEASFNYLKSPNFSKLINIIIWFLLLSVCLGSLIYSTAALGVLMSNLGMPSYCTGYREGYLNSTNVTIATYCTGSIPCSVCLSGLDSLDTYPSLETIQITISSFKWDLTAFGLVAEWFLAYILFTRFFYVLGLAAIMQLFFSYFAVHFISNSWLMWLIINLVQMAPISAMVRMYIFFASFYYVWKSYVHVVDGCNSSTCMMCYKRNRATRVECTTIVNGVRRSFYVYANGGKGFCKLHNWNCVNCDTFCAGSTFISDEVARDLSLQFKRPINPTDQSSYIVDSVTVKNGSIHLYFDKAGQKTYERHSLSHFVNLDNLRANNTKGSLPINVIVFDGKSKCEESSAKSASVYYSQLMCQPILLLDQALVSDVGDSAEVAVKMFDAYVNTFSSTFNVPMEKLKTLVATAEAELAKNVSLDNVLSTFISAARQGFVDSDVETKDVVECLKLSHQSDIEVTGDSCNNYMLTYNKVENMTPRDLGACIDCSARHINAQVAKSHNIALIWNVKDFMSLSEQLRKQIRSAAKKNNLPFKLTCATTRQVVNVVTTKIALKGG

SEQ ID NO: 16170 - protein, 1946 aa, Artificial Sequence
  SARS-CoV-2__MT641511.1__non-structural protein 3 (NSP3)
MAPTKVTFGDDTVIEVQGYKSVNITFELDERIDKVLNEKCSAYTVELGTEVNEFACVVADAVIKTLQPVSELLTPLGIDLDEWSMATYYLFDESGEFKLASHMYCSFYPPDEDEEEGDCEEEEFEPSTQYEYGTEDDYQGKPLEFGATSAALQPEEEQEEDWLDDDSQQTVGQQDGSEDNQTTTIQTIVEVQPQLEMELTPVVQTIEVNSFSGYLKLTDNVYIKNADIVEEAKKVKPTVVVNAANVYLKHGGGVAGALNKATNNAMQVESDDYIATNGPLKVGGSCVLSGHNLAKHCLHVVGPNVNKGEDIQLLKSAYENFNQHEVLLAPLLSAGIFGADPIHSLRVCVDTVRTNVYLAVFDKNLYDKLVSSFLEMKSEKQVEQKIAEIPKEEVKPFITESKPSVEQRKQDDKKIKACVEEVTTTLEETKFLTENLLLYIDINGNLHPDSATLVSDIDITFLKKDAPYIVGDVVQEGVLTAVVIPTKKAGGTTEMLAKALRKVPTDNYITTYPGQGLNGYTVEEAKTVLKKCKSAFYILPSIISNEKQEILGTVSWNLREMLAHAEETRKLMPVCVETKAIVSTIQRKYKGIKIQEGVVDYGARFYFYTSKTTVASLINTLNDLNETLVTMPLGYVTHGLNLEEAARYMRSLKVPATVSVSSPDAVTAYNGYLTSSSKTPEEHFIETISLAGSYKDWSYSGQSTQLGIEFLKRGDKSVYYTSNPTTFHLDGEVITFDNLKTLLSLREVRTIKVFTTVDNINLHTQVVDMSMTYGQQFGPTYLDGADVTKIKPHNSHEGKTFYVLPNDDTLRVEAFEYYHTTDPSFLGRYMSALNHTKKWKYPQVNGLTSIKWADNNCYLATALLTLQQIELKFNPPALQDAYYRARAGEAANFCALILAYCNKTVGELGDVRETMSYLFQHANLDSCKRVLNVVCKTCGQQQTTLKGVEAVMYMGTLSYEQFKKGVQIPCTCGKQATKYLVQQESPFVMMSAPPAQYELKHGTFTCASEYTGNYQCGHYKHITSKETLYCIDGALLTKSSEYKGPITDVFYKENSYTTTIKPVTYKLDGVVCTEIDPKLDNYYKKDNSYFTEQPIDLVPNQPYPNASFDNFKFVCDNIKFADDLNQLTGYKKPASRELKVTFFPDLNGDVVAIDYKHYTPSFKKGAKLLHKPIVWHVNNATNKATYKPNTWCIRCLWSTKPVETSNSFDVLKSEDAQGMDNLACEDLKPVSEEVVENPTIQKDVLECNVKTTEVVGDIILKPANNSLKITEEVGHTDLMAAYVDNSSLTIKKPNELSRVLGLKTLATHGLAAVNSVPWDTIANYAKPFLNKVVSTTTNIVTRCLNRVCTNYMPYFFTLLLQLCTFTRSTNSRIKASMPTTIAKNTVKSVGKFCLEASFNYLKSPNFSKLINIIIWFLLLSVCLGSLIYSTAALGVLMSNLGMPSYCTGYREGYLNSTNVTIATYCTGSIPCSVCLSGLDSLDTYPSLETIQITISSFKWDLTAFGLVAEWFLAYILFTRFFYVLGLAAIMQLFFSYFAVHFISNSWLMWLIINLVQMAPISAMVRMYIFFASFYYVWKSYVHVVDGCNSSTCMMCYKRNRATRVECTTIVNGVRRSFYVYANGGKGFCKLHNWNCVNCDTFCAGSTFISDEVARDLSLQFKRPINPTDQSSYIVDSVTVKNGSIHLYFDKAGQKTYERHSLSHFVNLDNLRANSTKGSLPINVIVFDGKSKCEESSAKSASVYYSQLMCQPILLLDQALVSDVGDSAEVAVKMFDAYVNTFSSTFNVPMEKLKTLVATAEAELAKNVSLDNVLSTFISAARQGFVDSDVETKDVVECLKLSHQSDIEVTGDSCNNYMLTYNKVENMTPRDLGACIDCSARHINAQVAKSHNIALIWNVKDFMSLSEQLRKQIRSAAKKNNLPFKLTCATTRQVVNVVTTKIALKGG

SEQ ID NO: 16171 - protein, 1946 aa, Artificial Sequence
  SARS-CoV-2__MT641518.1__non-structural protein 3 (NSP3)
MAPTKVTFGDDTVIEVQGYKSVNITFELDERIDKVLNEKCSAYTVELGTEVNEFACVVADAVIKTLQPVSELLTPLGIDLDEWSMATYYLFDESGEFKLASHMYCSFYPPDEDEEEGDCEEEEFEPSTQYEYGTEDDYQGKPLEFGATSAALQPEEEQEEDWLDDDSQQTVGQQDGSEDNQTTTIQTIVEVQPQLEMELTPVVQTIEVNSFSGYLKLTDNVYIKNADIVEEAKKVKPTVVVNAANVYLKHGGGVAGALNKATNNAMQVESDDYIATNGPLKVGGSCVLSGHNLAKHCLHVVGPNVNKGEDIQLLKSAYENFNQHEVLLAPLLSAGIFGADPIHSLRVCVDTVRTNVYLAVFDKNLYDKLVSSFLEMKSEKQVEQKIAEIPKEEVKPFITESKPSVEQRKQDDKKIKACVEEVTTTLEETKFLTENLLLYIDINGNLHPDSATLVSDIDITFLKKDAPYIVGDVVQEGVLTAVVIPTKKAGGTTEMLAKALRKVPTDNYITTYPGQGLNGYTVEEAKTVLKKCKSAFYILPSIISNEKQEILGTVSWNLREMLAHAEETRKLMPVCVETKAIVSTIQRKYKGIKIQEGVVDYGARFYFYTSKTTVASLINTLNDLNETLVTMPLGYVTHGLNLEEAARYMRSLKVPATVSVSSPDAVTAYNGYLTSSSKTPEEHFIETISLAGSYKDWSYSGQSTQLGIEFLKRGDKSVYYTSNPTTFHLDGEVITFDNLKTLLSLREVRTIKVFTTVDNINLHTQVVDMSMTYGQQFGPTYLDGADVTKIKPHNSHEGKTFYVLPNDDTLRVEAFEYYHTTDPSFLGRYMSALNHTKKWKYPQVNGLTSIKWADNNCYLATALLTLQQIELKFNPPALQDAYYRARAGEAANFCALILAYCNKTVGELGDVRETMSYLFQHANLDSCKRVLNVVCKTCGQQQTTLKGVEAVMYMGTLSYEQFKKGVQIPCTCGKQATKYLVQQESPFVMMSAPPAQYELKHGTFTCASEYTGNYQCGHYKHITSKETLYCIDGALLTKSSEYKGPITDVFYKENSYTTTIKPVTYKLDGVVCTEIDPKLDNYYKKDNSYFTEQPIDLVPNQPYPNASFDNFKFVCDNIKFADDLNQLTGYKKPASRELKVTFFPDLNGDVVAIDYKHYTPSFKKGAKLLHKPIVWHVNNATNKATYKPNTWCIRCLWSTKPVETSNSFDVLKSEDAQGMDNLACEDLKPVSEEVVENPTIQKDVLECNVKTTEVVGDIILKPANNSLKITEEVGHTDLMAAYVDNSSLTIKKPNELSRVLGLKTLATHGLAAVNSVPWDTIANYAKPFLNKVVSTTTNIVTRCLNRVCTNYMPYFFTLLLQLCTFTRSTNSRIKASMPTTIAKNTVKSVGKFCLEASFNYLKSPNFSKLINIIIWFLLLSVCLGSLIYSTAALGVLMSNLGMPSYCTGYREGYLNSTNVTIATYCTGSIPCSVCLSGLDSLDTYPSLETIQITISSFKWDLTAFGLVAEWFLAYILFTRFFYVLGLAAIMQLFFSYFAVHFISNSWLMWLIINLVQMAPISAMVRMYIFFASFYYVWKSYVHVVDGCNSSTCMMCYKRNRATRVECTTIVNGVRRSFYVYANGGKGFCKLHNWNCVNCDTFCAGSTFISDEVARDLSLQFKRPINPTDQSSYIVDSVTVKNGSIHLYFDKAGQKTYERHSLSHFVNLDNLRANNTKGSLPINVIVFDGKSKCEESSAKSASVYYSQLMCQPILLLDQALVSDVGDSAEVAVKMFDAYVNTFSSTFNVPMEKLKTLVATAEAELAKNVSLDNVLSTFISAARQGFVDSDVETKDVVECLKLSHQFDIEVTGDSCNNYMLTYNKVENMTPRDLGACIDCSARHINAQVAKSHNIALIWNVKDFMSLSEQLRKQIRSAAKKNNLPFKLTCATTRQVVNVVTTKIALKGG

SEQ ID NO: 16172 - protein, 1946 aa, Artificial Sequence
  SARS-CoV-2__MT641645.1__non-structural protein 3 (NSP3)
MAPTKVTFGDDTVIEVQGYKSVNITFELDERIDKVLNEKCSAYTVELGTEVNEFACVVADAVIKTLQPVSELLTPLGIDLDEWSMATYYLFDESGEFKLASHMYCSFYPPDEDEEEGDCEEEEFEPSIQYEYGTEDDYQGKPLEFGATSAALQPEEEQEEDWLDDDSQQTVGQQDGSEDNQTTTIQTIVEVQPQLEMELTPVVQTIEVNSFSGYLKLTDNVYIKNADIVEEAKKVKPTVVVNAANVYLKHGGGVAGALNKATNNAMQVESDDYIATNGPLKVGGSCVLSGHNLAKHCLHVVGPNVNKGEDIQLLKSAYENFNQHEVLLAPLLSAGIFGADPIHSLRVCVDTVRTNVYLAVFDKNLYDKLVSSFLEMKSEKQVEQKIAEIPKEEVKPFITESKPSVEQRKQDDKKIKACVEEVTTTLEETKFLTENLLLYIDINGNLHPDSATLVSDIDITFLKKDAPYIVGDVVQEGVLTAVVIPTKKAGGTTEMLAKALRKVPTDNYITTYPGQGLNGYTVEEAKTVLKKCKSAFYILPSIISNEKQEILGTVSWNLREMLAHAEETRKLMPVCVETKAIVSTIQRKYKGIKIQEGVVDYGARFYFYTSKTTVASLINTLNDLNETLVTMPLGYVTHGLNLEEAARYMRSLKVPATVSVSSPDAVTAYNGYLTSSSKTPEEHFIETISLAGSYKDWSYSGQSTQLGIEFLKRGDKSVYYTSNPTTFHLDGEVITFDNLKTLLSLREVRTIKVFTTVDNINLHTQVVDMSMTYGQQFGPTYLDGADVTKIKPHNSHEGKTFYVLPNDDTLRVEAFEYYHTTDPSFLGRYMSALNHTKKWKYPQVNGLTSIKWADNNCYLATALLTLQQIELKFNPPALQDAYYRARAGEAANFCALILAYCNKTVGELGDVRETMSYLFQHANLDSCKRVLNVVCKTCGQQQTTLKGVEAVMYMGTLSYEQFKKGVQIPCTCGKQATKYLVQQESPFVMMSAPPAQYELKHGTFTCASEYTGNYQCGHYKHITSKETLYCIDGALLTKSSEYKGPITDVFYKENSYTTTIKPVTYKLDGVVCTEIDPKLDNYYKKDNSYFTEQPIDLVPNQPYPNASFDNFKFVCDNIKFADDLNQLTGYKKPASRELKVTFFPDLNGDVVAIDYKHYTPSFKKGAKLLHKPIVWHVNNATNKATYKPNTWCIRCLWSTKPVETSNSFDVLKSEDAQGMDNLACEDLKPVSEEVVENPTIQKDVLECNVKTTEVVGDIILKPANNSLKITEEVGHTDLMAAYVDNSSLTIKKPNELSRVLGLKTLATHGLAAVNSVPWDTIANYAKPFLNKVVSTTTNIVTRCLNRVCTNYMPYFFTLLLQLCTFTRSTNSRIKASMPTTIAKNTVKSVGKFCLEASFNYLKSPNFSKLINIIIWFLLLSVCLGSLIYSTAALGVLMSNLGMPSYCTGYREGYLNSTNVTIATYCTGSIPCSVCLSGLDSLDTYPSLETIQITISSFKWDLTAFGLVAEWFLAYILFTRFFYVLGLAAIMQLFFSYFAVHFISNSWLMWLIINLVQMAPISAMVRMYIFFASFYYVWKSYVHVVDGCNSSTCMMCYKRNRATRVECTTIVNGVRRSFYVYANGGKGFCKLHNWNCVNCDTFCAGSTFISDEVARDLSLQFKRPINPTDQSSYIVDSVTVKNGSIHLYFDKAGQKTYERHSLSHFVNLDNLRANNTKGSLPINVIVFDGKSKCEESSAKSASVYYSQLMCQPILLLDQALVSDVGDSAEVAVKMFDAYVNTFSSTFNVPMEKLKTLVATAEAELAKNVSLDNVLSTFISAARQGFVDSDVETKDVVECLKLSHQSDIEVTGDSCNNYMLTYNKVENMTPRDLGACIDCSARHINAQVAKSHNIALIWNVKDFMSLSEQLRKQIRSAAKKNNLPFKLTCATTRQVVNVVTTKIALKGG

SEQ ID NO: 16173 - protein, 1946 aa, Artificial Sequence
  SARS-CoV-2__MT641656.1__non-structural protein 3 (NSP3)
MAPTKVTFGDDTVIEVQGYKSVNITFELDERIDKVLNEKCSAYTVELGTEVNEFACVVADAVIKTLQPVSELLTPLGIDLDEWSMATYYLFDESGEFKLASHMYCSFYPPDEDEEEGDCEEEEFEPSTQYEYGTEDDYQGKPLEFGATSAALQPEEEQEEDWLDDDSQQTVGQQDGSEDNQTTTIQTIVEVQPQLEMELTPVVQTIEVNSFSGYLKLTDNVYIKNADIVEEAKKVKPTVVVNAANVYLKHGGGVAGALNKATNNAMQVESDDYIATNGPLKVGGSCVLSGHNLAKHCLHVVGPNVNKGEDIQLLKSAYENFNQHEVLLAPLLSAGIFGADPIHSLRVCVDTVRTNVYLAVFDKNLYDKLVSSFLEMKSEKQVEQKIAEIPKEEVKPFITESKPSVEQRKQDDKKIKACVEEVTTTLEETKFLTENLLLYIDINGNLHPDSATLVSDIDITFLKKDAPYIVGDVVQEGVLTAVVIPTKKAGGTTEMLAKALRKVPTDNYITTYPGQGLNGYTVEEAKTVLKKCKSAFYILPSIISNEKQEILGTVSWNLREMLAHAEETRKLMPVCVETKAIVSTIQRKYKGIKIQEGVVDYGARFYFYTSKTTVVSLINTLNDLNETLVTMPLGYVTHGLNLEEAARYMRSLKVPATVSVSSPDAVTAYNGYLTSSSKTPEEHFIETISLAGSYKDWSYSGQSTQLGIEFLKRGDKSVYYTSNPTTFHLDGEVITFDNLKTLLSLREVRTIKVFTTVDNINLHTQVVDMSMTYGQQFGPTYLDGADVTKIKPHNSHEGKTFYVLPNDDTLRVEAFEYYHTTDPSFLGRYMSALNHTKKWKYPQVNGLTSIKWADNNCYLATALLTLQQIELKFNPPALQDAYYRARAGEAANFCALILAYCNKTVGELGDVRETMSYLFQHANLDSCKRVLNVVCKTCGQQQTTLKGVEAVMYMGTLSYEQFKKGVQIPCTCGKQATKYLVQQESPFVMMSAPPAQYELKHGTFTCASEYTGNYQCGHYKHITSKETLYCIDGALLTKSSEYKGPITDVFYKENSYTTTIKPVTYKLDGVVCTEIDPKLDNYYKKDNSYFTEQPIDLVPNQPYPNASFDNFKFVCDNIKFADDLNQLTGYKKPASRELKVTFFPDLNGDVVAIDYKHYTPSFKKGAKLLHKPIVWHVNNATNKATYKPNTWCIRCLWSTKPVETSNSFDVLKSEDAQGMDNLACEDLKPVSEEVVENPTIQKDVLECNVKTTEVVGDIILKPANNSLKITEEVGHTDLMAAYVDNSSLTIKKPNELSRVLGLKTLATHGLAAVNSVPWDTIANYAKPFLNKVVSTTTNIVTRCLNRVCTNYMPYFFTLLLQLCTFTRSTNSRIKASMPTTIAKNTVKSVGKFCLEASFNYLKSPNFSKLINIIIWFLLLSVCLGSLIYSTAALGVLMSNLGMPSYCTGYREGYLNSTNVTIATYCTGSIPCSVCLSGLDSLDTYPSLETIQITISSFKWDLTAFGLVAEWFLAYILFTRFFYVLGLAAIMQLFFSYFAVHFISNSWLMWLIINLVQMAPISAMVRMYIFFASFYYVWKSYVHVVDGCNSSTCMMCYKRNRATRVECTTIVNGVRRSFYVYANGGKGFCKLHNWNCVNCDTFCAGSTFISDEVARDLSLQFKRPINPTDQSSYIVDSVTVKNGSIHLYFDKAGQKTYERHSLSHFVNLDNLRANNTKGSLPINVIVFDGKSKCEESSAKSASVYYSQLMCQPILLLDQALVSDVGDSAEVAVKMFDAYVNTFSSTFNVPMEKLKTLVATAEAELAKNVSLDNVLSTFISAARQGFVDSDVETKDVVECLKLSHQSDIEVTGDSCNNYMLTYNKVENMTPRDLGACIDCSARHINAQVAKSHNIALIWNVKDFMSLSEQLRKQIRSAAKKNNLPFKLTCATTRQVVNVVTTKIALKGG
